United States Patent Application Publication US 2026/0265736 A1 - sequence listing, part 4

SEQ ID NO: 3217 - protein, 2021 aa, synthetic construct
MPAAKRVKLDGGDKKYSIGLDIGTNSVGWAVITDEYKVPSKKFKVLGNTDRHSIKKNLIGALLFDSGETAEATRLKRTARRRYTRRKNRICYLQEIFSNEMAKVDDSFFHRLEESFLVEEDKKHERHPIFGNIVDEVAYHEKYPTIYHLRKKLVDSTDKADLRLIYLALAHMIKFRGHFLIEGDLNPDNSDVDKLFIQLVQTYNQLFEENPINASGVDAKAILSARLSKSRRLENLIAQLPGEKKNGLFGNLIALSLGLTPNFKSNFDLAEDAKLQLSKDTYDDDLDNLLAQIGDQYADLFLAAKNLSDAILLSDILRVNTEITKAPLSASMIKRYDEHHQDLTLLKALVRQQLPEKYKEIFFDQSKNGYAGYIDGGASQEEFYKFIKPILEKMDGTEELLVKLNREDLLRKQRTFDNGSIPHQIHLGELHAILRRQEDFYPFLKDNREKIEKILTFRIPYYVGPLARGNSRFAWMTRKSEETITPWNFEEVVDKGASAQSFIERMTNFDKNLPNEKVLPKHSLLYEYFTVYNELTKVKYVTEGMRKPAFLSGEQKKAIVDLLFKTNRKVTVKQLKEDYFKKIECFDSVEISGVEDRFNASLGTYHDLLKIIKDKDFLDNEENEDILEDIVLTLTLFEDREMIEERLKTYAHLFDDKVMKQLKRRRYTGWGRLSRKLINGIRDKQSGKTILDFLKSDGFANRNFMQLIHDDSLTFKEDIQKAQVSGQGDSLHEHIANLAGSPAIKKGILQTVKVVDELVKVMGRHKPENIVIEMARENQTTQKGQKNSRERMKRIEEGIKELGSQILKEHPVENTQLQNEKLYLYYLQNGRDMYVDQELDINRLSDYDVDHIVPQSFLKDDSIDNKVLTRSDKARGKSDNVPSEEVVKKMKNYWRQLLNAKLITQRKFDNLTKAERGGLSELDKAGFIKRQLVETRQITKHVAQILDSRMNTKYDENDKLIREVKVITLKSKLVSDFRKDFQFYKVREINNYHHAHDAYLNAVVGTALIKKYPKLESEFVYGDYKVYDVRKMIAKSEQEIGKATAKYFFYSNIMNFFKTEITLANGEIRKRPLIETNGETGEIVWDKGRDFATVRKVLSMPQVNIVKKTEVQTGGFSKESILPKRNSDKLIARKKDWDPKKYGGFDSPTVAYSVLVVAKVEKGKSKKLKSVKELLGITIMERSSFEKNPIDFLEAKGYKEVKKDLIIKLPKYSLFELENGRKRMLASAGELQKGNELALPSKYVNFLYLASHYEKLKGSPEDNEQKQLFVEQHKHYLDEIIEQISEFSKRVILADANLDKVLSAYNKHRDKPIREQAENIIHLFTLTNLGAPAAFKYFDTTIDRKRYTSTKEVLDATLIHQSITGLYETRIDLSQLGGDGGPAPEAAAKGGGRDIMKDIKVRLMTDSPDDSQDLMIGAIESNLFADQISWKSDQPVWLNQWPLKQEKLQALQQLVTEQLQLGHLEESNSPWNTPVFVIKKKSGKWRLLQDLRAVNATMHDMGALQPGLPSPVAVPKGWEIIIIDLQDCFFNIKLHPEDCKRFAFSVPSPNFKRPYQRFQWKVLPQGMKNSPTLCQKFVDKAILTVRDKYQDSYIVHYMDDILLAHPSRSIVDEILTSMIQALNKHGLVVSTEKIQKYDNLKYLGTHIQGDSVSYQKLQIRTDKLRTLNDFQKLLGNINWIRPFLKLTTGELKPLFEILNGDSNPISTRKLTPEACKALQLMNERLSTARVKRLDLSQPWSLCILKTEYTPTACLWQDGVVEWIHLPHISPKVITPYDIFCTQLIIKGRHRSKELFSKDPDYIVVPYTKVQFDLLLQEKEDWPISLLGFLGEVHFHLPKDPLLTFTLQTAIIFPHMTSTTPLEKGIVIFTDGSANGRSVTYIQGREPIIKENTQNTAQQAEIVAVITAFEEVSQPFNLYTDSKYVTGLFPEIETATLSPRTKIYTELKHLQRLIHKRQEKFYIGHIRGHTGLPGPLAQGNAYADSLTRILTAGKRTADGSEFEKRTADGSEFESPKKKAKVE

SEQ ID NO: 3218 - protein, 2018 aa, synthetic construct
MPAAKRVKLDGGDKKYSIGLDIGTNSVGWAVITDEYKVPSKKFKVLGNTDRHSIKKNLIGALLFDSGETAEATRLKRTARRRYTRRKNRICYLQEIFSNEMAKVDDSFFHRLEESFLVEEDKKHERHPIFGNIVDEVAYHEKYPTIYHLRKKLVDSTDKADLRLIYLALAHMIKFRGHFLIEGDLNPDNSDVDKLFIQLVQTYNQLFEENPINASGVDAKAILSARLSKSRRLENLIAQLPGEKKNGLFGNLIALSLGLTPNFKSNFDLAEDAKLQLSKDTYDDDLDNLLAQIGDQYADLFLAAKNLSDAILLSDILRVNTEITKAPLSASMIKRYDEHHQDLTLLKALVRQQLPEKYKEIFFDQSKNGYAGYIDGGASQEEFYKFIKPILEKMDGTEELLVKLNREDLLRKQRTFDNGSIPHQIHLGELHAILRRQEDFYPFLKDNREKIEKILTFRIPYYVGPLARGNSRFAWMTRKSEETITPWNFEEVVDKGASAQSFIERMTNFDKNLPNEKVLPKHSLLYEYFTVYNELTKVKYVTEGMRKPAFLSGEQKKAIVDLLFKTNRKVTVKQLKEDYFKKIECFDSVEISGVEDRFNASLGTYHDLLKIIKDKDFLDNEENEDILEDIVLTLTLFEDREMIEERLKTYAHLFDDKVMKQLKRRRYTGWGRLSRKLINGIRDKQSGKTILDFLKSDGFANRNFMQLIHDDSLTFKEDIQKAQVSGQGDSLHEHIANLAGSPAIKKGILQTVKVVDELVKVMGRHKPENIVIEMARENQTTQKGQKNSRERMKRIEEGIKELGSQILKEHPVENTQLQNEKLYLYYLQNGRDMYVDQELDINRLSDYDVDHIVPQSFLKDDSIDNKVLTRSDKARGKSDNVPSEEVVKKMKNYWRQLLNAKLITQRKFDNLTKAERGGLSELDKAGFIKRQLVETRQITKHVAQILDSRMNTKYDENDKLIREVKVITLKSKLVSDFRKDFQFYKVREINNYHHAHDAYLNAVVGTALIKKYPKLESEFVYGDYKVYDVRKMIAKSEQEIGKATAKYFFYSNIMNFFKTEITLANGEIRKRPLIETNGETGEIVWDKGRDFATVRKVLSMPQVNIVKKTEVQTGGFSKESILPKRNSDKLIARKKDWDPKKYGGFDSPTVAYSVLVVAKVEKGKSKKLKSVKELLGITIMERSSFEKNPIDFLEAKGYKEVKKDLIIKLPKYSLFELENGRKRMLASAGELQKGNELALPSKYVNFLYLASHYEKLKGSPEDNEQKQLFVEQHKHYLDEIIEQISEFSKRVILADANLDKVLSAYNKHRDKPIREQAENIIHLFTLTNLGAPAAFKYFDTTIDRKRYTSTKEVLDATLIHQSITGLYETRIDLSQLGGDGGPAPAPGGGRDIMKDIKVRLMTDSPDDSQDLMIGAIESNLFADQISWKSDQPVWLNQWPLKQEKLQALQQLVTEQLQLGHLEESNSPWNTPVFVIKKKSGKWRLLQDLRAVNATMHDMGALQPGLPSPVAVPKGWEIIIIDLQDCFFNIKLHPEDCKRFAFSVPSPNFKRPYQRFQWKVLPQGMKNSPTLCQKFVDKAILTVRDKYQDSYIVHYMDDILLAHPSRSIVDEILTSMIQALNKHGLVVSTEKIQKYDNLKYLGTHIQGDSVSYQKLQIRTDKLRTLNDFQKLLGNINWIRPFLKLTTGELKPLFEILNGDSNPISTRKLTPEACKALQLMNERLSTARVKRLDLSQPWSLCILKTEYTPTACLWQDGVVEWIHLPHISPKVITPYDIFCTQLIIKGRHRSKELFSKDPDYIVVPYTKVQFDLLLQEKEDWPISLLGFLGEVHFHLPKDPLLTFTLQTAIIFPHMTSTTPLEKGIVIFTDGSANGRSVTYIQGREPIIKENTQNTAQQAEIVAVITAFEEVSQPFNLYTDSKYVTGLFPEIETATLSPRTKIYTELKHLQRLIHKRQEKFYIGHIRGHTGLPGPLAQGNAYADSLTRILTAGKRTADGSEFEKRTADGSEFESPKKKAKVE

SEQ ID NO: 3219 - protein, 2025 aa, synthetic construct
MPAAKRVKLDGGDKKYSIGLDIGTNSVGWAVITDEYKVPSKKFKVLGNTDRHSIKKNLIGALLFDSGETAEATRLKRTARRRYTRRKNRICYLQEIFSNEMAKVDDSFFHRLEESFLVEEDKKHERHPIFGNIVDEVAYHEKYPTIYHLRKKLVDSTDKADLRLIYLALAHMIKFRGHFLIEGDLNPDNSDVDKLFIQLVQTYNQLFEENPINASGVDAKAILSARLSKSRRLENLIAQLPGEKKNGLFGNLIALSLGLTPNFKSNFDLAEDAKLQLSKDTYDDDLDNLLAQIGDQYADLFLAAKNLSDAILLSDILRVNTEITKAPLSASMIKRYDEHHQDLTLLKALVRQQLPEKYKEIFFDQSKNGYAGYIDGGASQEEFYKFIKPILEKMDGTEELLVKLNREDLLRKQRTFDNGSIPHQIHLGELHAILRRQEDFYPFLKDNREKIEKILTFRIPYYVGPLARGNSRFAWMTRKSEETITPWNFEEVVDKGASAQSFIERMTNFDKNLPNEKVLPKHSLLYEYFTVYNELTKVKYVTEGMRKPAFLSGEQKKAIVDLLFKTNRKVTVKQLKEDYFKKIECFDSVEISGVEDRFNASLGTYHDLLKIIKDKDFLDNEENEDILEDIVLTLTLFEDREMIEERLKTYAHLFDDKVMKQLKRRRYTGWGRLSRKLINGIRDKQSGKTILDFLKSDGFANRNFMQLIHDDSLTFKEDIQKAQVSGQGDSLHEHIANLAGSPAIKKGILQTVKVVDELVKVMGRHKPENIVIEMARENQTTQKGQKNSRERMKRIEEGIKELGSQILKEHPVENTQLQNEKLYLYYLQNGRDMYVDQELDINRLSDYDVDHIVPQSFLKDDSIDNKVLTRSDKARGKSDNVPSEEVVKKMKNYWRQLLNAKLITQRKFDNLTKAERGGLSELDKAGFIKRQLVETRQITKHVAQILDSRMNTKYDENDKLIREVKVITLKSKLVSDFRKDFQFYKVREINNYHHAHDAYLNAVVGTALIKKYPKLESEFVYGDYKVYDVRKMIAKSEQEIGKATAKYFFYSNIMNFFKTEITLANGEIRKRPLIETNGETGEIVWDKGRDFATVRKVLSMPQVNIVKKTEVQTGGFSKESILPKRNSDKLIARKKDWDPKKYGGFDSPTVAYSVLVVAKVEKGKSKKLKSVKELLGITIMERSSFEKNPIDFLEAKGYKEVKKDLIIKLPKYSLFELENGRKRMLASAGELQKGNELALPSKYVNFLYLASHYEKLKGSPEDNEQKQLFVEQHKHYLDEIIEQISEFSKRVILADANLDKVLSAYNKHRDKPIREQAENIIHLFTLTNLGAPAAFKYFDTTIDRKRYTSTKEVLDATLIHQSITGLYETRIDLSQLGGDGGGSAGSAAGSGEFGGGRDIMKDIKVRLMTDSPDDSQDLMIGAIESNLFADQISWKSDQPVWLNQWPLKQEKLQALQQLVTEQLQLGHLEESNSPWNTPVFVIKKKSGKWRLLQDLRAVNATMHDMGALQPGLPSPVAVPKGWEIIIIDLQDCFFNIKLHPEDCKRFAFSVPSPNFKRPYQRFQWKVLPQGMKNSPTLCQKFVDKAILTVRDKYQDSYIVHYMDDILLAHPSRSIVDEILTSMIQALNKHGLVVSTEKIQKYDNLKYLGTHIQGDSVSYQKLQIRTDKLRTLNDFQKLLGNINWIRPFLKLTTGELKPLFEILNGDSNPISTRKLTPEACKALQLMNERLSTARVKRLDLSQPWSLCILKTEYTPTACLWQDGVVEWIHLPHISPKVITPYDIFCTQLIIKGRHRSKELFSKDPDYIVVPYTKVQFDLLLQEKEDWPISLLGFLGEVHFHLPKDPLLTFTLQTAIIFPHMTSTTPLEKGIVIFTDGSANGRSVTYIQGREPIIKENTQNTAQQAEIVAVITAFEEVSQPFNLYTDSKYVTGLFPEIETATLSPRTKIYTELKHLQRLIHKRQEKFYIGHIRGHTGLPGPLAQGNAYADSLTRILTAGKRTADGSEFEKRTADGSEFESPKKKAKVE

SEQ ID NO: 3220 - protein, 2022 aa, synthetic construct
MPAAKRVKLDGGDKKYSIGLDIGTNSVGWAVITDEYKVPSKKFKVLGNTDRHSIKKNLIGALLFDSGETAEATRLKRTARRRYTRRKNRICYLQEIFSNEMAKVDDSFFHRLEESFLVEEDKKHERHPIFGNIVDEVAYHEKYPTIYHLRKKLVDSTDKADLRLIYLALAHMIKFRGHFLIEGDLNPDNSDVDKLFIQLVQTYNQLFEENPINASGVDAKAILSARLSKSRRLENLIAQLPGEKKNGLFGNLIALSLGLTPNFKSNFDLAEDAKLQLSKDTYDDDLDNLLAQIGDQYADLFLAAKNLSDAILLSDILRVNTEITKAPLSASMIKRYDEHHQDLTLLKALVRQQLPEKYKEIFFDQSKNGYAGYIDGGASQEEFYKFIKPILEKMDGTEELLVKLNREDLLRKQRTFDNGSIPHQIHLGELHAILRRQEDFYPFLKDNREKIEKILTFRIPYYVGPLARGNSRFAWMTRKSEETITPWNFEEVVDKGASAQSFIERMTNFDKNLPNEKVLPKHSLLYEYFTVYNELTKVKYVTEGMRKPAFLSGEQKKAIVDLLFKTNRKVTVKQLKEDYFKKIECFDSVEISGVEDRFNASLGTYHDLLKIIKDKDFLDNEENEDILEDIVLTLTLFEDREMIEERLKTYAHLFDDKVMKQLKRRRYTGWGRLSRKLINGIRDKQSGKTILDFLKSDGFANRNFMQLIHDDSLTFKEDIQKAQVSGQGDSLHEHIANLAGSPAIKKGILQTVKVVDELVKVMGRHKPENIVIEMARENQTTQKGQKNSRERMKRIEEGIKELGSQILKEHPVENTQLQNEKLYLYYLQNGRDMYVDQELDINRLSDYDVDHIVPQSFLKDDSIDNKVLTRSDKARGKSDNVPSEEVVKKMKNYWRQLLNAKLITQRKFDNLTKAERGGLSELDKAGFIKRQLVETRQITKHVAQILDSRMNTKYDENDKLIREVKVITLKSKLVSDFRKDFQFYKVREINNYHHAHDAYLNAVVGTALIKKYPKLESEFVYGDYKVYDVRKMIAKSEQEIGKATAKYFFYSNIMNFFKTEITLANGEIRKRPLIETNGETGEIVWDKGRDFATVRKVLSMPQVNIVKKTEVQTGGFSKESILPKRNSDKLIARKKDWDPKKYGGFDSPTVAYSVLVVAKVEKGKSKKLKSVKELLGITIMERSSFEKNPIDFLEAKGYKEVKKDLIIKLPKYSLFELENGRKRMLASAGELQKGNELALPSKYVNFLYLASHYEKLKGSPEDNEQKQLFVEQHKHYLDEIIEQISEFSKRVILADANLDKVLSAYNKHRDKPIREQAENIIHLFTLTNLGAPAAFKYFDTTIDRKRYTSTKEVLDATLIHQSITGLYETRIDLSQLGGDGGPAPGGGGGSGGGRDIMKDIKVRLMTDSPDDSQDLMIGAIESNLFADQISWKSDQPVWLNQWPLKQEKLQALQQLVTEQLQLGHLEESNSPWNTPVFVIKKKSGKWRLLQDLRAVNATMHDMGALQPGLPSPVAVPKGWEIIIIDLQDCFFNIKLHPEDCKRFAFSVPSPNFKRPYQRFQWKVLPQGMKNSPTLCQKFVDKAILTVRDKYQDSYIVHYMDDILLAHPSRSIVDEILTSMIQALNKHGLVVSTEKIQKYDNLKYLGTHIQGDSVSYQKLQIRTDKLRTLNDFQKLLGNINWIRPFLKLTTGELKPLFEILNGDSNPISTRKLTPEACKALQLMNERLSTARVKRLDLSQPWSLCILKTEYTPTACLWQDGVVEWIHLPHISPKVITPYDIFCTQLIIKGRHRSKELFSKDPDYIVVPYTKVQFDLLLQEKEDWPISLLGFLGEVHFHLPKDPLLTFTLQTAIIFPHMTSTTPLEKGIVIFTDGSANGRSVTYIQGREPIIKENTQNTAQQAEIVAVITAFEEVSQPFNLYTDSKYVTGLFPEIETATLSPRTKIYTELKHLQRLIHKRQEKFYIGHIRGHTGLPGPLAQGNAYADSLTRILTAGKRTADGSEFEKRTADGSEFESPKKKAKVE

SEQ ID NO: 3221 - protein, 2022 aa, synthetic construct
MPAAKRVKLDGGDKKYSIGLDIGTNSVGWAVITDEYKVPSKKFKVLGNTDRHSIKKNLIGALLFDSGETAEATRLKRTARRRYTRRKNRICYLQEIFSNEMAKVDDSFFHRLEESFLVEEDKKHERHPIFGNIVDEVAYHEKYPTIYHLRKKLVDSTDKADLRLIYLALAHMIKFRGHFLIEGDLNPDNSDVDKLFIQLVQTYNQLFEENPINASGVDAKAILSARLSKSRRLENLIAQLPGEKKNGLFGNLIALSLGLTPNFKSNFDLAEDAKLQLSKDTYDDDLDNLLAQIGDQYADLFLAAKNLSDAILLSDILRVNTEITKAPLSASMIKRYDEHHQDLTLLKALVRQQLPEKYKEIFFDQSKNGYAGYIDGGASQEEFYKFIKPILEKMDGTEELLVKLNREDLLRKQRTFDNGSIPHQIHLGELHAILRRQEDFYPFLKDNREKIEKILTFRIPYYVGPLARGNSRFAWMTRKSEETITPWNFEEVVDKGASAQSFIERMTNFDKNLPNEKVLPKHSLLYEYFTVYNELTKVKYVTEGMRKPAFLSGEQKKAIVDLLFKTNRKVTVKQLKEDYFKKIECFDSVEISGVEDRFNASLGTYHDLLKIIKDKDFLDNEENEDILEDIVLTLTLFEDREMIEERLKTYAHLFDDKVMKQLKRRRYTGWGRLSRKLINGIRDKQSGKTILDFLKSDGFANRNFMQLIHDDSLTFKEDIQKAQVSGQGDSLHEHIANLAGSPAIKKGILQTVKVVDELVKVMGRHKPENIVIEMARENQTTQKGQKNSRERMKRIEEGIKELGSQILKEHPVENTQLQNEKLYLYYLQNGRDMYVDQELDINRLSDYDVDHIVPQSFLKDDSIDNKVLTRSDKARGKSDNVPSEEVVKKMKNYWRQLLNAKLITQRKFDNLTKAERGGLSELDKAGFIKRQLVETRQITKHVAQILDSRMNTKYDENDKLIREVKVITLKSKLVSDFRKDFQFYKVREINNYHHAHDAYLNAVVGTALIKKYPKLESEFVYGDYKVYDVRKMIAKSEQEIGKATAKYFFYSNIMNFFKTEITLANGEIRKRPLIETNGETGEIVWDKGRDFATVRKVLSMPQVNIVKKTEVQTGGFSKESILPKRNSDKLIARKKDWDPKKYGGFDSPTVAYSVLVVAKVEKGKSKKLKSVKELLGITIMERSSFEKNPIDFLEAKGYKEVKKDLIIKLPKYSLFELENGRKRMLASAGELQKGNELALPSKYVNFLYLASHYEKLKGSPEDNEQKQLFVEQHKHYLDEIIEQISEFSKRVILADANLDKVLSAYNKHRDKPIREQAENIIHLFTLTNLGAPAAFKYFDTTIDRKRYTSTKEVLDATLIHQSITGLYETRIDLSQLGGDGGPAPAPAPAPGGGRDIMKDIKVRLMTDSPDDSQDLMIGAIESNLFADQISWKSDQPVWLNQWPLKQEKLQALQQLVTEQLQLGHLEESNSPWNTPVFVIKKKSGKWRLLQDLRAVNATMHDMGALQPGLPSPVAVPKGWEIIIIDLQDCFFNIKLHPEDCKRFAFSVPSPNFKRPYQRFQWKVLPQGMKNSPTLCQKFVDKAILTVRDKYQDSYIVHYMDDILLAHPSRSIVDEILTSMIQALNKHGLVVSTEKIQKYDNLKYLGTHIQGDSVSYQKLQIRTDKLRTLNDFQKLLGNINWIRPFLKLTTGELKPLFEILNGDSNPISTRKLTPEACKALQLMNERLSTARVKRLDLSQPWSLCILKTEYTPTACLWQDGVVEWIHLPHISPKVITPYDIFCTQLIIKGRHRSKELFSKDPDYIVVPYTKVQFDLLLQEKEDWPISLLGFLGEVHFHLPKDPLLTFTLQTAIIFPHMTSTTPLEKGIVIFTDGSANGRSVTYIQGREPIIKENTQNTAQQAEIVAVITAFEEVSQPFNLYTDSKYVTGLFPEIETATLSPRTKIYTELKHLQRLIHKRQEKFYIGHIRGHTGLPGPLAQGNAYADSLTRILTAGKRTADGSEFEKRTADGSEFESPKKKAKVE

SEQ ID NO: 3222 - protein, 2024 aa, synthetic construct
MPAAKRVKLDGGDKKYSIGLDIGTNSVGWAVITDEYKVPSKKFKVLGNTDRHSIKKNLIGALLFDSGETAEATRLKRTARRRYTRRKNRICYLQEIFSNEMAKVDDSFFHRLEESFLVEEDKKHERHPIFGNIVDEVAYHEKYPTIYHLRKKLVDSTDKADLRLIYLALAHMIKFRGHFLIEGDLNPDNSDVDKLFIQLVQTYNQLFEENPINASGVDAKAILSARLSKSRRLENLIAQLPGEKKNGLFGNLIALSLGLTPNFKSNFDLAEDAKLQLSKDTYDDDLDNLLAQIGDQYADLFLAAKNLSDAILLSDILRVNTEITKAPLSASMIKRYDEHHQDLTLLKALVRQQLPEKYKEIFFDQSKNGYAGYIDGGASQEEFYKFIKPILEKMDGTEELLVKLNREDLLRKQRTFDNGSIPHQIHLGELHAILRRQEDFYPFLKDNREKIEKILTFRIPYYVGPLARGNSRFAWMTRKSEETITPWNFEEVVDKGASAQSFIERMTNFDKNLPNEKVLPKHSLLYEYFTVYNELTKVKYVTEGMRKPAFLSGEQKKAIVDLLFKTNRKVTVKQLKEDYFKKIECFDSVEISGVEDRFNASLGTYHDLLKIIKDKDFLDNEENEDILEDIVLTLTLFEDREMIEERLKTYAHLFDDKVMKQLKRRRYTGWGRLSRKLINGIRDKQSGKTILDFLKSDGFANRNFMQLIHDDSLTFKEDIQKAQVSGQGDSLHEHIANLAGSPAIKKGILQTVKVVDELVKVMGRHKPENIVIEMARENQTTQKGQKNSRERMKRIEEGIKELGSQILKEHPVENTQLQNEKLYLYYLQNGRDMYVDQELDINRLSDYDVDHIVPQSFLKDDSIDNKVLTRSDKARGKSDNVPSEEVVKKMKNYWRQLLNAKLITQRKFDNLTKAERGGLSELDKAGFIKRQLVETRQITKHVAQILDSRMNTKYDENDKLIREVKVITLKSKLVSDFRKDFQFYKVREINNYHHAHDAYLNAVVGTALIKKYPKLESEFVYGDYKVYDVRKMIAKSEQEIGKATAKYFFYSNIMNFFKTEITLANGEIRKRPLIETNGETGEIVWDKGRDFATVRKVLSMPQVNIVKKTEVQTGGFSKESILPKRNSDKLIARKKDWDPKKYGGFDSPTVAYSVLVVAKVEKGKSKKLKSVKELLGITIMERSSFEKNPIDFLEAKGYKEVKKDLIIKLPKYSLFELENGRKRMLASAGELQKGNELALPSKYVNFLYLASHYEKLKGSPEDNEQKQLFVEQHKHYLDEIIEQISEFSKRVILADANLDKVLSAYNKHRDKPIREQAENIIHLFTLTNLGAPAAFKYFDTTIDRKRYTSTKEVLDATLIHQSITGLYETRIDLSQLGGDGGPAPEAAAKGGSGGGRDIMKDIKVRLMTDSPDDSQDLMIGAIESNLFADQISWKSDQPVWLNQWPLKQEKLQALQQLVTEQLQLGHLEESNSPWNTPVFVIKKKSGKWRLLQDLRAVNATMHDMGALQPGLPSPVAVPKGWEIIIIDLQDCFFNIKLHPEDCKRFAFSVPSPNFKRPYQRFQWKVLPQGMKNSPTLCQKFVDKAILTVRDKYQDSYIVHYMDDILLAHPSRSIVDEILTSMIQALNKHGLVVSTEKIQKYDNLKYLGTHIQGDSVSYQKLQIRTDKLRTLNDFQKLLGNINWIRPFLKLTTGELKPLFEILNGDSNPISTRKLTPEACKALQLMNERLSTARVKRLDLSQPWSLCILKTEYTPTACLWQDGVVEWIHLPHISPKVITPYDIFCTQLIIKGRHRSKELFSKDPDYIVVPYTKVQFDLLLQEKEDWPISLLGFLGEVHFHLPKDPLLTFTLQTAIIFPHMTSTTPLEKGIVIFTDGSANGRSVTYIQGREPIIKENTQNTAQQAEIVAVITAFEEVSQPFNLYTDSKYVTGLFPEIETATLSPRTKIYTELKHLQRLIHKRQEKFYIGHIRGHTGLPGPLAQGNAYADSLTRILTAGKRTADGSEFEKRTADGSEFESPKKKAKVE

SEQ ID NO: 3223 - protein, 2022 aa, synthetic construct
MPAAKRVKLDGGDKKYSIGLDIGTNSVGWAVITDEYKVPSKKFKVLGNTDRHSIKKNLIGALLFDSGETAEATRLKRTARRRYTRRKNRICYLQEIFSNEMAKVDDSFFHRLEESFLVEEDKKHERHPIFGNIVDEVAYHEKYPTIYHLRKKLVDSTDKADLRLIYLALAHMIKFRGHFLIEGDLNPDNSDVDKLFIQLVQTYNQLFEENPINASGVDAKAILSARLSKSRRLENLIAQLPGEKKNGLFGNLIALSLGLTPNFKSNFDLAEDAKLQLSKDTYDDDLDNLLAQIGDQYADLFLAAKNLSDAILLSDILRVNTEITKAPLSASMIKRYDEHHQDLTLLKALVRQQLPEKYKEIFFDQSKNGYAGYIDGGASQEEFYKFIKPILEKMDGTEELLVKLNREDLLRKQRTFDNGSIPHQIHLGELHAILRRQEDFYPFLKDNREKIEKILTFRIPYYVGPLARGNSRFAWMTRKSEETITPWNFEEVVDKGASAQSFIERMTNFDKNLPNEKVLPKHSLLYEYFTVYNELTKVKYVTEGMRKPAFLSGEQKKAIVDLLFKTNRKVTVKQLKEDYFKKIECFDSVEISGVEDRFNASLGTYHDLLKIIKDKDFLDNEENEDILEDIVLTLTLFEDREMIEERLKTYAHLFDDKVMKQLKRRRYTGWGRLSRKLINGIRDKQSGKTILDFLKSDGFANRNFMQLIHDDSLTFKEDIQKAQVSGQGDSLHEHIANLAGSPAIKKGILQTVKVVDELVKVMGRHKPENIVIEMARENQTTQKGQKNSRERMKRIEEGIKELGSQILKEHPVENTQLQNEKLYLYYLQNGRDMYVDQELDINRLSDYDVDHIVPQSFLKDDSIDNKVLTRSDKARGKSDNVPSEEVVKKMKNYWRQLLNAKLITQRKFDNLTKAERGGLSELDKAGFIKRQLVETRQITKHVAQILDSRMNTKYDENDKLIREVKVITLKSKLVSDFRKDFQFYKVREINNYHHAHDAYLNAVVGTALIKKYPKLESEFVYGDYKVYDVRKMIAKSEQEIGKATAKYFFYSNIMNFFKTEITLANGEIRKRPLIETNGETGEIVWDKGRDFATVRKVLSMPQVNIVKKTEVQTGGFSKESILPKRNSDKLIARKKDWDPKKYGGFDSPTVAYSVLVVAKVEKGKSKKLKSVKELLGITIMERSSFEKNPIDFLEAKGYKEVKKDLIIKLPKYSLFELENGRKRMLASAGELQKGNELALPSKYVNFLYLASHYEKLKGSPEDNEQKQLFVEQHKHYLDEIIEQISEFSKRVILADANLDKVLSAYNKHRDKPIREQAENIIHLFTLTNLGAPAAFKYFDTTIDRKRYTSTKEVLDATLIHQSITGLYETRIDLSQLGGDGGGGGPAPGSSGGGRDIMKDIKVRLMTDSPDDSQDLMIGAIESNLFADQISWKSDQPVWLNQWPLKQEKLQALQQLVTEQLQLGHLEESNSPWNTPVFVIKKKSGKWRLLQDLRAVNATMHDMGALQPGLPSPVAVPKGWEIIIIDLQDCFFNIKLHPEDCKRFAFSVPSPNFKRPYQRFQWKVLPQGMKNSPTLCQKFVDKAILTVRDKYQDSYIVHYMDDILLAHPSRSIVDEILTSMIQALNKHGLVVSTEKIQKYDNLKYLGTHIQGDSVSYQKLQIRTDKLRTLNDFQKLLGNINWIRPFLKLTTGELKPLFEILNGDSNPISTRKLTPEACKALQLMNERLSTARVKRLDLSQPWSLCILKTEYTPTACLWQDGVVEWIHLPHISPKVITPYDIFCTQLIIKGRHRSKELFSKDPDYIVVPYTKVQFDLLLQEKEDWPISLLGFLGEVHFHLPKDPLLTFTLQTAIIFPHMTSTTPLEKGIVIFTDGSANGRSVTYIQGREPIIKENTQNTAQQAEIVAVITAFEEVSQPFNLYTDSKYVTGLFPEIETATLSPRTKIYTELKHLQRLIHKRQEKFYIGHIRGHTGLPGPLAQGNAYADSLTRILTAGKRTADGSEFEKRTADGSEFESPKKKAKVE

SEQ ID NO: 3224 - protein, 2022 aa, synthetic construct
MPAAKRVKLDGGDKKYSIGLDIGTNSVGWAVITDEYKVPSKKFKVLGNTDRHSIKKNLIGALLFDSGETAEATRLKRTARRRYTRRKNRICYLQEIFSNEMAKVDDSFFHRLEESFLVEEDKKHERHPIFGNIVDEVAYHEKYPTIYHLRKKLVDSTDKADLRLIYLALAHMIKFRGHFLIEGDLNPDNSDVDKLFIQLVQTYNQLFEENPINASGVDAKAILSARLSKSRRLENLIAQLPGEKKNGLFGNLIALSLGLTPNFKSNFDLAEDAKLQLSKDTYDDDLDNLLAQIGDQYADLFLAAKNLSDAILLSDILRVNTEITKAPLSASMIKRYDEHHQDLTLLKALVRQQLPEKYKEIFFDQSKNGYAGYIDGGASQEEFYKFIKPILEKMDGTEELLVKLNREDLLRKQRTFDNGSIPHQIHLGELHAILRRQEDFYPFLKDNREKIEKILTFRIPYYVGPLARGNSRFAWMTRKSEETITPWNFEEVVDKGASAQSFIERMTNFDKNLPNEKVLPKHSLLYEYFTVYNELTKVKYVTEGMRKPAFLSGEQKKAIVDLLFKTNRKVTVKQLKEDYFKKIECFDSVEISGVEDRFNASLGTYHDLLKIIKDKDFLDNEENEDILEDIVLTLTLFEDREMIEERLKTYAHLFDDKVMKQLKRRRYTGWGRLSRKLINGIRDKQSGKTILDFLKSDGFANRNFMQLIHDDSLTFKEDIQKAQVSGQGDSLHEHIANLAGSPAIKKGILQTVKVVDELVKVMGRHKPENIVIEMARENQTTQKGQKNSRERMKRIEEGIKELGSQILKEHPVENTQLQNEKLYLYYLQNGRDMYVDQELDINRLSDYDVDHIVPQSFLKDDSIDNKVLTRSDKARGKSDNVPSEEVVKKMKNYWRQLLNAKLITQRKFDNLTKAERGGLSELDKAGFIKRQLVETRQITKHVAQILDSRMNTKYDENDKLIREVKVITLKSKLVSDFRKDFQFYKVREINNYHHAHDAYLNAVVGTALIKKYPKLESEFVYGDYKVYDVRKMIAKSEQEIGKATAKYFFYSNIMNFFKTEITLANGEIRKRPLIETNGETGEIVWDKGRDFATVRKVLSMPQVNIVKKTEVQTGGFSKESILPKRNSDKLIARKKDWDPKKYGGFDSPTVAYSVLVVAKVEKGKSKKLKSVKELLGITIMERSSFEKNPIDFLEAKGYKEVKKDLIIKLPKYSLFELENGRKRMLASAGELQKGNELALPSKYVNFLYLASHYEKLKGSPEDNEQKQLFVEQHKHYLDEIIEQISEFSKRVILADANLDKVLSAYNKHRDKPIREQAENIIHLFTLTNLGAPAAFKYFDTTIDRKRYTSTKEVLDATLIHQSITGLYETRIDLSQLGGDGGGGSPAPGGGGGGRDIMKDIKVRLMTDSPDDSQDLMIGAIESNLFADQISWKSDQPVWLNQWPLKQEKLQALQQLVTEQLQLGHLEESNSPWNTPVFVIKKKSGKWRLLQDLRAVNATMHDMGALQPGLPSPVAVPKGWEIIIIDLQDCFFNIKLHPEDCKRFAFSVPSPNFKRPYQRFQWKVLPQGMKNSPTLCQKFVDKAILTVRDKYQDSYIVHYMDDILLAHPSRSIVDEILTSMIQALNKHGLVVSTEKIQKYDNLKYLGTHIQGDSVSYQKLQIRTDKLRTLNDFQKLLGNINWIRPFLKLTTGELKPLFEILNGDSNPISTRKLTPEACKALQLMNERLSTARVKRLDLSQPWSLCILKTEYTPTACLWQDGVVEWIHLPHISPKVITPYDIFCTQLIIKGRHRSKELFSKDPDYIVVPYTKVQFDLLLQEKEDWPISLLGFLGEVHFHLPKDPLLTFTLQTAIIFPHMTSTTPLEKGIVIFTDGSANGRSVTYIQGREPIIKENTQNTAQQAEIVAVITAFEEVSQPFNLYTDSKYVTGLFPEIETATLSPRTKIYTELKHLQRLIHKRQEKFYIGHIRGHTGLPGPLAQGNAYADSLTRILTAGKRTADGSEFEKRTADGSEFESPKKKAKVE

SEQ ID NO: 3225 - protein, 2019 aa, synthetic construct
MPAAKRVKLDGGDKKYSIGLDIGTNSVGWAVITDEYKVPSKKFKVLGNTDRHSIKKNLIGALLFDSGETAEATRLKRTARRRYTRRKNRICYLQEIFSNEMAKVDDSFFHRLEESFLVEEDKKHERHPIFGNIVDEVAYHEKYPTIYHLRKKLVDSTDKADLRLIYLALAHMIKFRGHFLIEGDLNPDNSDVDKLFIQLVQTYNQLFEENPINASGVDAKAILSARLSKSRRLENLIAQLPGEKKNGLFGNLIALSLGLTPNFKSNFDLAEDAKLQLSKDTYDDDLDNLLAQIGDQYADLFLAAKNLSDAILLSDILRVNTEITKAPLSASMIKRYDEHHQDLTLLKALVRQQLPEKYKEIFFDQSKNGYAGYIDGGASQEEFYKFIKPILEKMDGTEELLVKLNREDLLRKQRTFDNGSIPHQIHLGELHAILRRQEDFYPFLKDNREKIEKILTFRIPYYVGPLARGNSRFAWMTRKSEETITPWNFEEVVDKGASAQSFIERMTNFDKNLPNEKVLPKHSLLYEYFTVYNELTKVKYVTEGMRKPAFLSGEQKKAIVDLLFKTNRKVTVKQLKEDYFKKIECFDSVEISGVEDRFNASLGTYHDLLKIIKDKDFLDNEENEDILEDIVLTLTLFEDREMIEERLKTYAHLFDDKVMKQLKRRRYTGWGRLSRKLINGIRDKQSGKTILDFLKSDGFANRNFMQLIHDDSLTFKEDIQKAQVSGQGDSLHEHIANLAGSPAIKKGILQTVKVVDELVKVMGRHKPENIVIEMARENQTTQKGQKNSRERMKRIEEGIKELGSQILKEHPVENTQLQNEKLYLYYLQNGRDMYVDQELDINRLSDYDVDHIVPQSFLKDDSIDNKVLTRSDKARGKSDNVPSEEVVKKMKNYWRQLLNAKLITQRKFDNLTKAERGGLSELDKAGFIKRQLVETRQITKHVAQILDSRMNTKYDENDKLIREVKVITLKSKLVSDFRKDFQFYKVREINNYHHAHDAYLNAVVGTALIKKYPKLESEFVYGDYKVYDVRKMIAKSEQEIGKATAKYFFYSNIMNFFKTEITLANGEIRKRPLIETNGETGEIVWDKGRDFATVRKVLSMPQVNIVKKTEVQTGGFSKESILPKRNSDKLIARKKDWDPKKYGGFDSPTVAYSVLVVAKVEKGKSKKLKSVKELLGITIMERSSFEKNPIDFLEAKGYKEVKKDLIIKLPKYSLFELENGRKRMLASAGELQKGNELALPSKYVNFLYLASHYEKLKGSPEDNEQKQLFVEQHKHYLDEIIEQISEFSKRVILADANLDKVLSAYNKHRDKPIREQAENIIHLFTLTNLGAPAAFKYFDTTIDRKRYTSTKEVLDATLIHQSITGLYETRIDLSQLGGDGGGGGGGSGGGRDIMKDIKVRLMTDSPDDSQDLMIGAIESNLFADQISWKSDQPVWLNQWPLKQEKLQALQQLVTEQLQLGHLEESNSPWNTPVFVIKKKSGKWRLLQDLRAVNATMHDMGALQPGLPSPVAVPKGWEIIIIDLQDCFFNIKLHPEDCKRFAFSVPSPNFKRPYQRFQWKVLPQGMKNSPTLCQKFVDKAILTVRDKYQDSYIVHYMDDILLAHPSRSIVDEILTSMIQALNKHGLVVSTEKIQKYDNLKYLGTHIQGDSVSYQKLQIRTDKLRTLNDFQKLLGNINWIRPFLKLTTGELKPLFEILNGDSNPISTRKLTPEACKALQLMNERLSTARVKRLDLSQPWSLCILKTEYTPTACLWQDGVVEWIHLPHISPKVITPYDIFCTQLIIKGRHRSKELFSKDPDYIVVPYTKVQFDLLLQEKEDWPISLLGFLGEVHFHLPKDPLLTFTLQTAIIFPHMTSTTPLEKGIVIFTDGSANGRSVTYIQGREPIIKENTQNTAQQAEIVAVITAFEEVSQPFNLYTDSKYVTGLFPEIETATLSPRTKIYTELKHLQRLIHKRQEKFYIGHIRGHTGLPGPLAQGNAYADSLTRILTAGKRTADGSEFEKRTADGSEFESPKKKAKVE

SEQ ID NO: 3226 - protein, 2024 aa, synthetic construct
MPAAKRVKLDGGDKKYSIGLDIGTNSVGWAVITDEYKVPSKKFKVLGNTDRHSIKKNLIGALLFDSGETAEATRLKRTARRRYTRRKNRICYLQEIFSNEMAKVDDSFFHRLEESFLVEEDKKHERHPIFGNIVDEVAYHEKYPTIYHLRKKLVDSTDKADLRLIYLALAHMIKFRGHFLIEGDLNPDNSDVDKLFIQLVQTYNQLFEENPINASGVDAKAILSARLSKSRRLENLIAQLPGEKKNGLFGNLIALSLGLTPNFKSNFDLAEDAKLQLSKDTYDDDLDNLLAQIGDQYADLFLAAKNLSDAILLSDILRVNTEITKAPLSASMIKRYDEHHQDLTLLKALVRQQLPEKYKEIFFDQSKNGYAGYIDGGASQEEFYKFIKPILEKMDGTEELLVKLNREDLLRKQRTFDNGSIPHQIHLGELHAILRRQEDFYPFLKDNREKIEKILTFRIPYYVGPLARGNSRFAWMTRKSEETITPWNFEEVVDKGASAQSFIERMTNFDKNLPNEKVLPKHSLLYEYFTVYNELTKVKYVTEGMRKPAFLSGEQKKAIVDLLFKTNRKVTVKQLKEDYFKKIECFDSVEISGVEDRFNASLGTYHDLLKIIKDKDFLDNEENEDILEDIVLTLTLFEDREMIEERLKTYAHLFDDKVMKQLKRRRYTGWGRLSRKLINGIRDKQSGKTILDFLKSDGFANRNFMQLIHDDSLTFKEDIQKAQVSGQGDSLHEHIANLAGSPAIKKGILQTVKVVDELVKVMGRHKPENIVIEMARENQTTQKGQKNSRERMKRIEEGIKELGSQILKEHPVENTQLQNEKLYLYYLQNGRDMYVDQELDINRLSDYDVDHIVPQSFLKDDSIDNKVLTRSDKARGKSDNVPSEEVVKKMKNYWRQLLNAKLITQRKFDNLTKAERGGLSELDKAGFIKRQLVETRQITKHVAQILDSRMNTKYDENDKLIREVKVITLKSKLVSDFRKDFQFYKVREINNYHHAHDAYLNAVVGTALIKKYPKLESEFVYGDYKVYDVRKMIAKSEQEIGKATAKYFFYSNIMNFFKTEITLANGEIRKRPLIETNGETGEIVWDKGRDFATVRKVLSMPQVNIVKKTEVQTGGFSKESILPKRNSDKLIARKKDWDPKKYGGFDSPTVAYSVLVVAKVEKGKSKKLKSVKELLGITIMERSSFEKNPIDFLEAKGYKEVKKDLIIKLPKYSLFELENGRKRMLASAGELQKGNELALPSKYVNFLYLASHYEKLKGSPEDNEQKQLFVEQHKHYLDEIIEQISEFSKRVILADANLDKVLSAYNKHRDKPIREQAENIIHLFTLTNLGAPAAFKYFDTTIDRKRYTSTKEVLDATLIHQSITGLYETRIDLSQLGGDGGEAAAKGGGGGSGGGRDIMKDIKVRLMTDSPDDSQDLMIGAIESNLFADQISWKSDQPVWLNQWPLKQEKLQALQQLVTEQLQLGHLEESNSPWNTPVFVIKKKSGKWRLLQDLRAVNATMHDMGALQPGLPSPVAVPKGWEIIIIDLQDCFFNIKLHPEDCKRFAFSVPSPNFKRPYQRFQWKVLPQGMKNSPTLCQKFVDKAILTVRDKYQDSYIVHYMDDILLAHPSRSIVDEILTSMIQALNKHGLVVSTEKIQKYDNLKYLGTHIQGDSVSYQKLQIRTDKLRTLNDFQKLLGNINWIRPFLKLTTGELKPLFEILNGDSNPISTRKLTPEACKALQLMNERLSTARVKRLDLSQPWSLCILKTEYTPTACLWQDGVVEWIHLPHISPKVITPYDIFCTQLIIKGRHRSKELFSKDPDYIVVPYTKVQFDLLLQEKEDWPISLLGFLGEVHFHLPKDPLLTFTLQTAIIFPHMTSTTPLEKGIVIFTDGSANGRSVTYIQGREPIIKENTQNTAQQAEIVAVITAFEEVSQPFNLYTDSKYVTGLFPEIETATLSPRTKIYTELKHLQRLIHKRQEKFYIGHIRGHTGLPGPLAQGNAYADSLTRILTAGKRTADGSEFEKRTADGSEFESPKKKAKVE

SEQ ID NO: 3227 - protein, 2019 aa, synthetic construct
MPAAKRVKLDGGDKKYSIGLDIGTNSVGWAVITDEYKVPSKKFKVLGNTDRHSIKKNLIGALLFDSGETAEATRLKRTARRRYTRRKNRICYLQEIFSNEMAKVDDSFFHRLEESFLVEEDKKHERHPIFGNIVDEVAYHEKYPTIYHLRKKLVDSTDKADLRLIYLALAHMIKFRGHFLIEGDLNPDNSDVDKLFIQLVQTYNQLFEENPINASGVDAKAILSARLSKSRRLENLIAQLPGEKKNGLFGNLIALSLGLTPNFKSNFDLAEDAKLQLSKDTYDDDLDNLLAQIGDQYADLFLAAKNLSDAILLSDILRVNTEITKAPLSASMIKRYDEHHQDLTLLKALVRQQLPEKYKEIFFDQSKNGYAGYIDGGASQEEFYKFIKPILEKMDGTEELLVKLNREDLLRKQRTFDNGSIPHQIHLGELHAILRRQEDFYPFLKDNREKIEKILTFRIPYYVGPLARGNSRFAWMTRKSEETITPWNFEEVVDKGASAQSFIERMTNFDKNLPNEKVLPKHSLLYEYFTVYNELTKVKYVTEGMRKPAFLSGEQKKAIVDLLFKTNRKVTVKQLKEDYFKKIECFDSVEISGVEDRFNASLGTYHDLLKIIKDKDFLDNEENEDILEDIVLTLTLFEDREMIEERLKTYAHLFDDKVMKQLKRRRYTGWGRLSRKLINGIRDKQSGKTILDFLKSDGFANRNFMQLIHDDSLTFKEDIQKAQVSGQGDSLHEHIANLAGSPAIKKGILQTVKVVDELVKVMGRHKPENIVIEMARENQTTQKGQKNSRERMKRIEEGIKELGSQILKEHPVENTQLQNEKLYLYYLQNGRDMYVDQELDINRLSDYDVDHIVPQSFLKDDSIDNKVLTRSDKARGKSDNVPSEEVVKKMKNYWRQLLNAKLITQRKFDNLTKAERGGLSELDKAGFIKRQLVETRQITKHVAQILDSRMNTKYDENDKLIREVKVITLKSKLVSDFRKDFQFYKVREINNYHHAHDAYLNAVVGTALIKKYPKLESEFVYGDYKVYDVRKMIAKSEQEIGKATAKYFFYSNIMNFFKTEITLANGEIRKRPLIETNGETGEIVWDKGRDFATVRKVLSMPQVNIVKKTEVQTGGFSKESILPKRNSDKLIARKKDWDPKKYGGFDSPTVAYSVLVVAKVEKGKSKKLKSVKELLGITIMERSSFEKNPIDFLEAKGYKEVKKDLIIKLPKYSLFELENGRKRMLASAGELQKGNELALPSKYVNFLYLASHYEKLKGSPEDNEQKQLFVEQHKHYLDEIIEQISEFSKRVILADANLDKVLSAYNKHRDKPIREQAENIIHLFTLTNLGAPAAFKYFDTTIDRKRYTSTKEVLDATLIHQSITGLYETRIDLSQLGGDGGGGSPAPGGGRDIMKDIKVRLMTDSPDDSQDLMIGAIESNLFADQISWKSDQPVWLNQWPLKQEKLQALQQLVTEQLQLGHLEESNSPWNTPVFVIKKKSGKWRLLQDLRAVNATMHDMGALQPGLPSPVAVPKGWEIIIIDLQDCFFNIKLHPEDCKRFAFSVPSPNFKRPYQRFQWKVLPQGMKNSPTLCQKFVDKAILTVRDKYQDSYIVHYMDDILLAHPSRSIVDEILTSMIQALNKHGLVVSTEKIQKYDNLKYLGTHIQGDSVSYQKLQIRTDKLRTLNDFQKLLGNINWIRPFLKLTTGELKPLFEILNGDSNPISTRKLTPEACKALQLMNERLSTARVKRLDLSQPWSLCILKTEYTPTACLWQDGVVEWIHLPHISPKVITPYDIFCTQLIIKGRHRSKELFSKDPDYIVVPYTKVQFDLLLQEKEDWPISLLGFLGEVHFHLPKDPLLTFTLQTAIIFPHMTSTTPLEKGIVIFTDGSANGRSVTYIQGREPIIKENTQNTAQQAEIVAVITAFEEVSQPFNLYTDSKYVTGLFPEIETATLSPRTKIYTELKHLQRLIHKRQEKFYIGHIRGHTGLPGPLAQGNAYADSLTRILTAGKRTADGSEFEKRTADGSEFESPKKKAKVE

SEQ ID NO: 3228 - protein, 2024 aa, synthetic construct
MPAAKRVKLDGGDKKYSIGLDIGTNSVGWAVITDEYKVPSKKFKVLGNTDRHSIKKNLIGALLFDSGETAEATRLKRTARRRYTRRKNRICYLQEIFSNEMAKVDDSFFHRLEESFLVEEDKKHERHPIFGNIVDEVAYHEKYPTIYHLRKKLVDSTDKADLRLIYLALAHMIKFRGHFLIEGDLNPDNSDVDKLFIQLVQTYNQLFEENPINASGVDAKAILSARLSKSRRLENLIAQLPGEKKNGLFGNLIALSLGLTPNFKSNFDLAEDAKLQLSKDTYDDDLDNLLAQIGDQYADLFLAAKNLSDAILLSDILRVNTEITKAPLSASMIKRYDEHHQDLTLLKALVRQQLPEKYKEIFFDQSKNGYAGYIDGGASQEEFYKFIKPILEKMDGTEELLVKLNREDLLRKQRTFDNGSIPHQIHLGELHAILRRQEDFYPFLKDNREKIEKILTFRIPYYVGPLARGNSRFAWMTRKSEETITPWNFEEVVDKGASAQSFIERMTNFDKNLPNEKVLPKHSLLYEYFTVYNELTKVKYVTEGMRKPAFLSGEQKKAIVDLLFKTNRKVTVKQLKEDYFKKIECFDSVEISGVEDRFNASLGTYHDLLKIIKDKDFLDNEENEDILEDIVLTLTLFEDREMIEERLKTYAHLFDDKVMKQLKRRRYTGWGRLSRKLINGIRDKQSGKTILDFLKSDGFANRNFMQLIHDDSLTFKEDIQKAQVSGQGDSLHEHIANLAGSPAIKKGILQTVKVVDELVKVMGRHKPENIVIEMARENQTTQKGQKNSRERMKRIEEGIKELGSQILKEHPVENTQLQNEKLYLYYLQNGRDMYVDQELDINRLSDYDVDHIVPQSFLKDDSIDNKVLTRSDKARGKSDNVPSEEVVKKMKNYWRQLLNAKLITQRKFDNLTKAERGGLSELDKAGFIKRQLVETRQITKHVAQILDSRMNTKYDENDKLIREVKVITLKSKLVSDFRKDFQFYKVREINNYHHAHDAYLNAVVGTALIKKYPKLESEFVYGDYKVYDVRKMIAKSEQEIGKATAKYFFYSNIMNFFKTEITLANGEIRKRPLIETNGETGEIVWDKGRDFATVRKVLSMPQVNIVKKTEVQTGGFSKESILPKRNSDKLIARKKDWDPKKYGGFDSPTVAYSVLVVAKVEKGKSKKLKSVKELLGITIMERSSFEKNPIDFLEAKGYKEVKKDLIIKLPKYSLFELENGRKRMLASAGELQKGNELALPSKYVNFLYLASHYEKLKGSPEDNEQKQLFVEQHKHYLDEIIEQISEFSKRVILADANLDKVLSAYNKHRDKPIREQAENIIHLFTLTNLGAPAAFKYFDTTIDRKRYTSTKEVLDATLIHQSITGLYETRIDLSQLGGDGGEAAAKGGSGGGGGGRDIMKDIKVRLMTDSPDDSQDLMIGAIESNLFADQISWKSDQPVWLNQWPLKQEKLQALQQLVTEQLQLGHLEESNSPWNTPVFVIKKKSGKWRLLQDLRAVNATMHDMGALQPGLPSPVAVPKGWEIIIIDLQDCFFNIKLHPEDCKRFAFSVPSPNFKRPYQRFQWKVLPQGMKNSPTLCQKFVDKAILTVRDKYQDSYIVHYMDDILLAHPSRSIVDEILTSMIQALNKHGLVVSTEKIQKYDNLKYLGTHIQGDSVSYQKLQIRTDKLRTLNDFQKLLGNINWIRPFLKLTTGELKPLFEILNGDSNPISTRKLTPEACKALQLMNERLSTARVKRLDLSQPWSLCILKTEYTPTACLWQDGVVEWIHLPHISPKVITPYDIFCTQLIIKGRHRSKELFSKDPDYIVVPYTKVQFDLLLQEKEDWPISLLGFLGEVHFHLPKDPLLTFTLQTAIIFPHMTSTTPLEKGIVIFTDGSANGRSVTYIQGREPIIKENTQNTAQQAEIVAVITAFEEVSQPFNLYTDSKYVTGLFPEIETATLSPRTKIYTELKHLQRLIHKRQEKFYIGHIRGHTGLPGPLAQGNAYADSLTRILTAGKRTADGSEFEKRTADGSEFESPKKKAKVE

SEQ ID NO: 3229 - protein, 2022 aa, synthetic construct
MPAAKRVKLDGGDKKYSIGLDIGTNSVGWAVITDEYKVPSKKFKVLGNTDRHSIKKNLIGALLFDSGETAEATRLKRTARRRYTRRKNRICYLQEIFSNEMAKVDDSFFHRLEESFLVEEDKKHERHPIFGNIVDEVAYHEKYPTIYHLRKKLVDSTDKADLRLIYLALAHMIKFRGHFLIEGDLNPDNSDVDKLFIQLVQTYNQLFEENPINASGVDAKAILSARLSKSRRLENLIAQLPGEKKNGLFGNLIALSLGLTPNFKSNFDLAEDAKLQLSKDTYDDDLDNLLAQIGDQYADLFLAAKNLSDAILLSDILRVNTEITKAPLSASMIKRYDEHHQDLTLLKALVRQQLPEKYKEIFFDQSKNGYAGYIDGGASQEEFYKFIKPILEKMDGTEELLVKLNREDLLRKQRTFDNGSIPHQIHLGELHAILRRQEDFYPFLKDNREKIEKILTFRIPYYVGPLARGNSRFAWMTRKSEETITPWNFEEVVDKGASAQSFIERMTNFDKNLPNEKVLPKHSLLYEYFTVYNELTKVKYVTEGMRKPAFLSGEQKKAIVDLLFKTNRKVTVKQLKEDYFKKIECFDSVEISGVEDRFNASLGTYHDLLKIIKDKDFLDNEENEDILEDIVLTLTLFEDREMIEERLKTYAHLFDDKVMKQLKRRRYTGWGRLSRKLINGIRDKQSGKTILDFLKSDGFANRNFMQLIHDDSLTFKEDIQKAQVSGQGDSLHEHIANLAGSPAIKKGILQTVKVVDELVKVMGRHKPENIVIEMARENQTTQKGQKNSRERMKRIEEGIKELGSQILKEHPVENTQLQNEKLYLYYLQNGRDMYVDQELDINRLSDYDVDHIVPQSFLKDDSIDNKVLTRSDKARGKSDNVPSEEVVKKMKNYWRQLLNAKLITQRKFDNLTKAERGGLSELDKAGFIKRQLVETRQITKHVAQILDSRMNTKYDENDKLIREVKVITLKSKLVSDFRKDFQFYKVREINNYHHAHDAYLNAVVGTALIKKYPKLESEFVYGDYKVYDVRKMIAKSEQEIGKATAKYFFYSNIMNFFKTEITLANGEIRKRPLIETNGETGEIVWDKGRDFATVRKVLSMPQVNIVKKTEVQTGGFSKESILPKRNSDKLIARKKDWDPKKYGGFDSPTVAYSVLVVAKVEKGKSKKLKSVKELLGITIMERSSFEKNPIDFLEAKGYKEVKKDLIIKLPKYSLFELENGRKRMLASAGELQKGNELALPSKYVNFLYLASHYEKLKGSPEDNEQKQLFVEQHKHYLDEIIEQISEFSKRVILADANLDKVLSAYNKHRDKPIREQAENIIHLFTLTNLGAPAAFKYFDTTIDRKRYTSTKEVLDATLIHQSITGLYETRIDLSQLGGDGGGGSPAPGSSGGGRDIMKDIKVRLMTDSPDDSQDLMIGAIESNLFADQISWKSDQPVWLNQWPLKQEKLQALQQLVTEQLQLGHLEESNSPWNTPVFVIKKKSGKWRLLQDLRAVNATMHDMGALQPGLPSPVAVPKGWEIIIIDLQDCFFNIKLHPEDCKRFAFSVPSPNFKRPYQRFQWKVLPQGMKNSPTLCQKFVDKAILTVRDKYQDSYIVHYMDDILLAHPSRSIVDEILTSMIQALNKHGLVVSTEKIQKYDNLKYLGTHIQGDSVSYQKLQIRTDKLRTLNDFQKLLGNINWIRPFLKLTTGELKPLFEILNGDSNPISTRKLTPEACKALQLMNERLSTARVKRLDLSQPWSLCILKTEYTPTACLWQDGVVEWIHLPHISPKVITPYDIFCTQLIIKGRHRSKELFSKDPDYIVVPYTKVQFDLLLQEKEDWPISLLGFLGEVHFHLPKDPLLTFTLQTAIIFPHMTSTTPLEKGIVIFTDGSANGRSVTYIQGREPIIKENTQNTAQQAEIVAVITAFEEVSQPFNLYTDSKYVTGLFPEIETATLSPRTKIYTELKHLQRLIHKRQEKFYIGHIRGHTGLPGPLAQGNAYADSLTRILTAGKRTADGSEFEKRTADGSEFESPKKKAKVE

SEQ ID NO: 3230 - protein, 2024 aa, synthetic construct
MPAAKRVKLDGGDKKYSIGLDIGTNSVGWAVITDEYKVPSKKFKVLGNTDRHSIKKNLIGALLFDSGETAEATRLKRTARRRYTRRKNRICYLQEIFSNEMAKVDDSFFHRLEESFLVEEDKKHERHPIFGNIVDEVAYHEKYPTIYHLRKKLVDSTDKADLRLIYLALAHMIKFRGHFLIEGDLNPDNSDVDKLFIQLVQTYNQLFEENPINASGVDAKAILSARLSKSRRLENLIAQLPGEKKNGLFGNLIALSLGLTPNFKSNFDLAEDAKLQLSKDTYDDDLDNLLAQIGDQYADLFLAAKNLSDAILLSDILRVNTEITKAPLSASMIKRYDEHHQDLTLLKALVRQQLPEKYKEIFFDQSKNGYAGYIDGGASQEEFYKFIKPILEKMDGTEELLVKLNREDLLRKQRTFDNGSIPHQIHLGELHAILRRQEDFYPFLKDNREKIEKILTFRIPYYVGPLARGNSRFAWMTRKSEETITPWNFEEVVDKGASAQSFIERMTNFDKNLPNEKVLPKHSLLYEYFTVYNELTKVKYVTEGMRKPAFLSGEQKKAIVDLLFKTNRKVTVKQLKEDYFKKIECFDSVEISGVEDRFNASLGTYHDLLKIIKDKDFLDNEENEDILEDIVLTLTLFEDREMIEERLKTYAHLFDDKVMKQLKRRRYTGWGRLSRKLINGIRDKQSGKTILDFLKSDGFANRNFMQLIHDDSLTFKEDIQKAQVSGQGDSLHEHIANLAGSPAIKKGILQTVKVVDELVKVMGRHKPENIVIEMARENQTTQKGQKNSRERMKRIEEGIKELGSQILKEHPVENTQLQNEKLYLYYLQNGRDMYVDQELDINRLSDYDVDHIVPQSFLKDDSIDNKVLTRSDKARGKSDNVPSEEVVKKMKNYWRQLLNAKLITQRKFDNLTKAERGGLSELDKAGFIKRQLVETRQITKHVAQILDSRMNTKYDENDKLIREVKVITLKSKLVSDFRKDFQFYKVREINNYHHAHDAYLNAVVGTALIKKYPKLESEFVYGDYKVYDVRKMIAKSEQEIGKATAKYFFYSNIMNFFKTEITLANGEIRKRPLIETNGETGEIVWDKGRDFATVRKVLSMPQVNIVKKTEVQTGGFSKESILPKRNSDKLIARKKDWDPKKYGGFDSPTVAYSVLVVAKVEKGKSKKLKSVKELLGITIMERSSFEKNPIDFLEAKGYKEVKKDLIIKLPKYSLFELENGRKRMLASAGELQKGNELALPSKYVNFLYLASHYEKLKGSPEDNEQKQLFVEQHKHYLDEIIEQISEFSKRVILADANLDKVLSAYNKHRDKPIREQAENIIHLFTLTNLGAPAAFKYFDTTIDRKRYTSTKEVLDATLIHQSITGLYETRIDLSQLGGDGGEAAAKGGSGSSGGGRDIMKDIKVRLMTDSPDDSQDLMIGAIESNLFADQISWKSDQPVWLNQWPLKQEKLQALQQLVTEQLQLGHLEESNSPWNTPVFVIKKKSGKWRLLQDLRAVNATMHDMGALQPGLPSPVAVPKGWEIIIIDLQDCFFNIKLHPEDCKRFAFSVPSPNFKRPYQRFQWKVLPQGMKNSPTLCQKFVDKAILTVRDKYQDSYIVHYMDDILLAHPSRSIVDEILTSMIQALNKHGLVVSTEKIQKYDNLKYLGTHIQGDSVSYQKLQIRTDKLRTLNDFQKLLGNINWIRPFLKLTTGELKPLFEILNGDSNPISTRKLTPEACKALQLMNERLSTARVKRLDLSQPWSLCILKTEYTPTACLWQDGVVEWIHLPHISPKVITPYDIFCTQLIIKGRHRSKELFSKDPDYIVVPYTKVQFDLLLQEKEDWPISLLGFLGEVHFHLPKDPLLTFTLQTAIIFPHMTSTTPLEKGIVIFTDGSANGRSVTYIQGREPIIKENTQNTAQQAEIVAVITAFEEVSQPFNLYTDSKYVTGLFPEIETATLSPRTKIYTELKHLQRLIHKRQEKFYIGHIRGHTGLPGPLAQGNAYADSLTRILTAGKRTADGSEFEKRTADGSEFESPKKKAKVE

SEQ ID NO: 3231 - protein, 2022 aa, synthetic construct
MPAAKRVKLDGGDKKYSIGLDIGTNSVGWAVITDEYKVPSKKFKVLGNTDRHSIKKNLIGALLFDSGETAEATRLKRTARRRYTRRKNRICYLQEIFSNEMAKVDDSFFHRLEESFLVEEDKKHERHPIFGNIVDEVAYHEKYPTIYHLRKKLVDSTDKADLRLIYLALAHMIKFRGHFLIEGDLNPDNSDVDKLFIQLVQTYNQLFEENPINASGVDAKAILSARLSKSRRLENLIAQLPGEKKNGLFGNLIALSLGLTPNFKSNFDLAEDAKLQLSKDTYDDDLDNLLAQIGDQYADLFLAAKNLSDAILLSDILRVNTEITKAPLSASMIKRYDEHHQDLTLLKALVRQQLPEKYKEIFFDQSKNGYAGYIDGGASQEEFYKFIKPILEKMDGTEELLVKLNREDLLRKQRTFDNGSIPHQIHLGELHAILRRQEDFYPFLKDNREKIEKILTFRIPYYVGPLARGNSRFAWMTRKSEETITPWNFEEVVDKGASAQSFIERMTNFDKNLPNEKVLPKHSLLYEYFTVYNELTKVKYVTEGMRKPAFLSGEQKKAIVDLLFKTNRKVTVKQLKEDYFKKIECFDSVEISGVEDRFNASLGTYHDLLKIIKDKDFLDNEENEDILEDIVLTLTLFEDREMIEERLKTYAHLFDDKVMKQLKRRRYTGWGRLSRKLINGIRDKQSGKTILDFLKSDGFANRNFMQLIHDDSLTFKEDIQKAQVSGQGDSLHEHIANLAGSPAIKKGILQTVKVVDELVKVMGRHKPENIVIEMARENQTTQKGQKNSRERMKRIEEGIKELGSQILKEHPVENTQLQNEKLYLYYLQNGRDMYVDQELDINRLSDYDVDHIVPQSFLKDDSIDNKVLTRSDKARGKSDNVPSEEVVKKMKNYWRQLLNAKLITQRKFDNLTKAERGGLSELDKAGFIKRQLVETRQITKHVAQILDSRMNTKYDENDKLIREVKVITLKSKLVSDFRKDFQFYKVREINNYHHAHDAYLNAVVGTALIKKYPKLESEFVYGDYKVYDVRKMIAKSEQEIGKATAKYFFYSNIMNFFKTEITLANGEIRKRPLIETNGETGEIVWDKGRDFATVRKVLSMPQVNIVKKTEVQTGGFSKESILPKRNSDKLIARKKDWDPKKYGGFDSPTVAYSVLVVAKVEKGKSKKLKSVKELLGITIMERSSFEKNPIDFLEAKGYKEVKKDLIIKLPKYSLFELENGRKRMLASAGELQKGNELALPSKYVNFLYLASHYEKLKGSPEDNEQKQLFVEQHKHYLDEIIEQISEFSKRVILADANLDKVLSAYNKHRDKPIREQAENIIHLFTLTNLGAPAAFKYFDTTIDRKRYTSTKEVLDATLIHQSITGLYETRIDLSQLGGDGGGGGGSSPAPGGGRDIMKDIKVRLMTDSPDDSQDLMIGAIESNLFADQISWKSDQPVWLNQWPLKQEKLQALQQLVTEQLQLGHLEESNSPWNTPVFVIKKKSGKWRLLQDLRAVNATMHDMGALQPGLPSPVAVPKGWEIIIIDLQDCFFNIKLHPEDCKRFAFSVPSPNFKRPYQRFQWKVLPQGMKNSPTLCQKFVDKAILTVRDKYQDSYIVHYMDDILLAHPSRSIVDEILTSMIQALNKHGLVVSTEKIQKYDNLKYLGTHIQGDSVSYQKLQIRTDKLRTLNDFQKLLGNINWIRPFLKLTTGELKPLFEILNGDSNPISTRKLTPEACKALQLMNERLSTARVKRLDLSQPWSLCILKTEYTPTACLWQDGVVEWIHLPHISPKVITPYDIFCTQLIIKGRHRSKELFSKDPDYIVVPYTKVQFDLLLQEKEDWPISLLGFLGEVHFHLPKDPLLTFTLQTAIIFPHMTSTTPLEKGIVIFTDGSANGRSVTYIQGREPIIKENTQNTAQQAEIVAVITAFEEVSQPFNLYTDSKYVTGLFPEIETATLSPRTKIYTELKHLQRLIHKRQEKFYIGHIRGHTGLPGPLAQGNAYADSLTRILTAGKRTADGSEFEKRTADGSEFESPKKKAKVE

SEQ ID NO: 3232 - protein, 2024 aa, synthetic construct
MPAAKRVKLDGGDKKYSIGLDIGTNSVGWAVITDEYKVPSKKFKVLGNTDRHSIKKNLIGALLFDSGETAEATRLKRTARRRYTRRKNRICYLQEIFSNEMAKVDDSFFHRLEESFLVEEDKKHERHPIFGNIVDEVAYHEKYPTIYHLRKKLVDSTDKADLRLIYLALAHMIKFRGHFLIEGDLNPDNSDVDKLFIQLVQTYNQLFEENPINASGVDAKAILSARLSKSRRLENLIAQLPGEKKNGLFGNLIALSLGLTPNFKSNFDLAEDAKLQLSKDTYDDDLDNLLAQIGDQYADLFLAAKNLSDAILLSDILRVNTEITKAPLSASMIKRYDEHHQDLTLLKALVRQQLPEKYKEIFFDQSKNGYAGYIDGGASQEEFYKFIKPILEKMDGTEELLVKLNREDLLRKQRTFDNGSIPHQIHLGELHAILRRQEDFYPFLKDNREKIEKILTFRIPYYVGPLARGNSRFAWMTRKSEETITPWNFEEVVDKGASAQSFIERMTNFDKNLPNEKVLPKHSLLYEYFTVYNELTKVKYVTEGMRKPAFLSGEQKKAIVDLLFKTNRKVTVKQLKEDYFKKIECFDSVEISGVEDRFNASLGTYHDLLKIIKDKDFLDNEENEDILEDIVLTLTLFEDREMIEERLKTYAHLFDDKVMKQLKRRRYTGWGRLSRKLINGIRDKQSGKTILDFLKSDGFANRNFMQLIHDDSLTFKEDIQKAQVSGQGDSLHEHIANLAGSPAIKKGILQTVKVVDELVKVMGRHKPENIVIEMARENQTTQKGQKNSRERMKRIEEGIKELGSQILKEHPVENTQLQNEKLYLYYLQNGRDMYVDQELDINRLSDYDVDHIVPQSFLKDDSIDNKVLTRSDKARGKSDNVPSEEVVKKMKNYWRQLLNAKLITQRKFDNLTKAERGGLSELDKAGFIKRQLVETRQITKHVAQILDSRMNTKYDENDKLIREVKVITLKSKLVSDFRKDFQFYKVREINNYHHAHDAYLNAVVGTALIKKYPKLESEFVYGDYKVYDVRKMIAKSEQEIGKATAKYFFYSNIMNFFKTEITLANGEIRKRPLIETNGETGEIVWDKGRDFATVRKVLSMPQVNIVKKTEVQTGGFSKESILPKRNSDKLIARKKDWDPKKYGGFDSPTVAYSVLVVAKVEKGKSKKLKSVKELLGITIMERSSFEKNPIDFLEAKGYKEVKKDLIIKLPKYSLFELENGRKRMLASAGELQKGNELALPSKYVNFLYLASHYEKLKGSPEDNEQKQLFVEQHKHYLDEIIEQISEFSKRVILADANLDKVLSAYNKHRDKPIREQAENIIHLFTLTNLGAPAAFKYFDTTIDRKRYTSTKEVLDATLIHQSITGLYETRIDLSQLGGDGGGSSPAPEAAAKGGGRDIMKDIKVRLMTDSPDDSQDLMIGAIESNLFADQISWKSDQPVWLNQWPLKQEKLQALQQLVTEQLQLGHLEESNSPWNTPVFVIKKKSGKWRLLQDLRAVNATMHDMGALQPGLPSPVAVPKGWEIIIIDLQDCFFNIKLHPEDCKRFAFSVPSPNFKRPYQRFQWKVLPQGMKNSPTLCQKFVDKAILTVRDKYQDSYIVHYMDDILLAHPSRSIVDEILTSMIQALNKHGLVVSTEKIQKYDNLKYLGTHIQGDSVSYQKLQIRTDKLRTLNDFQKLLGNINWIRPFLKLTTGELKPLFEILNGDSNPISTRKLTPEACKALQLMNERLSTARVKRLDLSQPWSLCILKTEYTPTACLWQDGVVEWIHLPHISPKVITPYDIFCTQLIIKGRHRSKELFSKDPDYIVVPYTKVQFDLLLQEKEDWPISLLGFLGEVHFHLPKDPLLTFTLQTAIIFPHMTSTTPLEKGIVIFTDGSANGRSVTYIQGREPIIKENTQNTAQQAEIVAVITAFEEVSQPFNLYTDSKYVTGLFPEIETATLSPRTKIYTELKHLQRLIHKRQEKFYIGHIRGHTGLPGPLAQGNAYADSLTRILTAGKRTADGSEFEKRTADGSEFESPKKKAKVE

SEQ ID NO: 3233 - protein, 2022 aa, synthetic construct
MPAAKRVKLDGGDKKYSIGLDIGTNSVGWAVITDEYKVPSKKFKVLGNTDRHSIKKNLIGALLFDSGETAEATRLKRTARRRYTRRKNRICYLQEIFSNEMAKVDDSFFHRLEESFLVEEDKKHERHPIFGNIVDEVAYHEKYPTIYHLRKKLVDSTDKADLRLIYLALAHMIKFRGHFLIEGDLNPDNSDVDKLFIQLVQTYNQLFEENPINASGVDAKAILSARLSKSRRLENLIAQLPGEKKNGLFGNLIALSLGLTPNFKSNFDLAEDAKLQLSKDTYDDDLDNLLAQIGDQYADLFLAAKNLSDAILLSDILRVNTEITKAPLSASMIKRYDEHHQDLTLLKALVRQQLPEKYKEIFFDQSKNGYAGYIDGGASQEEFYKFIKPILEKMDGTEELLVKLNREDLLRKQRTFDNGSIPHQIHLGELHAILRRQEDFYPFLKDNREKIEKILTFRIPYYVGPLARGNSRFAWMTRKSEETITPWNFEEVVDKGASAQSFIERMTNFDKNLPNEKVLPKHSLLYEYFTVYNELTKVKYVTEGMRKPAFLSGEQKKAIVDLLFKTNRKVTVKQLKEDYFKKIECFDSVEISGVEDRFNASLGTYHDLLKIIKDKDFLDNEENEDILEDIVLTLTLFEDREMIEERLKTYAHLFDDKVMKQLKRRRYTGWGRLSRKLINGIRDKQSGKTILDFLKSDGFANRNFMQLIHDDSLTFKEDIQKAQVSGQGDSLHEHIANLAGSPAIKKGILQTVKVVDELVKVMGRHKPENIVIEMARENQTTQKGQKNSRERMKRIEEGIKELGSQILKEHPVENTQLQNEKLYLYYLQNGRDMYVDQELDINRLSDYDVDHIVPQSFLKDDSIDNKVLTRSDKARGKSDNVPSEEVVKKMKNYWRQLLNAKLITQRKFDNLTKAERGGLSELDKAGFIKRQLVETRQITKHVAQILDSRMNTKYDENDKLIREVKVITLKSKLVSDFRKDFQFYKVREINNYHHAHDAYLNAVVGTALIKKYPKLESEFVYGDYKVYDVRKMIAKSEQEIGKATAKYFFYSNIMNFFKTEITLANGEIRKRPLIETNGETGEIVWDKGRDFATVRKVLSMPQVNIVKKTEVQTGGFSKESILPKRNSDKLIARKKDWDPKKYGGFDSPTVAYSVLVVAKVEKGKSKKLKSVKELLGITIMERSSFEKNPIDFLEAKGYKEVKKDLIIKLPKYSLFELENGRKRMLASAGELQKGNELALPSKYVNFLYLASHYEKLKGSPEDNEQKQLFVEQHKHYLDEIIEQISEFSKRVILADANLDKVLSAYNKHRDKPIREQAENIIHLFTLTNLGAPAAFKYFDTTIDRKRYTSTKEVLDATLIHQSITGLYETRIDLSQLGGDGGPAPGGGGSSGGGRDIMKDIKVRLMTDSPDDSQDLMIGAIESNLFADQISWKSDQPVWLNQWPLKQEKLQALQQLVTEQLQLGHLEESNSPWNTPVFVIKKKSGKWRLLQDLRAVNATMHDMGALQPGLPSPVAVPKGWEIIIIDLQDCFFNIKLHPEDCKRFAFSVPSPNFKRPYQRFQWKVLPQGMKNSPTLCQKFVDKAILTVRDKYQDSYIVHYMDDILLAHPSRSIVDEILTSMIQALNKHGLVVSTEKIQKYDNLKYLGTHIQGDSVSYQKLQIRTDKLRTLNDFQKLLGNINWIRPFLKLTTGELKPLFEILNGDSNPISTRKLTPEACKALQLMNERLSTARVKRLDLSQPWSLCILKTEYTPTACLWQDGVVEWIHLPHISPKVITPYDIFCTQLIIKGRHRSKELFSKDPDYIVVPYTKVQFDLLLQEKEDWPISLLGFLGEVHFHLPKDPLLTFTLQTAIIFPHMTSTTPLEKGIVIFTDGSANGRSVTYIQGREPIIKENTQNTAQQAEIVAVITAFEEVSQPFNLYTDSKYVTGLFPEIETATLSPRTKIYTELKHLQRLIHKRQEKFYIGHIRGHTGLPGPLAQGNAYADSLTRILTAGKRTADGSEFEKRTADGSEFESPKKKAKVE

SEQ ID NO: 3234 - protein, 2022 aa, synthetic construct
MPAAKRVKLDGGDKKYSIGLDIGTNSVGWAVITDEYKVPSKKFKVLGNTDRHSIKKNLIGALLFDSGETAEATRLKRTARRRYTRRKNRICYLQEIFSNEMAKVDDSFFHRLEESFLVEEDKKHERHPIFGNIVDEVAYHEKYPTIYHLRKKLVDSTDKADLRLIYLALAHMIKFRGHFLIEGDLNPDNSDVDKLFIQLVQTYNQLFEENPINASGVDAKAILSARLSKSRRLENLIAQLPGEKKNGLFGNLIALSLGLTPNFKSNFDLAEDAKLQLSKDTYDDDLDNLLAQIGDQYADLFLAAKNLSDAILLSDILRVNTEITKAPLSASMIKRYDEHHQDLTLLKALVRQQLPEKYKEIFFDQSKNGYAGYIDGGASQEEFYKFIKPILEKMDGTEELLVKLNREDLLRKQRTFDNGSIPHQIHLGELHAILRRQEDFYPFLKDNREKIEKILTFRIPYYVGPLARGNSRFAWMTRKSEETITPWNFEEVVDKGASAQSFIERMTNFDKNLPNEKVLPKHSLLYEYFTVYNELTKVKYVTEGMRKPAFLSGEQKKAIVDLLFKTNRKVTVKQLKEDYFKKIECFDSVEISGVEDRFNASLGTYHDLLKIIKDKDFLDNEENEDILEDIVLTLTLFEDREMIEERLKTYAHLFDDKVMKQLKRRRYTGWGRLSRKLINGIRDKQSGKTILDFLKSDGFANRNFMQLIHDDSLTFKEDIQKAQVSGQGDSLHEHIANLAGSPAIKKGILQTVKVVDELVKVMGRHKPENIVIEMARENQTTQKGQKNSRERMKRIEEGIKELGSQILKEHPVENTQLQNEKLYLYYLQNGRDMYVDQELDINRLSDYDVDHIVPQSFLKDDSIDNKVLTRSDKARGKSDNVPSEEVVKKMKNYWRQLLNAKLITQRKFDNLTKAERGGLSELDKAGFIKRQLVETRQITKHVAQILDSRMNTKYDENDKLIREVKVITLKSKLVSDFRKDFQFYKVREINNYHHAHDAYLNAVVGTALIKKYPKLESEFVYGDYKVYDVRKMIAKSEQEIGKATAKYFFYSNIMNFFKTEITLANGEIRKRPLIETNGETGEIVWDKGRDFATVRKVLSMPQVNIVKKTEVQTGGFSKESILPKRNSDKLIARKKDWDPKKYGGFDSPTVAYSVLVVAKVEKGKSKKLKSVKELLGITIMERSSFEKNPIDFLEAKGYKEVKKDLIIKLPKYSLFELENGRKRMLASAGELQKGNELALPSKYVNFLYLASHYEKLKGSPEDNEQKQLFVEQHKHYLDEIIEQISEFSKRVILADANLDKVLSAYNKHRDKPIREQAENIIHLFTLTNLGAPAAFKYFDTTIDRKRYTSTKEVLDATLIHQSITGLYETRIDLSQLGGDGGPAPGGSGGGGGGRDIMKDIKVRLMTDSPDDSQDLMIGAIESNLFADQISWKSDQPVWLNQWPLKQEKLQALQQLVTEQLQLGHLEESNSPWNTPVFVIKKKSGKWRLLQDLRAVNATMHDMGALQPGLPSPVAVPKGWEIIIIDLQDCFFNIKLHPEDCKRFAFSVPSPNFKRPYQRFQWKVLPQGMKNSPTLCQKFVDKAILTVRDKYQDSYIVHYMDDILLAHPSRSIVDEILTSMIQALNKHGLVVSTEKIQKYDNLKYLGTHIQGDSVSYQKLQIRTDKLRTLNDFQKLLGNINWIRPFLKLTTGELKPLFEILNGDSNPISTRKLTPEACKALQLMNERLSTARVKRLDLSQPWSLCILKTEYTPTACLWQDGVVEWIHLPHISPKVITPYDIFCTQLIIKGRHRSKELFSKDPDYIVVPYTKVQFDLLLQEKEDWPISLLGFLGEVHFHLPKDPLLTFTLQTAIIFPHMTSTTPLEKGIVIFTDGSANGRSVTYIQGREPIIKENTQNTAQQAEIVAVITAFEEVSQPFNLYTDSKYVTGLFPEIETATLSPRTKIYTELKHLQRLIHKRQEKFYIGHIRGHTGLPGPLAQGNAYADSLTRILTAGKRTADGSEFEKRTADGSEFESPKKKAKVE

SEQ ID NO: 3235 - protein, 2024 aa, synthetic construct
MPAAKRVKLDGGDKKYSIGLDIGTNSVGWAVITDEYKVPSKKFKVLGNTDRHSIKKNLIGALLFDSGETAEATRLKRTARRRYTRRKNRICYLQEIFSNEMAKVDDSFFHRLEESFLVEEDKKHERHPIFGNIVDEVAYHEKYPTIYHLRKKLVDSTDKADLRLIYLALAHMIKFRGHFLIEGDLNPDNSDVDKLFIQLVQTYNQLFEENPINASGVDAKAILSARLSKSRRLENLIAQLPGEKKNGLFGNLIALSLGLTPNFKSNFDLAEDAKLQLSKDTYDDDLDNLLAQIGDQYADLFLAAKNLSDAILLSDILRVNTEITKAPLSASMIKRYDEHHQDLTLLKALVRQQLPEKYKEIFFDQSKNGYAGYIDGGASQEEFYKFIKPILEKMDGTEELLVKLNREDLLRKQRTFDNGSIPHQIHLGELHAILRRQEDFYPFLKDNREKIEKILTFRIPYYVGPLARGNSRFAWMTRKSEETITPWNFEEVVDKGASAQSFIERMTNFDKNLPNEKVLPKHSLLYEYFTVYNELTKVKYVTEGMRKPAFLSGEQKKAIVDLLFKTNRKVTVKQLKEDYFKKIECFDSVEISGVEDRFNASLGTYHDLLKIIKDKDFLDNEENEDILEDIVLTLTLFEDREMIEERLKTYAHLFDDKVMKQLKRRRYTGWGRLSRKLINGIRDKQSGKTILDFLKSDGFANRNFMQLIHDDSLTFKEDIQKAQVSGQGDSLHEHIANLAGSPAIKKGILQTVKVVDELVKVMGRHKPENIVIEMARENQTTQKGQKNSRERMKRIEEGIKELGSQILKEHPVENTQLQNEKLYLYYLQNGRDMYVDQELDINRLSDYDVDHIVPQSFLKDDSIDNKVLTRSDKARGKSDNVPSEEVVKKMKNYWRQLLNAKLITQRKFDNLTKAERGGLSELDKAGFIKRQLVETRQITKHVAQILDSRMNTKYDENDKLIREVKVITLKSKLVSDFRKDFQFYKVREINNYHHAHDAYLNAVVGTALIKKYPKLESEFVYGDYKVYDVRKMIAKSEQEIGKATAKYFFYSNIMNFFKTEITLANGEIRKRPLIETNGETGEIVWDKGRDFATVRKVLSMPQVNIVKKTEVQTGGFSKESILPKRNSDKLIARKKDWDPKKYGGFDSPTVAYSVLVVAKVEKGKSKKLKSVKELLGITIMERSSFEKNPIDFLEAKGYKEVKKDLIIKLPKYSLFELENGRKRMLASAGELQKGNELALPSKYVNFLYLASHYEKLKGSPEDNEQKQLFVEQHKHYLDEIIEQISEFSKRVILADANLDKVLSAYNKHRDKPIREQAENIIHLFTLTNLGAPAAFKYFDTTIDRKRYTSTKEVLDATLIHQSITGLYETRIDLSQLGGDGGGGSEAAAKGGGGGGRDIMKDIKVRLMTDSPDDSQDLMIGAIESNLFADQISWKSDQPVWLNQWPLKQEKLQALQQLVTEQLQLGHLEESNSPWNTPVFVIKKKSGKWRLLQDLRAVNATMHDMGALQPGLPSPVAVPKGWEIIIIDLQDCFFNIKLHPEDCKRFAFSVPSPNFKRPYQRFQWKVLPQGMKNSPTLCQKFVDKAILTVRDKYQDSYIVHYMDDILLAHPSRSIVDEILTSMIQALNKHGLVVSTEKIQKYDNLKYLGTHIQGDSVSYQKLQIRTDKLRTLNDFQKLLGNINWIRPFLKLTTGELKPLFEILNGDSNPISTRKLTPEACKALQLMNERLSTARVKRLDLSQPWSLCILKTEYTPTACLWQDGVVEWIHLPHISPKVITPYDIFCTQLIIKGRHRSKELFSKDPDYIVVPYTKVQFDLLLQEKEDWPISLLGFLGEVHFHLPKDPLLTFTLQTAIIFPHMTSTTPLEKGIVIFTDGSANGRSVTYIQGREPIIKENTQNTAQQAEIVAVITAFEEVSQPFNLYTDSKYVTGLFPEIETATLSPRTKIYTELKHLQRLIHKRQEKFYIGHIRGHTGLPGPLAQGNAYADSLTRILTAGKRTADGSEFEKRTADGSEFESPKKKAKVE

SEQ ID NO: 3236 - protein, 2024 aa, synthetic construct
MPAAKRVKLDGGDKKYSIGLDIGTNSVGWAVITDEYKVPSKKFKVLGNTDRHSIKKNLIGALLFDSGETAEATRLKRTARRRYTRRKNRICYLQEIFSNEMAKVDDSFFHRLEESFLVEEDKKHERHPIFGNIVDEVAYHEKYPTIYHLRKKLVDSTDKADLRLIYLALAHMIKFRGHFLIEGDLNPDNSDVDKLFIQLVQTYNQLFEENPINASGVDAKAILSARLSKSRRLENLIAQLPGEKKNGLFGNLIALSLGLTPNFKSNFDLAEDAKLQLSKDTYDDDLDNLLAQIGDQYADLFLAAKNLSDAILLSDILRVNTEITKAPLSASMIKRYDEHHQDLTLLKALVRQQLPEKYKEIFFDQSKNGYAGYIDGGASQEEFYKFIKPILEKMDGTEELLVKLNREDLLRKQRTFDNGSIPHQIHLGELHAILRRQEDFYPFLKDNREKIEKILTFRIPYYVGPLARGNSRFAWMTRKSEETITPWNFEEVVDKGASAQSFIERMTNFDKNLPNEKVLPKHSLLYEYFTVYNELTKVKYVTEGMRKPAFLSGEQKKAIVDLLFKTNRKVTVKQLKEDYFKKIECFDSVEISGVEDRFNASLGTYHDLLKIIKDKDFLDNEENEDILEDIVLTLTLFEDREMIEERLKTYAHLFDDKVMKQLKRRRYTGWGRLSRKLINGIRDKQSGKTILDFLKSDGFANRNFMQLIHDDSLTFKEDIQKAQVSGQGDSLHEHIANLAGSPAIKKGILQTVKVVDELVKVMGRHKPENIVIEMARENQTTQKGQKNSRERMKRIEEGIKELGSQILKEHPVENTQLQNEKLYLYYLQNGRDMYVDQELDINRLSDYDVDHIVPQSFLKDDSIDNKVLTRSDKARGKSDNVPSEEVVKKMKNYWRQLLNAKLITQRKFDNLTKAERGGLSELDKAGFIKRQLVETRQITKHVAQILDSRMNTKYDENDKLIREVKVITLKSKLVSDFRKDFQFYKVREINNYHHAHDAYLNAVVGTALIKKYPKLESEFVYGDYKVYDVRKMIAKSEQEIGKATAKYFFYSNIMNFFKTEITLANGEIRKRPLIETNGETGEIVWDKGRDFATVRKVLSMPQVNIVKKTEVQTGGFSKESILPKRNSDKLIARKKDWDPKKYGGFDSPTVAYSVLVVAKVEKGKSKKLKSVKELLGITIMERSSFEKNPIDFLEAKGYKEVKKDLIIKLPKYSLFELENGRKRMLASAGELQKGNELALPSKYVNFLYLASHYEKLKGSPEDNEQKQLFVEQHKHYLDEIIEQISEFSKRVILADANLDKVLSAYNKHRDKPIREQAENIIHLFTLTNLGAPAAFKYFDTTIDRKRYTSTKEVLDATLIHQSITGLYETRIDLSQLGGDGGPAPEAAAKGSSGGGRDIMKDIKVRLMTDSPDDSQDLMIGAIESNLFADQISWKSDQPVWLNQWPLKQEKLQALQQLVTEQLQLGHLEESNSPWNTPVFVIKKKSGKWRLLQDLRAVNATMHDMGALQPGLPSPVAVPKGWEIIIIDLQDCFFNIKLHPEDCKRFAFSVPSPNFKRPYQRFQWKVLPQGMKNSPTLCQKFVDKAILTVRDKYQDSYIVHYMDDILLAHPSRSIVDEILTSMIQALNKHGLVVSTEKIQKYDNLKYLGTHIQGDSVSYQKLQIRTDKLRTLNDFQKLLGNINWIRPFLKLTTGELKPLFEILNGDSNPISTRKLTPEACKALQLMNERLSTARVKRLDLSQPWSLCILKTEYTPTACLWQDGVVEWIHLPHISPKVITPYDIFCTQLIIKGRHRSKELFSKDPDYIVVPYTKVQFDLLLQEKEDWPISLLGFLGEVHFHLPKDPLLTFTLQTAIIFPHMTSTTPLEKGIVIFTDGSANGRSVTYIQGREPIIKENTQNTAQQAEIVAVITAFEEVSQPFNLYTDSKYVTGLFPEIETATLSPRTKIYTELKHLQRLIHKRQEKFYIGHIRGHTGLPGPLAQGNAYADSLTRILTAGKRTADGSEFEKRTADGSEFESPKKKAKVE

SEQ ID NO: 3237 - protein, 2024 aa, synthetic construct
MPAAKRVKLDGGDKKYSIGLDIGTNSVGWAVITDEYKVPSKKFKVLGNTDRHSIKKNLIGALLFDSGETAEATRLKRTARRRYTRRKNRICYLQEIFSNEMAKVDDSFFHRLEESFLVEEDKKHERHPIFGNIVDEVAYHEKYPTIYHLRKKLVDSTDKADLRLIYLALAHMIKFRGHFLIEGDLNPDNSDVDKLFIQLVQTYNQLFEENPINASGVDAKAILSARLSKSRRLENLIAQLPGEKKNGLFGNLIALSLGLTPNFKSNFDLAEDAKLQLSKDTYDDDLDNLLAQIGDQYADLFLAAKNLSDAILLSDILRVNTEITKAPLSASMIKRYDEHHQDLTLLKALVRQQLPEKYKEIFFDQSKNGYAGYIDGGASQEEFYKFIKPILEKMDGTEELLVKLNREDLLRKQRTFDNGSIPHQIHLGELHAILRRQEDFYPFLKDNREKIEKILTFRIPYYVGPLARGNSRFAWMTRKSEETITPWNFEEVVDKGASAQSFIERMTNFDKNLPNEKVLPKHSLLYEYFTVYNELTKVKYVTEGMRKPAFLSGEQKKAIVDLLFKTNRKVTVKQLKEDYFKKIECFDSVEISGVEDRFNASLGTYHDLLKIIKDKDFLDNEENEDILEDIVLTLTLFEDREMIEERLKTYAHLFDDKVMKQLKRRRYTGWGRLSRKLINGIRDKQSGKTILDFLKSDGFANRNFMQLIHDDSLTFKEDIQKAQVSGQGDSLHEHIANLAGSPAIKKGILQTVKVVDELVKVMGRHKPENIVIEMARENQTTQKGQKNSRERMKRIEEGIKELGSQILKEHPVENTQLQNEKLYLYYLQNGRDMYVDQELDINRLSDYDVDHIVPQSFLKDDSIDNKVLTRSDKARGKSDNVPSEEVVKKMKNYWRQLLNAKLITQRKFDNLTKAERGGLSELDKAGFIKRQLVETRQITKHVAQILDSRMNTKYDENDKLIREVKVITLKSKLVSDFRKDFQFYKVREINNYHHAHDAYLNAVVGTALIKKYPKLESEFVYGDYKVYDVRKMIAKSEQEIGKATAKYFFYSNIMNFFKTEITLANGEIRKRPLIETNGETGEIVWDKGRDFATVRKVLSMPQVNIVKKTEVQTGGFSKESILPKRNSDKLIARKKDWDPKKYGGFDSPTVAYSVLVVAKVEKGKSKKLKSVKELLGITIMERSSFEKNPIDFLEAKGYKEVKKDLIIKLPKYSLFELENGRKRMLASAGELQKGNELALPSKYVNFLYLASHYEKLKGSPEDNEQKQLFVEQHKHYLDEIIEQISEFSKRVILADANLDKVLSAYNKHRDKPIREQAENIIHLFTLTNLGAPAAFKYFDTTIDRKRYTSTKEVLDATLIHQSITGLYETRIDLSQLGGDGGGGSEAAAKPAPGGGRDIMKDIKVRLMTDSPDDSQDLMIGAIESNLFADQISWKSDQPVWLNQWPLKQEKLQALQQLVTEQLQLGHLEESNSPWNTPVFVIKKKSGKWRLLQDLRAVNATMHDMGALQPGLPSPVAVPKGWEIIIIDLQDCFFNIKLHPEDCKRFAFSVPSPNFKRPYQRFQWKVLPQGMKNSPTLCQKFVDKAILTVRDKYQDSYIVHYMDDILLAHPSRSIVDEILTSMIQALNKHGLVVSTEKIQKYDNLKYLGTHIQGDSVSYQKLQIRTDKLRTLNDFQKLLGNINWIRPFLKLTTGELKPLFEILNGDSNPISTRKLTPEACKALQLMNERLSTARVKRLDLSQPWSLCILKTEYTPTACLWQDGVVEWIHLPHISPKVITPYDIFCTQLIIKGRHRSKELFSKDPDYIVVPYTKVQFDLLLQEKEDWPISLLGFLGEVHFHLPKDPLLTFTLQTAIIFPHMTSTTPLEKGIVIFTDGSANGRSVTYIQGREPIIKENTQNTAQQAEIVAVITAFEEVSQPFNLYTDSKYVTGLFPEIETATLSPRTKIYTELKHLQRLIHKRQEKFYIGHIRGHTGLPGPLAQGNAYADSLTRILTAGKRTADGSEFEKRTADGSEFESPKKKAKVE

SEQ ID NO: 3238 - protein, 2046 aa, synthetic construct
MPAAKRVKLDGGDKKYSIGLDIGTNSVGWAVITDEYKVPSKKFKVLGNTDRHSIKKNLIGALLFDSGETAEATRLKRTARRRYTRRKNRICYLQEIFSNEMAKVDDSFFHRLEESFLVEEDKKHERHPIFGNIVDEVAYHEKYPTIYHLRKKLVDSTDKADLRLIYLALAHMIKFRGHFLIEGDLNPDNSDVDKLFIQLVQTYNQLFEENPINASGVDAKAILSARLSKSRRLENLIAQLPGEKKNGLFGNLIALSLGLTPNFKSNFDLAEDAKLQLSKDTYDDDLDNLLAQIGDQYADLFLAAKNLSDAILLSDILRVNTEITKAPLSASMIKRYDEHHQDLTLLKALVRQQLPEKYKEIFFDQSKNGYAGYIDGGASQEEFYKFIKPILEKMDGTEELLVKLNREDLLRKQRTFDNGSIPHQIHLGELHAILRRQEDFYPFLKDNREKIEKILTFRIPYYVGPLARGNSRFAWMTRKSEETITPWNFEEVVDKGASAQSFIERMTNFDKNLPNEKVLPKHSLLYEYFTVYNELTKVKYVTEGMRKPAFLSGEQKKAIVDLLFKTNRKVTVKQLKEDYFKKIECFDSVEISGVEDRFNASLGTYHDLLKIIKDKDFLDNEENEDILEDIVLTLTLFEDREMIEERLKTYAHLFDDKVMKQLKRRRYTGWGRLSRKLINGIRDKQSGKTILDFLKSDGFANRNFMQLIHDDSLTFKEDIQKAQVSGQGDSLHEHIANLAGSPAIKKGILQTVKVVDELVKVMGRHKPENIVIEMARENQTTQKGQKNSRERMKRIEEGIKELGSQILKEHPVENTQLQNEKLYLYYLQNGRDMYVDQELDINRLSDYDVDHIVPQSFLKDDSIDNKVLTRSDKARGKSDNVPSEEVVKKMKNYWRQLLNAKLITQRKFDNLTKAERGGLSELDKAGFIKRQLVETRQITKHVAQILDSRMNTKYDENDKLIREVKVITLKSKLVSDFRKDFQFYKVREINNYHHAHDAYLNAVVGTALIKKYPKLESEFVYGDYKVYDVRKMIAKSEQEIGKATAKYFFYSNIMNFFKTEITLANGEIRKRPLIETNGETGEIVWDKGRDFATVRKVLSMPQVNIVKKTEVQTGGFSKESILPKRNSDKLIARKKDWDPKKYGGFDSPTVAYSVLVVAKVEKGKSKKLKSVKELLGITIMERSSFEKNPIDFLEAKGYKEVKKDLIIKLPKYSLFELENGRKRMLASAGELQKGNELALPSKYVNFLYLASHYEKLKGSPEDNEQKQLFVEQHKHYLDEIIEQISEFSKRVILADANLDKVLSAYNKHRDKPIREQAENIIHLFTLTNLGAPAAFKYFDTTIDRKRYTSTKEVLDATLIHQSITGLYETRIDLSQLGGDGGSGGSSGGSSGSETPGTSESATPESSGGSSGGSSGGGRDIMKDIKVRLMTDSPDDSQDLMIGAIESNLFADQISWKSDQPVWLNQWPLKQEKLQALQQLVTEQLQLGHLEESNSPWNTPVFVIKKKSGKWRLLQDLRAVNATMHDMGALQPGLPSPVAVPKGWEIIIIDLQDCFFNIKLHPEDCKRFAFSVPSPNFKRPYQRFQWKVLPQGMKNSPTLCQKFVDKAILTVRDKYQDSYIVHYMDDILLAHPSRSIVDEILTSMIQALNKHGLVVSTEKIQKYDNLKYLGTHIQGDSVSYQKLQIRTDKLRTLNDFQKLLGNINWIRPFLKLTTGELKPLFEILNGDSNPISTRKLTPEACKALQLMNERLSTARVKRLDLSQPWSLCILKTEYTPTACLWQDGVVEWIHLPHISPKVITPYDIFCTQLIIKGRHRSKELFSKDPDYIVVPYTKVQFDLLLQEKEDWPISLLGFLGEVHFHLPKDPLLTFTLQTAIIFPHMTSTTPLEKGIVIFTDGSANGRSVTYIQGREPIIKENTQNTAQQAEIVAVITAFEEVSQPFNLYTDSKYVTGLFPEIETATLSPRTKIYTELKHLQRLIHKRQEKFYIGHIRGHTGLPGPLAQGNAYADSLTRILTAGKRTADGSEFEKRTADGSEFESPKKKAKVE

SEQ ID NO: 3239 - protein, 2025 aa, synthetic construct
MPAAKRVKLDGGDKKYSIGLDIGTNSVGWAVITDEYKVPSKKFKVLGNTDRHSIKKNLIGALLFDSGETAEATRLKRTARRRYTRRKNRICYLQEIFSNEMAKVDDSFFHRLEESFLVEEDKKHERHPIFGNIVDEVAYHEKYPTIYHLRKKLVDSTDKADLRLIYLALAHMIKFRGHFLIEGDLNPDNSDVDKLFIQLVQTYNQLFEENPINASGVDAKAILSARLSKSRRLENLIAQLPGEKKNGLFGNLIALSLGLTPNFKSNFDLAEDAKLQLSKDTYDDDLDNLLAQIGDQYADLFLAAKNLSDAILLSDILRVNTEITKAPLSASMIKRYDEHHQDLTLLKALVRQQLPEKYKEIFFDQSKNGYAGYIDGGASQEEFYKFIKPILEKMDGTEELLVKLNREDLLRKQRTFDNGSIPHQIHLGELHAILRRQEDFYPFLKDNREKIEKILTFRIPYYVGPLARGNSRFAWMTRKSEETITPWNFEEVVDKGASAQSFIERMTNFDKNLPNEKVLPKHSLLYEYFTVYNELTKVKYVTEGMRKPAFLSGEQKKAIVDLLFKTNRKVTVKQLKEDYFKKIECFDSVEISGVEDRFNASLGTYHDLLKIIKDKDFLDNEENEDILEDIVLTLTLFEDREMIEERLKTYAHLFDDKVMKQLKRRRYTGWGRLSRKLINGIRDKQSGKTILDFLKSDGFANRNFMQLIHDDSLTFKEDIQKAQVSGQGDSLHEHIANLAGSPAIKKGILQTVKVVDELVKVMGRHKPENIVIEMARENQTTQKGQKNSRERMKRIEEGIKELGSQILKEHPVENTQLQNEKLYLYYLQNGRDMYVDQELDINRLSDYDVDHIVPQSFLKDDSIDNKVLTRSDKARGKSDNVPSEEVVKKMKNYWRQLLNAKLITQRKFDNLTKAERGGLSELDKAGFIKRQLVETRQITKHVAQILDSRMNTKYDENDKLIREVKVITLKSKLVSDFRKDFQFYKVREINNYHHAHDAYLNAVVGTALIKKYPKLESEFVYGDYKVYDVRKMIAKSEQEIGKATAKYFFYSNIMNFFKTEITLANGEIRKRPLIETNGETGEIVWDKGRDFATVRKVLSMPQVNIVKKTEVQTGGFSKESILPKRNSDKLIARKKDWDPKKYGGFDSPTVAYSVLVVAKVEKGKSKKLKSVKELLGITIMERSSFEKNPIDFLEAKGYKEVKKDLIIKLPKYSLFELENGRKRMLASAGELQKGNELALPSKYVNFLYLASHYEKLKGSPEDNEQKQLFVEQHKHYLDEIIEQISEFSKRVILADANLDKVLSAYNKHRDKPIREQAENIIHLFTLTNLGAPAAFKYFDTTIDRKRYTSTKEVLDATLIHQSITGLYETRIDLSQLGGDGGGSSGSSGSSGSSGGGRDIMKDIKVRLMTDSPDDSQDLMIGAIESNLFADQISWKSDQPVWLNQWPLKQEKLQALQQLVTEQLQLGHLEESNSPWNTPVFVIKKKSGKWRLLQDLRAVNATMHDMGALQPGLPSPVAVPKGWEIIIIDLQDCFFNIKLHPEDCKRFAFSVPSPNFKRPYQRFQWKVLPQGMKNSPTLCQKFVDKAILTVRDKYQDSYIVHYMDDILLAHPSRSIVDEILTSMIQALNKHGLVVSTEKIQKYDNLKYLGTHIQGDSVSYQKLQIRTDKLRTLNDFQKLLGNINWIRPFLKLTTGELKPLFEILNGDSNPISTRKLTPEACKALQLMNERLSTARVKRLDLSQPWSLCILKTEYTPTACLWQDGVVEWIHLPHISPKVITPYDIFCTQLIIKGRHRSKELFSKDPDYIVVPYTKVQFDLLLQEKEDWPISLLGFLGEVHFHLPKDPLLTFTLQTAIIFPHMTSTTPLEKGIVIFTDGSANGRSVTYIQGREPIIKENTQNTAQQAEIVAVITAFEEVSQPFNLYTDSKYVTGLFPEIETATLSPRTKIYTELKHLQRLIHKRQEKFYIGHIRGHTGLPGPLAQGNAYADSLTRILTAGKRTADGSEFEKRTADGSEFESPKKKAKVE

SEQ ID NO: 3240 - protein, 2022 aa, synthetic construct
MPAAKRVKLDGGDKKYSIGLDIGTNSVGWAVITDEYKVPSKKFKVLGNTDRHSIKKNLIGALLFDSGETAEATRLKRTARRRYTRRKNRICYLQEIFSNEMAKVDDSFFHRLEESFLVEEDKKHERHPIFGNIVDEVAYHEKYPTIYHLRKKLVDSTDKADLRLIYLALAHMIKFRGHFLIEGDLNPDNSDVDKLFIQLVQTYNQLFEENPINASGVDAKAILSARLSKSRRLENLIAQLPGEKKNGLFGNLIALSLGLTPNFKSNFDLAEDAKLQLSKDTYDDDLDNLLAQIGDQYADLFLAAKNLSDAILLSDILRVNTEITKAPLSASMIKRYDEHHQDLTLLKALVRQQLPEKYKEIFFDQSKNGYAGYIDGGASQEEFYKFIKPILEKMDGTEELLVKLNREDLLRKQRTFDNGSIPHQIHLGELHAILRRQEDFYPFLKDNREKIEKILTFRIPYYVGPLARGNSRFAWMTRKSEETITPWNFEEVVDKGASAQSFIERMTNFDKNLPNEKVLPKHSLLYEYFTVYNELTKVKYVTEGMRKPAFLSGEQKKAIVDLLFKTNRKVTVKQLKEDYFKKIECFDSVEISGVEDRFNASLGTYHDLLKIIKDKDFLDNEENEDILEDIVLTLTLFEDREMIEERLKTYAHLFDDKVMKQLKRRRYTGWGRLSRKLINGIRDKQSGKTILDFLKSDGFANRNFMQLIHDDSLTFKEDIQKAQVSGQGDSLHEHIANLAGSPAIKKGILQTVKVVDELVKVMGRHKPENIVIEMARENQTTQKGQKNSRERMKRIEEGIKELGSQILKEHPVENTQLQNEKLYLYYLQNGRDMYVDQELDINRLSDYDVDHIVPQSFLKDDSIDNKVLTRSDKARGKSDNVPSEEVVKKMKNYWRQLLNAKLITQRKFDNLTKAERGGLSELDKAGFIKRQLVETRQITKHVAQILDSRMNTKYDENDKLIREVKVITLKSKLVSDFRKDFQFYKVREINNYHHAHDAYLNAVVGTALIKKYPKLESEFVYGDYKVYDVRKMIAKSEQEIGKATAKYFFYSNIMNFFKTEITLANGEIRKRPLIETNGETGEIVWDKGRDFATVRKVLSMPQVNIVKKTEVQTGGFSKESILPKRNSDKLIARKKDWDPKKYGGFDSPTVAYSVLVVAKVEKGKSKKLKSVKELLGITIMERSSFEKNPIDFLEAKGYKEVKKDLIIKLPKYSLFELENGRKRMLASAGELQKGNELALPSKYVNFLYLASHYEKLKGSPEDNEQKQLFVEQHKHYLDEIIEQISEFSKRVILADANLDKVLSAYNKHRDKPIREQAENIIHLFTLTNLGAPAAFKYFDTTIDRKRYTSTKEVLDATLIHQSITGLYETRIDLSQLGGDGGGGGGGSGSSGGGRDIMKDIKVRLMTDSPDDSQDLMIGAIESNLFADQISWKSDQPVWLNQWPLKQEKLQALQQLVTEQLQLGHLEESNSPWNTPVFVIKKKSGKWRLLQDLRAVNATMHDMGALQPGLPSPVAVPKGWEIIIIDLQDCFFNIKLHPEDCKRFAFSVPSPNFKRPYQRFQWKVLPQGMKNSPTLCQKFVDKAILTVRDKYQDSYIVHYMDDILLAHPSRSIVDEILTSMIQALNKHGLVVSTEKIQKYDNLKYLGTHIQGDSVSYQKLQIRTDKLRTLNDFQKLLGNINWIRPFLKLTTGELKPLFEILNGDSNPISTRKLTPEACKALQLMNERLSTARVKRLDLSQPWSLCILKTEYTPTACLWQDGVVEWIHLPHISPKVITPYDIFCTQLIIKGRHRSKELFSKDPDYIVVPYTKVQFDLLLQEKEDWPISLLGFLGEVHFHLPKDPLLTFTLQTAIIFPHMTSTTPLEKGIVIFTDGSANGRSVTYIQGREPIIKENTQNTAQQAEIVAVITAFEEVSQPFNLYTDSKYVTGLFPEIETATLSPRTKIYTELKHLQRLIHKRQEKFYIGHIRGHTGLPGPLAQGNAYADSLTRILTAGKRTADGSEFEKRTADGSEFESPKKKAKVE

SEQ ID NO: 3241 - protein, 2022 aa, synthetic construct
MPAAKRVKLDGGDKKYSIGLDIGTNSVGWAVITDEYKVPSKKFKVLGNTDRHSIKKNLIGALLFDSGETAEATRLKRTARRRYTRRKNRICYLQEIFSNEMAKVDDSFFHRLEESFLVEEDKKHERHPIFGNIVDEVAYHEKYPTIYHLRKKLVDSTDKADLRLIYLALAHMIKFRGHFLIEGDLNPDNSDVDKLFIQLVQTYNQLFEENPINASGVDAKAILSARLSKSRRLENLIAQLPGEKKNGLFGNLIALSLGLTPNFKSNFDLAEDAKLQLSKDTYDDDLDNLLAQIGDQYADLFLAAKNLSDAILLSDILRVNTEITKAPLSASMIKRYDEHHQDLTLLKALVRQQLPEKYKEIFFDQSKNGYAGYIDGGASQEEFYKFIKPILEKMDGTEELLVKLNREDLLRKQRTFDNGSIPHQIHLGELHAILRRQEDFYPFLKDNREKIEKILTFRIPYYVGPLARGNSRFAWMTRKSEETITPWNFEEVVDKGASAQSFIERMTNFDKNLPNEKVLPKHSLLYEYFTVYNELTKVKYVTEGMRKPAFLSGEQKKAIVDLLFKTNRKVTVKQLKEDYFKKIECFDSVEISGVEDRFNASLGTYHDLLKIIKDKDFLDNEENEDILEDIVLTLTLFEDREMIEERLKTYAHLFDDKVMKQLKRRRYTGWGRLSRKLINGIRDKQSGKTILDFLKSDGFANRNFMQLIHDDSLTFKEDIQKAQVSGQGDSLHEHIANLAGSPAIKKGILQTVKVVDELVKVMGRHKPENIVIEMARENQTTQKGQKNSRERMKRIEEGIKELGSQILKEHPVENTQLQNEKLYLYYLQNGRDMYVDQELDINRLSDYDVDHIVPQSFLKDDSIDNKVLTRSDKARGKSDNVPSEEVVKKMKNYWRQLLNAKLITQRKFDNLTKAERGGLSELDKAGFIKRQLVETRQITKHVAQILDSRMNTKYDENDKLIREVKVITLKSKLVSDFRKDFQFYKVREINNYHHAHDAYLNAVVGTALIKKYPKLESEFVYGDYKVYDVRKMIAKSEQEIGKATAKYFFYSNIMNFFKTEITLANGEIRKRPLIETNGETGEIVWDKGRDFATVRKVLSMPQVNIVKKTEVQTGGFSKESILPKRNSDKLIARKKDWDPKKYGGFDSPTVAYSVLVVAKVEKGKSKKLKSVKELLGITIMERSSFEKNPIDFLEAKGYKEVKKDLIIKLPKYSLFELENGRKRMLASAGELQKGNELALPSKYVNFLYLASHYEKLKGSPEDNEQKQLFVEQHKHYLDEIIEQISEFSKRVILADANLDKVLSAYNKHRDKPIREQAENIIHLFTLTNLGAPAAFKYFDTTIDRKRYTSTKEVLDATLIHQSITGLYETRIDLSQLGGDGGGGGGSSGGSGGGRDIMKDIKVRLMTDSPDDSQDLMIGAIESNLFADQISWKSDQPVWLNQWPLKQEKLQALQQLVTEQLQLGHLEESNSPWNTPVFVIKKKSGKWRLLQDLRAVNATMHDMGALQPGLPSPVAVPKGWEIIIIDLQDCFFNIKLHPEDCKRFAFSVPSPNFKRPYQRFQWKVLPQGMKNSPTLCQKFVDKAILTVRDKYQDSYIVHYMDDILLAHPSRSIVDEILTSMIQALNKHGLVVSTEKIQKYDNLKYLGTHIQGDSVSYQKLQIRTDKLRTLNDFQKLLGNINWIRPFLKLTTGELKPLFEILNGDSNPISTRKLTPEACKALQLMNERLSTARVKRLDLSQPWSLCILKTEYTPTACLWQDGVVEWIHLPHISPKVITPYDIFCTQLIIKGRHRSKELFSKDPDYIVVPYTKVQFDLLLQEKEDWPISLLGFLGEVHFHLPKDPLLTFTLQTAIIFPHMTSTTPLEKGIVIFTDGSANGRSVTYIQGREPIIKENTQNTAQQAEIVAVITAFEEVSQPFNLYTDSKYVTGLFPEIETATLSPRTKIYTELKHLQRLIHKRQEKFYIGHIRGHTGLPGPLAQGNAYADSLTRILTAGKRTADGSEFEKRTADGSEFESPKKKAKVE

SEQ ID NO: 3242 - protein, 2019 aa, synthetic construct
MPAAKRVKLDGGDKKYSIGLDIGTNSVGWAVITDEYKVPSKKFKVLGNTDRHSIKKNLIGALLFDSGETAEATRLKRTARRRYTRRKNRICYLQEIFSNEMAKVDDSFFHRLEESFLVEEDKKHERHPIFGNIVDEVAYHEKYPTIYHLRKKLVDSTDKADLRLIYLALAHMIKFRGHFLIEGDLNPDNSDVDKLFIQLVQTYNQLFEENPINASGVDAKAILSARLSKSRRLENLIAQLPGEKKNGLFGNLIALSLGLTPNFKSNFDLAEDAKLQLSKDTYDDDLDNLLAQIGDQYADLFLAAKNLSDAILLSDILRVNTEITKAPLSASMIKRYDEHHQDLTLLKALVRQQLPEKYKEIFFDQSKNGYAGYIDGGASQEEFYKFIKPILEKMDGTEELLVKLNREDLLRKQRTFDNGSIPHQIHLGELHAILRRQEDFYPFLKDNREKIEKILTFRIPYYVGPLARGNSRFAWMTRKSEETITPWNFEEVVDKGASAQSFIERMTNFDKNLPNEKVLPKHSLLYEYFTVYNELTKVKYVTEGMRKPAFLSGEQKKAIVDLLFKTNRKVTVKQLKEDYFKKIECFDSVEISGVEDRFNASLGTYHDLLKIIKDKDFLDNEENEDILEDIVLTLTLFEDREMIEERLKTYAHLFDDKVMKQLKRRRYTGWGRLSRKLINGIRDKQSGKTILDFLKSDGFANRNFMQLIHDDSLTFKEDIQKAQVSGQGDSLHEHIANLAGSPAIKKGILQTVKVVDELVKVMGRHKPENIVIEMARENQTTQKGQKNSRERMKRIEEGIKELGSQILKEHPVENTQLQNEKLYLYYLQNGRDMYVDQELDINRLSDYDVDHIVPQSFLKDDSIDNKVLTRSDKARGKSDNVPSEEVVKKMKNYWRQLLNAKLITQRKFDNLTKAERGGLSELDKAGFIKRQLVETRQITKHVAQILDSRMNTKYDENDKLIREVKVITLKSKLVSDFRKDFQFYKVREINNYHHAHDAYLNAVVGTALIKKYPKLESEFVYGDYKVYDVRKMIAKSEQEIGKATAKYFFYSNIMNFFKTEITLANGEIRKRPLIETNGETGEIVWDKGRDFATVRKVLSMPQVNIVKKTEVQTGGFSKESILPKRNSDKLIARKKDWDPKKYGGFDSPTVAYSVLVVAKVEKGKSKKLKSVKELLGITIMERSSFEKNPIDFLEAKGYKEVKKDLIIKLPKYSLFELENGRKRMLASAGELQKGNELALPSKYVNFLYLASHYEKLKGSPEDNEQKQLFVEQHKHYLDEIIEQISEFSKRVILADANLDKVLSAYNKHRDKPIREQAENIIHLFTLTNLGAPAAFKYFDTTIDRKRYTSTKEVLDATLIHQSITGLYETRIDLSQLGGDGGGGSGSSGGGRDIMKDIKVRLMTDSPDDSQDLMIGAIESNLFADQISWKSDQPVWLNQWPLKQEKLQALQQLVTEQLQLGHLEESNSPWNTPVFVIKKKSGKWRLLQDLRAVNATMHDMGALQPGLPSPVAVPKGWEIIIIDLQDCFFNIKLHPEDCKRFAFSVPSPNFKRPYQRFQWKVLPQGMKNSPTLCQKFVDKAILTVRDKYQDSYIVHYMDDILLAHPSRSIVDEILTSMIQALNKHGLVVSTEKIQKYDNLKYLGTHIQGDSVSYQKLQIRTDKLRTLNDFQKLLGNINWIRPFLKLTTGELKPLFEILNPDSNPISTRKLTPEACKALQLMNERLSTARVKRLDLSQPWSLCILKTEYTPTACLWQDGVVEWIHLPHISPKVITPYDIFCTQLIIKGRHRSKELFSKDPDYIVVPYTKVQFDLLLQEKEDWPISLLGFLGEVHFHLPKDPLLTFTLQTAIIFPHMTSTTPLEKGIVIFTDGSANGRSVTYIQGREPIIKENTQNTAQQAEIVAVITAFEEVSQPFNLYTDSKYVTGLFPEIETATLSPRTKIYTELKHLQRLIHKRQEKFYIGHIRGHTGLPGPLAQGNAYADSLTRILTAGKRTADGSEFEKRTADGSEFESPKKKAKVE

SEQ ID NO: 3243 - protein, 2022 aa, synthetic construct
MPAAKRVKLDGGDKKYSIGLDIGTNSVGWAVITDEYKVPSKKFKVLGNTDRHSIKKNLIGALLFDSGETAEATRLKRTARRRYTRRKNRICYLQEIFSNEMAKVDDSFFHRLEESFLVEEDKKHERHPIFGNIVDEVAYHEKYPTIYHLRKKLVDSTDKADLRLIYLALAHMIKFRGHFLIEGDLNPDNSDVDKLFIQLVQTYNQLFEENPINASGVDAKAILSARLSKSRRLENLIAQLPGEKKNGLFGNLIALSLGLTPNFKSNFDLAEDAKLQLSKDTYDDDLDNLLAQIGDQYADLFLAAKNLSDAILLSDILRVNTEITKAPLSASMIKRYDEHHQDLTLLKALVRQQLPEKYKEIFFDQSKNGYAGYIDGGASQEEFYKFIKPILEKMDGTEELLVKLNREDLLRKQRTFDNGSIPHQIHLGELHAILRRQEDFYPFLKDNREKIEKILTFRIPYYVGPLARGNSRFAWMTRKSEETITPWNFEEVVDKGASAQSFIERMTNFDKNLPNEKVLPKHSLLYEYFTVYNELTKVKYVTEGMRKPAFLSGEQKKAIVDLLFKTNRKVTVKQLKEDYFKKIECFDSVEISGVEDRFNASLGTYHDLLKIIKDKDFLDNEENEDILEDIVLTLTLFEDREMIEERLKTYAHLFDDKVMKQLKRRRYTGWGRLSRKLINGIRDKQSGKTILDFLKSDGFANRNFMQLIHDDSLTFKEDIQKAQVSGQGDSLHEHIANLAGSPAIKKGILQTVKVVDELVKVMGRHKPENIVIEMARENQTTQKGQKNSRERMKRIEEGIKELGSQILKEHPVENTQLQNEKLYLYYLQNGRDMYVDQELDINRLSDYDVDHIVPQSFLKDDSIDNKVLTRSDKARGKSDNVPSEEVVKKMKNYWRQLLNAKLITQRKFDNLTKAERGGLSELDKAGFIKRQLVETRQITKHVAQILDSRMNTKYDENDKLIREVKVITLKSKLVSDFRKDFQFYKVREINNYHHAHDAYLNAVVGTALIKKYPKLESEFVYGDYKVYDVRKMIAKSEQEIGKATAKYFFYSNIMNFFKTEITLANGEIRKRPLIETNGETGEIVWDKGRDFATVRKVLSMPQVNIVKKTEVQTGGFSKESILPKRNSDKLIARKKDWDPKKYGGFDSPTVAYSVLVVAKVEKGKSKKLKSVKELLGITIMERSSFEKNPIDFLEAKGYKEVKKDLIIKLPKYSLFELENGRKRMLASAGELQKGNELALPSKYVNFLYLASHYEKLKGSPEDNEQKQLFVEQHKHYLDEIIEQISEFSKRVILADANLDKVLSAYNKHRDKPIREQAENIIHLFTLTNLGAPAAFKYFDTTIDRKRYTSTKEVLDATLIHQSITGLYETRIDLSQLGGDGGGGGGGSGSSGGGRDIMKDIKVRLMTDSPDDSQDLMIGAIESNLFADQISWKSDQPVWLNQWPLKQEKLQALQQLVTEQLQLGHLEESNSPWNTPVFVIKKKSGKWRLLQDLRAVNATMHDMGALQPGLPSPVAVPKGWEIIIIDLQDCFFNIKLHPEDCKRFAFSVPSPNFKRPYQRFQWKVLPQGMKNSPTLCQKFVDKAILTVRDKYQDSYIVHYMDDILLAHPSRSIVDEILTSMIQALNKHGLVVSTEKIQKYDNLKYLGTHIQGDSVSYQKLQIRTDKLRTLNDFQKLLGNINWIRPFLKLTTGELKPLFEILNPDSNPISTRKLTPEACKALQLMNERLSTARVKRLDLSQPWSLCILKTEYTPTACLWQDGVVEWIHLPHISPKVITPYDIFCTQLIIKGRHRSKELFSKDPDYIVVPYTKVQFDLLLQEKEDWPISLLGFLGEVHFHLPKDPLLTFTLQTAIIFPHMTSTTPLEKGIVIFTDGSANGRSVTYIQGREPIIKENTQNTAQQAEIVAVITAFEEVSQPFNLYTDSKYVTGLFPEIETATLSPRTKIYTELKHLQRLIHKRQEKFYIGHIRGHTGLPGPLAQGNAYADSLTRILTAGKRTADGSEFEKRTADGSEFESPKKKAKVE

SEQ ID NO: 3244 - protein, 2024 aa, synthetic construct
MPAAKRVKLDGGDKKYSIGLDIGTNSVGWAVITDEYKVPSKKFKVLGNTDRHSIKKNLIGALLFDSGETAEATRLKRTARRRYTRRKNRICYLQEIFSNEMAKVDDSFFHRLEESFLVEEDKKHERHPIFGNIVDEVAYHEKYPTIYHLRKKLVDSTDKADLRLIYLALAHMIKFRGHFLIEGDLNPDNSDVDKLFIQLVQTYNQLFEENPINASGVDAKAILSARLSKSRRLENLIAQLPGEKKNGLFGNLIALSLGLTPNFKSNFDLAEDAKLQLSKDTYDDDLDNLLAQIGDQYADLFLAAKNLSDAILLSDILRVNTEITKAPLSASMIKRYDEHHQDLTLLKALVRQQLPEKYKEIFFDQSKNGYAGYIDGGASQEEFYKFIKPILEKMDGTEELLVKLNREDLLRKQRTFDNGSIPHQIHLGELHAILRRQEDFYPFLKDNREKIEKILTFRIPYYVGPLARGNSRFAWMTRKSEETITPWNFEEVVDKGASAQSFIERMTNFDKNLPNEKVLPKHSLLYEYFTVYNELTKVKYVTEGMRKPAFLSGEQKKAIVDLLFKTNRKVTVKQLKEDYFKKIECFDSVEISGVEDRFNASLGTYHDLLKIIKDKDFLDNEENEDILEDIVLTLTLFEDREMIEERLKTYAHLFDDKVMKQLKRRRYTGWGRLSRKLINGIRDKQSGKTILDFLKSDGFANRNFMQLIHDDSLTFKEDIQKAQVSGQGDSLHEHIANLAGSPAIKKGILQTVKVVDELVKVMGRHKPENIVIEMARENQTTQKGQKNSRERMKRIEEGIKELGSQILKEHPVENTQLQNEKLYLYYLQNGRDMYVDQELDINRLSDYDVDHIVPQSFLKDDSIDNKVLTRSDKARGKSDNVPSEEVVKKMKNYWRQLLNAKLITQRKFDNLTKAERGGLSELDKAGFIKRQLVETRQITKHVAQILDSRMNTKYDENDKLIREVKVITLKSKLVSDFRKDFQFYKVREINNYHHAHDAYLNAVVGTALIKKYPKLESEFVYGDYKVYDVRKMIAKSEQEIGKATAKYFFYSNIMNFFKTEITLANGEIRKRPLIETNGETGEIVWDKGRDFATVRKVLSMPQVNIVKKTEVQTGGFSKESILPKRNSDKLIARKKDWDPKKYGGFDSPTVAYSVLVVAKVEKGKSKKLKSVKELLGITIMERSSFEKNPIDFLEAKGYKEVKKDLIIKLPKYSLFELENGRKRMLASAGELQKGNELALPSKYVNFLYLASHYEKLKGSPEDNEQKQLFVEQHKHYLDEIIEQISEFSKRVILADANLDKVLSAYNKHRDKPIREQAENIIHLFTLTNLGAPAAFKYFDTTIDRKRYTSTKEVLDATLIHQSITGLYETRIDLSQLGGDGGGSSEAAAKGGSGGGRDIMKDIKVRLMTDSPDDSQDLMIGAIESNLFADQISWKSDQPVWLNQWPLKQEKLQALQQLVTEQLQLGHLEESNSPWNTPVFVIKKKSGKWRLLQDLRAVNATMHDMGALQPGLPSPVAPPKGWEIIIIDLQDCFFNIKLHPEDCKRFAFSVPSPNFKRPYQRFQWKVLPQGMKNSPTLCQKFVDKAILTVRDKYQDSYIVHYMDDILLAHPSRSIVDEILTSMIQALNKHGLVVSTEKIQKYDNLKYLGTHIQGDSVSYQKLQIRTDKLRTLNDFQKLLGNINWIRPFLKLTTGELKPLFEILNPDSNPISTRKLTPEACKALQLMNERLSTARVKRLDLSQPWSLCILKTEYTPTACLWQDGVVEWIHLPHISPKVITPYDIFCTQLIIKGRHRSKELFSKDPDYIVVPYTKVQFDLLLQEKEDWPISLLGFLGEVHFHLPKDPLLTFTLQTAIIFPHMTSTTPLEKGIVIFTDGSANGRSVTYIQGREPIIKENTQNTAQQAEIVAVITAFEEVSQPFNLYTDSKYVTGLFPEIETATLSPRTKIYTELKHLQRLIHKRQEKFYIGHIRGHTGLPGPLAQGNAYADSLTRILTAGKRTADGSEFEKRTADGSEFESPKKKAKVE

SEQ ID NO: 3245 - protein, 2125 aa, synthetic construct
MPAAKRVKLDGGDKKYSIGLDIGTNSVGWAVITDEYKVPSKKFKVLGNTDRHSIKKNLIGALLFDSGETAEATRLKRTARRRYTRRKNRICYLQEIFSNEMAKVDDSFFHRLEESFLVEEDKKHERHPIFGNIVDEVAYHEKYPTIYHLRKKLVDSTDKADLRLIYLALAHMIKFRGHFLIEGDLNPDNSDVDKLFIQLVQTYNQLFEENPINASGVDAKAILSARLSKSRRLENLIAQLPGEKKNGLFGNLIALSLGLTPNFKSNFDLAEDAKLQLSKDTYDDDLDNLLAQIGDQYADLFLAAKNLSDAILLSDILRVNTEITKAPLSASMIKRYDEHHQDLTLLKALVRQQLPEKYKEIFFDQSKNGYAGYIDGGASQEEFYKFIKPILEKMDGTEELLVKLNREDLLRKQRTFDNGSIPHQIHLGELHAILRRQEDFYPFLKDNREKIEKILTFRIPYYVGPLARGNSRFAWMTRKSEETITPWNFEEVVDKGASAQSFIERMTNFDKNLPNEKVLPKHSLLYEYFTVYNELTKVKYVTEGMRKPAFLSGEQKKAIVDLLFKTNRKVTVKQLKEDYFKKIECFDSVEISGVEDRFNASLGTYHDLLKIIKDKDFLDNEENEDILEDIVLTLTLFEDREMIEERLKTYAHLFDDKVMKQLKRRRYTGWGRLSRKLINGIRDKQSGKTILDFLKSDGFANRNFMQLIHDDSLTFKEDIQKAQVSGQGDSLHEHIANLAGSPAIKKGILQTVKVVDELVKVMGRHKPENIVIEMARENQTTQKGQKNSRERMKRIEEGIKELGSQILKEHPVENTQLQNEKLYLYYLQNGRDMYVDQELDINRLSDYDVDHIVPQSFLKDDSIDNKVLTRSDKARGKSDNVPSEEVVKKMKNYWRQLLNAKLITQRKFDNLTKAERGGLSELDKAGFIKRQLVETRQITKHVAQILDSRMNTKYDENDKLIREVKVITLKSKLVSDFRKDFQFYKVREINNYHHAHDAYLNAVVGTALIKKYPKLESEFVYGDYKVYDVRKMIAKSEQEIGKATAKYFFYSNIMNFFKTEITLANGEIRKRPLIETNGETGEIVWDKGRDFATVRKVLSMPQVNIVKKTEVQTGGFSKESILPKRNSDKLIARKKDWDPKKYGGFDSPTVAYSVLVVAKVEKGKSKKLKSVKELLGITIMERSSFEKNPIDFLEAKGYKEVKKDLIIKLPKYSLFELENGRKRMLASAGELQKGNELALPSKYVNFLYLASHYEKLKGSPEDNEQKQLFVEQHKHYLDEIIEQISEFSKRVILADANLDKVLSAYNKHRDKPIREQAENIIHLFTLTNLGAPAAFKYFDTTIDRKRYTSTKEVLDATLIHQSITGLYETRIDLSQLGGDGGEAAAKEAAAKEAAAKEAAAKGGWVQEISDSRPMLHIYLNGRRFLGLLNTGADKTCIAGRDWPANWPIHQTESSLQGLGMACGVARSSQPLRWQHEDKSGIIHPFVIPTLPFTLWGRDIMKDIKVRLMTDSPDDSQDLMIGAIESNLFADQISWKSDQPVWLNQWPLKQEKLQALQQLVTEQLQLGHLEESNSPWNTPVFVIKKKSGKWRLLQDLRAVNATMHDMGALQPGLPSPVAVPKGWEIIIIDLQDCFFNIKLHPEDCKRFAFSVPSPNFKRPYQRFQWKVLPQGMKNSPTLCQKFVDKAILTVRDKYQDSYIVHYMDDILLAHPSRSIVDEILTSMIQALNKHGLVVSTEKIQKYDNLKYLGTHIQGDSVSYQKLQIRTDKLRTLNDFQKLLGNINWIRPFLKLTTGELKPLFEILNPDSNPISTRKLTPEACKALQLMNERLSTARVKRLDLSQPWSLCILKTEYTPTACLWQDGVVEWIHLPHISPKVITPYDIFCTQLIIKGRHRSKELFSKDPDYIVVPYTKVQFDLLLQEKEDWPISLLGFLGEVHFHLPKDPLLTFTLQTAIIFPHMTSTTPLEKGIVIFTDGSANGRSVTYIQGREPIIKENTQNTAQQAEIVAVITAFEEVSQPFNLYTDSKYVTGLFPEIETATLSPRTKIYTELKHLQRLIHKRQEKFYIGHIRGHTGLPGPLAQGNAYADSLTRILTAGKRTADGSEFEKRTADGSEFESPKKKAKVE

SEQ ID NO: 3246 - protein, 2116 aa, synthetic construct
MPAAKRVKLDGGDKKYSIGLDIGTNSVGWAVITDEYKVPSKKFKVLGNTDRHSIKKNLIGALLFDSGETAEATRLKRTARRRYTRRKNRICYLQEIFSNEMAKVDDSFFHRLEESFLVEEDKKHERHPIFGNIVDEVAYHEKYPTIYHLRKKLVDSTDKADLRLIYLALAHMIKFRGHFLIEGDLNPDNSDVDKLFIQLVQTYNQLFEENPINASGVDAKAILSARLSKSRRLENLIAQLPGEKKNGLFGNLIALSLGLTPNFKSNFDLAEDAKLQLSKDTYDDDLDNLLAQIGDQYADLFLAAKNLSDAILLSDILRVNTEITKAPLSASMIKRYDEHHQDLTLLKALVRQQLPEKYKEIFFDQSKNGYAGYIDGGASQEEFYKFIKPILEKMDGTEELLVKLNREDLLRKQRTFDNGSIPHQIHLGELHAILRRQEDFYPFLKDNREKIEKILTFRIPYYVGPLARGNSRFAWMTRKSEETITPWNFEEVVDKGASAQSFIERMTNFDKNLPNEKVLPKHSLLYEYFTVYNELTKVKYVTEGMRKPAFLSGEQKKAIVDLLFKTNRKVTVKQLKEDYFKKIECFDSVEISGVEDRFNASLGTYHDLLKIIKDKDFLDNEENEDILEDIVLTLTLFEDREMIEERLKTYAHLFDDKVMKQLKRRRYTGWGRLSRKLINGIRDKQSGKTILDFLKSDGFANRNFMQLIHDDSLTFKEDIQKAQVSGQGDSLHEHIANLAGSPAIKKGILQTVKVVDELVKVMGRHKPENIVIEMARENQTTQKGQKNSRERMKRIEEGIKELGSQILKEHPVENTQLQNEKLYLYYLQNGRDMYVDQELDINRLSDYDVDHIVPQSFLKDDSIDNKVLTRSDKARGKSDNVPSEEVVKKMKNYWRQLLNAKLITQRKFDNLTKAERGGLSELDKAGFIKRQLVETRQITKHVAQILDSRMNTKYDENDKLIREVKVITLKSKLVSDFRKDFQFYKVREINNYHHAHDAYLNAVVGTALIKKYPKLESEFVYGDYKVYDVRKMIAKSEQEIGKATAKYFFYSNIMNFFKTEITLANGEIRKRPLIETNGETGEIVWDKGRDFATVRKVLSMPQVNIVKKTEVQTGGFSKESILPKRNSDKLIARKKDWDPKKYGGFDSPTVAYSVLVVAKVEKGKSKKLKSVKELLGITIMERSSFEKNPIDFLEAKGYKEVKKDLIIKLPKYSLFELENGRKRMLASAGELQKGNELALPSKYVNFLYLASHYEKLKGSPEDNEQKQLFVEQHKHYLDEIIEQISEFSKRVILADANLDKVLSAYNKHRDKPIREQAENIIHLFTLTNLGAPAAFKYFDTTIDRKRYTSTKEVLDATLIHQSITGLYETRIDLSQLGGDGGGSSGGSEAAAKGGWVQEISDSRPMLHIYLNGRRFLGLLNTGADKTCIAGRDWPANWPIHQTESSLQGLGMACGVARSSQPLRWQHEDKSGIIHPFVIPTLPFTLWGRDIMKDIKVRLMTDSPDDSQDLMIGAIESNLFADQISWKSDQPVWLNQWPLKQEKLQALQQLVTEQLQLGHLEESNSPWNTPVFVIKKKSGKWRLLQDLRAVNATMHDMGALQPGLPSPVAVPKGWEIIIIDLQDCFFNIKLHPEDCKRFAFSVPSPNFKRPYQRFQWKVLPQGMKNSPTLCQKFVDKAILTVRDKYQDSYIVHYMDDILLAHPSRSIVDEILTSMIQALNKHGLVVSTEKIQKYDNLKYLGTHIQGDSVSYQKLQIRTDKLRTLNDFQKLLGNINWIRPFLKLTTGELKPLFEILNPDSNPISTRKLTPEACKALQLMNERLSTARVKRLDLSQPWSLCILKTEYTPTACLWQDGVVEWIHLPHISPKVITPYDIFCTQLIIKGRHRSKELFSKDPDYIVVPYTKVQFDLLLQEKEDWPISLLGFLGEVHFHLPKDPLLTFTLQTAIIFPHMTSTTPLEKGIVIFTDGSANGRSVTYIQGREPIIKENTQNTAQQAEIVAVITAFEEVSQPFNLYTDSKYVTGLFPEIETATLSPRTKIYTELKHLQRLIHKRQEKFYIGHIRGHTGLPGPLAQGNAYADSLTRILTAGKRTADGSEFEKRTADGSEFESPKKKAKVE

SEQ ID NO: 3247 - protein, 2114 aa, synthetic construct
MPAAKRVKLDGGDKKYSIGLDIGTNSVGWAVITDEYKVPSKKFKVLGNTDRHSIKKNLIGALLFDSGETAEATRLKRTARRRYTRRKNRICYLQEIFSNEMAKVDDSFFHRLEESFLVEEDKKHERHPIFGNIVDEVAYHEKYPTIYHLRKKLVDSTDKADLRLIYLALAHMIKFRGHFLIEGDLNPDNSDVDKLFIQLVQTYNQLFEENPINASGVDAKAILSARLSKSRRLENLIAQLPGEKKNGLFGNLIALSLGLTPNFKSNFDLAEDAKLQLSKDTYDDDLDNLLAQIGDQYADLFLAAKNLSDAILLSDILRVNTEITKAPLSASMIKRYDEHHQDLTLLKALVRQQLPEKYKEIFFDQSKNGYAGYIDGGASQEEFYKFIKPILEKMDGTEELLVKLNREDLLRKQRTFDNGSIPHQIHLGELHAILRRQEDFYPFLKDNREKIEKILTFRIPYYVGPLARGNSRFAWMTRKSEETITPWNFEEVVDKGASAQSFIERMTNFDKNLPNEKVLPKHSLLYEYFTVYNELTKVKYVTEGMRKPAFLSGEQKKAIVDLLFKTNRKVTVKQLKEDYFKKIECFDSVEISGVEDRFNASLGTYHDLLKIIKDKDFLDNEENEDILEDIVLTLTLFEDREMIEERLKTYAHLFDDKVMKQLKRRRYTGWGRLSRKLINGIRDKQSGKTILDFLKSDGFANRNFMQLIHDDSLTFKEDIQKAQVSGQGDSLHEHIANLAGSPAIKKGILQTVKVVDELVKVMGRHKPENIVIEMARENQTTQKGQKNSRERMKRIEEGIKELGSQILKEHPVENTQLQNEKLYLYYLQNGRDMYVDQELDINRLSDYDVDHIVPQSFLKDDSIDNKVLTRSDKARGKSDNVPSEEVVKKMKNYWRQLLNAKLITQRKFDNLTKAERGGLSELDKAGFIKRQLVETRQITKHVAQILDSRMNTKYDENDKLIREVKVITLKSKLVSDFRKDFQFYKVREINNYHHAHDAYLNAVVGTALIKKYPKLESEFVYGDYKVYDVRKMIAKSEQEIGKATAKYFFYSNIMNFFKTEITLANGEIRKRPLIETNGETGEIVWDKGRDFATVRKVLSMPQVNIVKKTEVQTGGFSKESILPKRNSDKLIARKKDWDPKKYGGFDSPTVAYSVLVVAKVEKGKSKKLKSVKELLGITIMERSSFEKNPIDFLEAKGYKEVKKDLIIKLPKYSLFELENGRKRMLASAGELQKGNELALPSKYVNFLYLASHYEKLKGSPEDNEQKQLFVEQHKHYLDEIIEQISEFSKRVILADANLDKVLSAYNKHRDKPIREQAENIIHLFTLTNLGAPAAFKYFDTTIDRKRYTSTKEVLDATLIHQSITGLYETRIDLSQLGGDGGGGGGGSGSSGGWVQEISDSRPMLHIYLNGRRFLGLLNTGADKTCIAGRDWPANWPIHQTESSLQGLGMACGVARSSQPLRWQHEDKSGIIHPFVIPTLPFTLWGRDIMKDIKVRLMTDSPDDSQDLMIGAIESNLFADQISWKSDQPVWLNQWPLKQEKLQALQQLVTEQLQLGHLEESNSPWNTPVFVIKKKSGKWRLLQDLRAVNATMHDMGALQPGLPSPVAVPKGWEIIIIDLQDCFFNIKLHPEDCKRFAFSVPSPNFKRPYQRFQWKVLPQGMKNSPTLCQKFVDKAILTVRDKYQDSYIVHYMDDILLAHPSRSIVDEILTSMIQALNKHGLVVSTEKIQKYDNLKYLGTHIQGDSVSYQKLQIRTDKLRTLNDFQKLLGNINWIRPFLKLTTGELKPLFEILNPDSNPISTRKLTPEACKALQLMNERLSTARVKRLDLSQPWSLCILKTEYTPTACLWQDGVVEWIHLPHISPKVITPYDIFCTQLIIKGRHRSKELFSKDPDYIVVPYTKVQFDLLLQEKEDWPISLLGFLGEVHFHLPKDPLLTFTLQTAIIFPHMTSTTPLEKGIVIFTDGSANGRSVTYIQGREPIIKENTQNTAQQAEIVAVITAFEEVSQPFNLYTDSKYVTGLFPEIETATLSPRTKIYTELKHLQRLIHKRQEKFYIGHIRGHTGLPGPLAQGNAYADSLTRILTAGKRTADGSEFEKRTADGSEFESPKKKAKVE

SEQ ID NO: 3248 - protein, 2116 aa, synthetic construct
MPAAKRVKLDGGDKKYSIGLDIGTNSVGWAVITDEYKVPSKKFKVLGNTDRHSIKKNLIGALLFDSGETAEATRLKRTARRRYTRRKNRICYLQEIFSNEMAKVDDSFFHRLEESFLVEEDKKHERHPIFGNIVDEVAYHEKYPTIYHLRKKLVDSTDKADLRLIYLALAHMIKFRGHFLIEGDLNPDNSDVDKLFIQLVQTYNQLFEENPINASGVDAKAILSARLSKSRRLENLIAQLPGEKKNGLFGNLIALSLGLTPNFKSNFDLAEDAKLQLSKDTYDDDLDNLLAQIGDQYADLFLAAKNLSDAILLSDILRVNTEITKAPLSASMIKRYDEHHQDLTLLKALVRQQLPEKYKEIFFDQSKNGYAGYIDGGASQEEFYKFIKPILEKMDGTEELLVKLNREDLLRKQRTFDNGSIPHQIHLGELHAILRRQEDFYPFLKDNREKIEKILTFRIPYYVGPLARGNSRFAWMTRKSEETITPWNFEEVVDKGASAQSFIERMTNFDKNLPNEKVLPKHSLLYEYFTVYNELTKVKYVTEGMRKPAFLSGEQKKAIVDLLFKTNRKVTVKQLKEDYFKKIECFDSVEISGVEDRFNASLGTYHDLLKIIKDKDFLDNEENEDILEDIVLTLTLFEDREMIEERLKTYAHLFDDKVMKQLKRRRYTGWGRLSRKLINGIRDKQSGKTILDFLKSDGFANRNFMQLIHDDSLTFKEDIQKAQVSGQGDSLHEHIANLAGSPAIKKGILQTVKVVDELVKVMGRHKPENIVIEMARENQTTQKGQKNSRERMKRIEEGIKELGSQILKEHPVENTQLQNEKLYLYYLQNGRDMYVDQELDINRLSDYDVDHIVPQSFLKDDSIDNKVLTRSDKARGKSDNVPSEEVVKKMKNYWRQLLNAKLITQRKFDNLTKAERGGLSELDKAGFIKRQLVETRQITKHVAQILDSRMNTKYDENDKLIREVKVITLKSKLVSDFRKDFQFYKVREINNYHHAHDAYLNAVVGTALIKKYPKLESEFVYGDYKVYDVRKMIAKSEQEIGKATAKYFFYSNIMNFFKTEITLANGEIRKRPLIETNGETGEIVWDKGRDFATVRKVLSMPQVNIVKKTEVQTGGFSKESILPKRNSDKLIARKKDWDPKKYGGFDSPTVAYSVLVVAKVEKGKSKKLKSVKELLGITIMERSSFEKNPIDFLEAKGYKEVKKDLIIKLPKYSLFELENGRKRMLASAGELQKGNELALPSKYVNFLYLASHYEKLKGSPEDNEQKQLFVEQHKHYLDEIIEQISEFSKRVILADANLDKVLSAYNKHRDKPIREQAENIIHLFTLTNLGAPAAFKYFDTTIDRKRYTSTKEVLDATLIHQSITGLYETRIDLSQLGGDGGGGGEAAAKGSSGGWVQEISDSRPMLHIYLNGRRFLGLLNTGADKTCIAGRDWPANWPIHQTESSLQGLGMACGVARSSQPLRWQHEDKSGIIHPFVIPTLPFTLWGRDIMKDIKVRLMTDSPDDSQDLMIGAIESNLFADQISWKSDQPVWLNQWPLKQEKLQALQQLVTEQLQLGHLEESNSPWNTPVFVIKKKSGKWRLLQDLRAVNATMHDMGALQPGLPSPVAPPKGWEIIIIDLQDCFFNIKLHPEDCKRFAFSVPSPNFKRPYQRFQWKVLPQGMKNSPTLCQKFVDKAILTVRDKYQDSYIVHYMDDILLAHPSRSIVDEILTSMIQALNKHGLVVSTEKIQKYDNLKYLGTHIQGDSVSYQKLQIRTDKLRTLNDFQKLLGNINWIRPFLKLTTGELKPLFEILNPDSNPISTRKLTPEACKALQLMNERLSTARVKRLDLSQPWSLCILKTEYTPTACLWQDGVVEWIHLPHISPKVITPYDIFCTQLIIKGRHRSKELFSKDPDYIVVPYTKVQFDLLLQEKEDWPISLLGFLGEVHFHLPKDPLLTFTLQTAIIFPHMTSTTPLEKGIVIFTDGSANGRSVTYIQGREPIIKENTQNTAQQAEIVAVITAFEEVSQPFNLYTDSKYVTGLFPEIETATLSPRTKIYTELKHLQRLIHKRQEKFYIGHIRGHTGLPGPLAQGNAYADSLTRILTAGKRTADGSEFEKRTADGSEFESPKKKAKVE

SEQ ID NO: 3249 - protein, 2116 aa, synthetic construct
MPAAKRVKLDGGDKKYSIGLDIGTNSVGWAVITDEYKVPSKKFKVLGNTDRHSIKKNLIGALLFDSGETAEATRLKRTARRRYTRRKNRICYLQEIFSNEMAKVDDSFFHRLEESFLVEEDKKHERHPIFGNIVDEVAYHEKYPTIYHLRKKLVDSTDKADLRLIYLALAHMIKFRGHFLIEGDLNPDNSDVDKLFIQLVQTYNQLFEENPINASGVDAKAILSARLSKSRRLENLIAQLPGEKKNGLFGNLIALSLGLTPNFKSNFDLAEDAKLQLSKDTYDDDLDNLLAQIGDQYADLFLAAKNLSDAILLSDILRVNTEITKAPLSASMIKRYDEHHQDLTLLKALVRQQLPEKYKEIFFDQSKNGYAGYIDGGASQEEFYKFIKPILEKMDGTEELLVKLNREDLLRKQRTFDNGSIPHQIHLGELHAILRRQEDFYPFLKDNREKIEKILTFRIPYYVGPLARGNSRFAWMTRKSEETITPWNFEEVVDKGASAQSFIERMTNFDKNLPNEKVLPKHSLLYEYFTVYNELTKVKYVTEGMRKPAFLSGEQKKAIVDLLFKTNRKVTVKQLKEDYFKKIECFDSVEISGVEDRFNASLGTYHDLLKIIKDKDFLDNEENEDILEDIVLTLTLFEDREMIEERLKTYAHLFDDKVMKQLKRRRYTGWGRLSRKLINGIRDKQSGKTILDFLKSDGFANRNFMQLIHDDSLTFKEDIQKAQVSGQGDSLHEHIANLAGSPAIKKGILQTVKVVDELVKVMGRHKPENIVIEMARENQTTQKGQKNSRERMKRIEEGIKELGSQILKEHPVENTQLQNEKLYLYYLQNGRDMYVDQELDINRLSDYDVDHIVPQSFLKDDSIDNKVLTRSDKARGKSDNVPSEEVVKKMKNYWRQLLNAKLITQRKFDNLTKAERGGLSELDKAGFIKRQLVETRQITKHVAQILDSRMNTKYDENDKLIREVKVITLKSKLVSDFRKDFQFYKVREINNYHHAHDAYLNAVVGTALIKKYPKLESEFVYGDYKVYDVRKMIAKSEQEIGKATAKYFFYSNIMNFFKTEITLANGEIRKRPLIETNGETGEIVWDKGRDFATVRKVLSMPQVNIVKKTEVQTGGFSKESILPKRNSDKLIARKKDWDPKKYGGFDSPTVAYSVLVVAKVEKGKSKKLKSVKELLGITIMERSSFEKNPIDFLEAKGYKEVKKDLIIKLPKYSLFELENGRKRMLASAGELQKGNELALPSKYVNFLYLASHYEKLKGSPEDNEQKQLFVEQHKHYLDEIIEQISEFSKRVILADANLDKVLSAYNKHRDKPIREQAENIIHLFTLTNLGAPAAFKYFDTTIDRKRYTSTKEVLDATLIHQSITGLYETRIDLSQLGGDGGEAAAKGGGGSSGGWVQEISDSRPMLHIYLNGRRFLGLLNTGADKTCIAGRDWPANWPIHQTESSLQGLGMACGVARSSQPLRWQHEDKSGIIHPFVIPTLPFTLWGRDIMKDIKVRLMTDSPDDSQDLMIGAIESNLFADQISWKSDQPVWLNQWPLKQEKLQALQQLVTEQLQLGHLEESNSPWNTPVFVIKKKSGKWRLLQDLRAVNATMHDMGALQPGLPSPVAPPKGWEIIIIDLQDCFFNIKLHPEDCKRFAFSVPSPNFKRPYQRFQWKVLPQGMKNSPTLCQKFVDKAILTVRDKYQDSYIVHYMDDILLAHPSRSIVDEILTSMIQALNKHGLVVSTEKIQKYDNLKYLGTHIQGDSVSYQKLQIRTDKLRTLNDFQKLLGNINWIRPFLKLTTGELKPLFEILNPDSNPISTRKLTPEACKALQLMNERLSTARVKRLDLSQPWSLCILKTEYTPTACLWQDGVVEWIHLPHISPKVITPYDIFCTQLIIKGRHRSKELFSKDPDYIVVPYTKVQFDLLLQEKEDWPISLLGFLGEVHFHLPKDPLLTFTLQTAIIFPHMTSTTPLEKGIVIFTDGSANGRSVTYIQGREPIIKENTQNTAQQAEIVAVITAFEEVSQPFNLYTDSKYVTGLFPEIETATLSPRTKIYTELKHLQRLIHKRQEKFYIGHIRGHTGLPGPLAQGNAYADSLTRILTAGKRTADGSEFEKRTADGSEFESPKKKAKVE

SEQ ID NO: 3250 - protein, 2116 aa, synthetic construct
MPAAKRVKLDGGDKKYSIGLDIGTNSVGWAVITDEYKVPSKKFKVLGNTDRHSIKKNLIGALLFDSGETAEATRLKRTARRRYTRRKNRICYLQEIFSNEMAKVDDSFFHRLEESFLVEEDKKHERHPIFGNIVDEVAYHEKYPTIYHLRKKLVDSTDKADLRLIYLALAHMIKFRGHFLIEGDLNPDNSDVDKLFIQLVQTYNQLFEENPINASGVDAKAILSARLSKSRRLENLIAQLPGEKKNGLFGNLIALSLGLTPNFKSNFDLAEDAKLQLSKDTYDDDLDNLLAQIGDQYADLFLAAKNLSDAILLSDILRVNTEITKAPLSASMIKRYDEHHQDLTLLKALVRQQLPEKYKEIFFDQSKNGYAGYIDGGASQEEFYKFIKPILEKMDGTEELLVKLNREDLLRKQRTFDNGSIPHQIHLGELHAILRRQEDFYPFLKDNREKIEKILTFRIPYYVGPLARGNSRFAWMTRKSEETITPWNFEEVVDKGASAQSFIERMTNFDKNLPNEKVLPKHSLLYEYFTVYNELTKVKYVTEGMRKPAFLSGEQKKAIVDLLFKTNRKVTVKQLKEDYFKKIECFDSVEISGVEDRFNASLGTYHDLLKIIKDKDFLDNEENEDILEDIVLTLTLFEDREMIEERLKTYAHLFDDKVMKQLKRRRYTGWGRLSRKLINGIRDKQSGKTILDFLKSDGFANRNFMQLIHDDSLTFKEDIQKAQVSGQGDSLHEHIANLAGSPAIKKGILQTVKVVDELVKVMGRHKPENIVIEMARENQTTQKGQKNSRERMKRIEEGIKELGSQILKEHPVENTQLQNEKLYLYYLQNGRDMYVDQELDINRLSDYDVDHIVPQSFLKDDSIDNKVLTRSDKARGKSDNVPSEEVVKKMKNYWRQLLNAKLITQRKFDNLTKAERGGLSELDKAGFIKRQLVETRQITKHVAQILDSRMNTKYDENDKLIREVKVITLKSKLVSDFRKDFQFYKVREINNYHHAHDAYLNAVVGTALIKKYPKLESEFVYGDYKVYDVRKMIAKSEQEIGKATAKYFFYSNIMNFFKTEITLANGEIRKRPLIETNGETGEIVWDKGRDFATVRKVLSMPQVNIVKKTEVQTGGFSKESILPKRNSDKLIARKKDWDPKKYGGFDSPTVAYSVLVVAKVEKGKSKKLKSVKELLGITIMERSSFEKNPIDFLEAKGYKEVKKDLIIKLPKYSLFELENGRKRMLASAGELQKGNELALPSKYVNFLYLASHYEKLKGSPEDNEQKQLFVEQHKHYLDEIIEQISEFSKRVILADANLDKVLSAYNKHRDKPIREQAENIIHLFTLTNLGAPAAFKYFDTTIDRKRYTSTKEVLDATLIHQSITGLYETRIDLSQLGGDGGEAAAKGSSGGSGGVQEISDSRPMLHIYLNGRRFLGLLDTGADKTCIAGRDWPANWPIHQTESSLQGLGMACGVARSSQPLRWQHEDKSGIIHPFVIPTLPFTLWGRDIMKDIKVRLMTDSPDDSQDLMIGAIESNLFADQISWKSDQPVWLNQWPLKQEKLQALQQLVTEQLQLGHLEESNSPWNTPVFVIKKKSGKWRLLQDLRAVNATMHDMGALQPGLPSPPAVPKGWEIIIIDLQDCFFNIKLHPEDCKRFAFSVPSPNFKRPYQRFQWKVLPQGMKNSPTLCQKFVDKAILTVRDKYQDSYIVHYMDDILLAHPSRSIVDEILTSMIQALNKHGLVVSTEKIQKYDNLKYLGTHIQGDSVSYQKLQIRTDKLRTLNDFQKLLGNINWIRPFLKLTTGELKPLFEILNPDSNPISTRKLTPEACKALQLMNERLSTARVKRLDLSQPWSLCILKTEYTPTACLWQDGVVEWIHLPHISPKVITPYDIFCTQLIIKGRHRSKELFSKDPDYIVVPYTKVQFDLLLQEKEDWPISLLGFLGEVHFHLPKDPLLTFTLQTAIIFPHMTSTTPLEKGIVIFTDGSANGRSVTYIQGREPIIKENTQNTAQQAEIVAVITAFEEVSQPFNLYTDSKYVTGLFPEIETATLSPRTKIYTELKHLQRLIHKRQEKFYIGHIRGHTGLPGPLAQGNAYADSLTRILTAAGKRTADGSEFEKRTADGSEFESPKKKAKVE

SEQ ID NO: 3251 - protein, 2116 aa, synthetic construct
MPAAKRVKLDGGDKKYSIGLDIGTNSVGWAVITDEYKVPSKKFKVLGNTDRHSIKKNLIGALLFDSGETAEATRLKRTARRRYTRRKNRICYLQEIFSNEMAKVDDSFFHRLEESFLVEEDKKHERHPIFGNIVDEVAYHEKYPTIYHLRKKLVDSTDKADLRLIYLALAHMIKFRGHFLIEGDLNPDNSDVDKLFIQLVQTYNQLFEENPINASGVDAKAILSARLSKSRRLENLIAQLPGEKKNGLFGNLIALSLGLTPNFKSNFDLAEDAKLQLSKDTYDDDLDNLLAQIGDQYADLFLAAKNLSDAILLSDILRVNTEITKAPLSASMIKRYDEHHQDLTLLKALVRQQLPEKYKEIFFDQSKNGYAGYIDGGASQEEFYKFIKPILEKMDGTEELLVKLNREDLLRKQRTFDNGSIPHQIHLGELHAILRRQEDFYPFLKDNREKIEKILTFRIPYYVGPLARGNSRFAWMTRKSEETITPWNFEEVVDKGASAQSFIERMTNFDKNLPNEKVLPKHSLLYEYFTVYNELTKVKYVTEGMRKPAFLSGEQKKAIVDLLFKTNRKVTVKQLKEDYFKKIECFDSVEISGVEDRFNASLGTYHDLLKIIKDKDFLDNEENEDILEDIVLTLTLFEDREMIEERLKTYAHLFDDKVMKQLKRRRYTGWGRLSRKLINGIRDKQSGKTILDFLKSDGFANRNFMQLIHDDSLTFKEDIQKAQVSGQGDSLHEHIANLAGSPAIKKGILQTVKVVDELVKVMGRHKPENIVIEMARENQTTQKGQKNSRERMKRIEEGIKELGSQILKEHPVENTQLQNEKLYLYYLQNGRDMYVDQELDINRLSDYDVDHIVPQSFLKDDSIDNKVLTRSDKARGKSDNVPSEEVVKKMKNYWRQLLNAKLITQRKFDNLTKAERGGLSELDKAGFIKRQLVETRQITKHVAQILDSRMNTKYDENDKLIREVKVITLKSKLVSDFRKDFQFYKVREINNYHHAHDAYLNAVVGTALIKKYPKLESEFVYGDYKVYDVRKMIAKSEQEIGKATAKYFFYSNIMNFFKTEITLANGEIRKRPLIETNGETGEIVWDKGRDFATVRKVLSMPQVNIVKKTEVQTGGFSKESILPKRNSDKLIARKKDWDPKKYGGFDSPTVAYSVLVVAKVEKGKSKKLKSVKELLGITIMERSSFEKNPIDFLEAKGYKEVKKDLIIKLPKYSLFELENGRKRMLASAGELQKGNELALPSKYVNFLYLASHYEKLKGSPEDNEQKQLFVEQHKHYLDEIIEQISEFSKRVILADANLDKVLSAYNKHRDKPIREQAENIIHLFTLTNLGAPAAFKYFDTTIDRKRYTSTKEVLDATLIHQSITGLYETRIDLSQLGGDGGPAPEAAAKGGSGGVQEISDSRPMLHIYLNGRRFLGLLDTGADKTCIAGRDWPANWPIHQTESSLQGLGMACGVARSSQPLRWQHEDKSGIIHPFVIPTLPFTLWGRDIMKDIKVRLMTDSPDDSQDLMIGAIESNLFADQISWKSDQPVWLNQWPLKQEKLQALQQLVTEQLQLGHLEESNSPWNTPVFVIKKKSGKWRLLQDLRAVNATMHDMGALQPGLPSPPAVPKGWEIIIIDLQDCFFNIKLHPEDCKRFAFSVPSPNFKRPYQRFQWKVLPQGMKNSPTLCQKFVDKAILTVRDKYQDSYIVHYMDDILLAHPSRSIVDEILTSMIQALNKHGLVVSTEKIQKYDNLKYLGTHIQGDSVSYQKLQIRTDKLRTLNDFQKLLGNINWIRPFLKLTTGELKPLFEILNPDSNPISTRKLTPEACKALQLMNERLSTARVKRLDLSQPWSLCILKTEYTPTACLWQDGVVEWIHLPHISPKVITPYDIFCTQLIIKGRHRSKELFSKDPDYIVVPYTKVQFDLLLQEKEDWPISLLGFLGEVHFHLPKDPLLTFTLQTAIIFPHMTSTTPLEKGIVIFTDGSANGRSVTYIQGREPIIKENTQNTAQQAEIVAVITAFEEVSQPFNLYTDSKYVTGLFPEIETATLSPRTKIYTELKHLQRLIHKRQEKFYIGHIRGHTGLPGPLAQGNAYADSLTRILTAAGKRTADGSEFEKRTADGSEFESPKKKAKVE

SEQ ID NO: 3252 - protein, 2116 aa, synthetic construct
MPAAKRVKLDGGDKKYSIGLDIGTNSVGWAVITDEYKVPSKKFKVLGNTDRHSIKKNLIGALLFDSGETAEATRLKRTARRRYTRRKNRICYLQEIFSNEMAKVDDSFFHRLEESFLVEEDKKHERHPIFGNIVDEVAYHEKYPTIYHLRKKLVDSTDKADLRLIYLALAHMIKFRGHFLIEGDLNPDNSDVDKLFIQLVQTYNQLFEENPINASGVDAKAILSARLSKSRRLENLIAQLPGEKKNGLFGNLIALSLGLTPNFKSNFDLAEDAKLQLSKDTYDDDLDNLLAQIGDQYADLFLAAKNLSDAILLSDILRVNTEITKAPLSASMIKRYDEHHQDLTLLKALVRQQLPEKYKEIFFDQSKNGYAGYIDGGASQEEFYKFIKPILEKMDGTEELLVKLNREDLLRKQRTFDNGSIPHQIHLGELHAILRRQEDFYPFLKDNREKIEKILTFRIPYYVGPLARGNSRFAWMTRKSEETITPWNFEEVVDKGASAQSFIERMTNFDKNLPNEKVLPKHSLLYEYFTVYNELTKVKYVTEGMRKPAFLSGEQKKAIVDLLFKTNRKVTVKQLKEDYFKKIECFDSVEISGVEDRFNASLGTYHDLLKIIKDKDFLDNEENEDILEDIVLTLTLFEDREMIEERLKTYAHLFDDKVMKQLKRRRYTGWGRLSRKLINGIRDKQSGKTILDFLKSDGFANRNFMQLIHDDSLTFKEDIQKAQVSGQGDSLHEHIANLAGSPAIKKGILQTVKVVDELVKVMGRHKPENIVIEMARENQTTQKGQKNSRERMKRIEEGIKELGSQILKEHPVENTQLQNEKLYLYYLQNGRDMYVDQELDINRLSDYDVDHIVPQSFLKDDSIDNKVLTRSDKARGKSDNVPSEEVVKKMKNYWRQLLNAKLITQRKFDNLTKAERGGLSELDKAGFIKRQLVETRQITKHVAQILDSRMNTKYDENDKLIREVKVITLKSKLVSDFRKDFQFYKVREINNYHHAHDAYLNAVVGTALIKKYPKLESEFVYGDYKVYDVRKMIAKSEQEIGKATAKYFFYSNIMNFFKTEITLANGEIRKRPLIETNGETGEIVWDKGRDFATVRKVLSMPQVNIVKKTEVQTGGFSKESILPKRNSDKLIARKKDWDPKKYGGFDSPTVAYSVLVVAKVEKGKSKKLKSVKELLGITIMERSSFEKNPIDFLEAKGYKEVKKDLIIKLPKYSLFELENGRKRMLASAGELQKGNELALPSKYVNFLYLASHYEKLKGSPEDNEQKQLFVEQHKHYLDEIIEQISEFSKRVILADANLDKVLSAYNKHRDKPIREQAENIIHLFTLTNLGAPAAFKYFDTTIDRKRYTSTKEVLDATLIHQSITGLYETRIDLSQLGGDGGGGGGSSEAAAKGGVQEISDSRPMLHIYLNGRRFLGLLDTGADKTCIAGRDWPANWPIHQTESSLQGLGMACGVARSSQPLRWQHEDKSGIIHPFVIPTLPFTLWGRDIMKDIKVRLMTDSPDDSQDLMIGAIESNLFADQISWKSDQPVWLNQWPLKQEKLQALQQLVTEQLQLGHLEESNSPWNTPVFVIKKKSGKWRLLQDLRAVNATMHDMGALQPGLPSPVAVPKGWEIIIIDLQDCFFNIKLHPEDCKRFAFSVPSPNFKRPYQRFQWKVLPQGMKNSPTLCQKFVDKAILTVRDKYQDSYIVHYMDDILLAHPSRSIVDEILTSMIQALNKHGLVVSTEKIQKYDNLKYLGTHIQGDSVSYQKLQIRTDKLRTLNDFQKLLGNINWIRPFLKLTTGELKPLFEILNPDSNPISTRKLTPEACKALQLMNERLSTARVKRLDLSQPWSLCILKTEYTPTACLWQDGVVEWIHLPHISPKVITPYDIFCTQLIIKGRHRSKELFSKDPDYIVVPYTKVQFDLLLQEKEDWPISLLGFLGEVHFHLPKDPLLTFTLQTAIIFPHMTSTTPLEKGIVIFTDGSANGRSVTYIQGREPIIKENTQNTAQQAEIVAVITAFEEVSQPFNLYTDSKYVTGLFPEIETATLSPRTKIYTELKHLQRLIHKRQEKFYIGHIRGHTGLPGPLAQGNAYADSLTRILTAAGKRTADGSEFEKRTADGSEFESPKKKAKVE

SEQ ID NO: 3253 - protein, 2114 aa, synthetic construct
MPAAKRVKLDGGDKKYSIGLDIGTNSVGWAVITDEYKVPSKKFKVLGNTDRHSIKKNLIGALLFDSGETAEATRLKRTARRRYTRRKNRICYLQEIFSNEMAKVDDSFFHRLEESFLVEEDKKHERHPIFGNIVDEVAYHEKYPTIYHLRKKLVDSTDKADLRLIYLALAHMIKFRGHFLIEGDLNPDNSDVDKLFIQLVQTYNQLFEENPINASGVDAKAILSARLSKSRRLENLIAQLPGEKKNGLFGNLIALSLGLTPNFKSNFDLAEDAKLQLSKDTYDDDLDNLLAQIGDQYADLFLAAKNLSDAILLSDILRVNTEITKAPLSASMIKRYDEHHQDLTLLKALVRQQLPEKYKEIFFDQSKNGYAGYIDGGASQEEFYKFIKPILEKMDGTEELLVKLNREDLLRKQRTFDNGSIPHQIHLGELHAILRRQEDFYPFLKDNREKIEKILTFRIPYYVGPLARGNSRFAWMTRKSEETITPWNFEEVVDKGASAQSFIERMTNFDKNLPNEKVLPKHSLLYEYFTVYNELTKVKYVTEGMRKPAFLSGEQKKAIVDLLFKTNRKVTVKQLKEDYFKKIECFDSVEISGVEDRFNASLGTYHDLLKIIKDKDFLDNEENEDILEDIVLTLTLFEDREMIEERLKTYAHLFDDKVMKQLKRRRYTGWGRLSRKLINGIRDKQSGKTILDFLKSDGFANRNFMQLIHDDSLTFKEDIQKAQVSGQGDSLHEHIANLAGSPAIKKGILQTVKVVDELVKVMGRHKPENIVIEMARENQTTQKGQKNSRERMKRIEEGIKELGSQILKEHPVENTQLQNEKLYLYYLQNGRDMYVDQELDINRLSDYDVDHIVPQSFLKDDSIDNKVLTRSDKARGKSDNVPSEEVVKKMKNYWRQLLNAKLITQRKFDNLTKAERGGLSELDKAGFIKRQLVETRQITKHVAQILDSRMNTKYDENDKLIREVKVITLKSKLVSDFRKDFQFYKVREINNYHHAHDAYLNAVVGTALIKKYPKLESEFVYGDYKVYDVRKMIAKSEQEIGKATAKYFFYSNIMNFFKTEITLANGEIRKRPLIETNGETGEIVWDKGRDFATVRKVLSMPQVNIVKKTEVQTGGFSKESILPKRNSDKLIARKKDWDPKKYGGFDSPTVAYSVLVVAKVEKGKSKKLKSVKELLGITIMERSSFEKNPIDFLEAKGYKEVKKDLIIKLPKYSLFELENGRKRMLASAGELQKGNELALPSKYVNFLYLASHYEKLKGSPEDNEQKQLFVEQHKHYLDEIIEQISEFSKRVILADANLDKVLSAYNKHRDKPIREQAENIIHLFTLTNLGAPAAFKYFDTTIDRKRYTSTKEVLDATLIHQSITGLYETRIDLSQLGGDGGGGGGGSGSSGGVQEISDSRPMLHIYLNGRRFLGLLDTGADKTCIAGRDWPANWPIHQTESSLQGLGMACGVARSSQPLRWQHEDKSGIIHPFVIPTLPFTLWGRDIMKDIKVRLMTDSPDDSQDLMIGAIESNLFADQISWKSDQPVWLNQWPLKQEKLQALQQLVTEQLQLGHLEESNSPWNTPVFVIKKKSGKWRLLQDLRAVNATMHDMGALQPGLPSPVAVPKGWEIIIIDLQDCFFNIKLHPEDCKRFAFSVPSPNFKRPYQRFQWKVLPQGMKNSPTLCQKFVDKAILTVRDKYQDSYIVHYMDDILLAHPSRSIVDEILTSMIQALNKHGLVVSTEKIQKYDNLKYLGTHIQGDSVSYQKLQIRTDKLRTLNDFQKLLGNINWIRPFLKLTTGELKPLFEILNPDSNPISTRKLTPEACKALQLMNERLSTARVKRLDLSQPWSLCILKTEYTPTACLWQDGVVEWIHLPHISPKVITPYDIFCTQLIIKGRHRSKELFSKDPDYIVVPYTKVQFDLLLQEKEDWPISLLGFLGEVHFHLPKDPLLTFTLQTAIIFPHMTSTTPLEKGIVIFTDGSANGRSVTYIQGREPIIKENTQNTAQQAEIVAVITAFEEVSQPFNLYTDSKYVTGLFPEIETATLSPRTKIYTELKHLQRLIHKRQEKFYIGHIRGHTGLPGPLAQGNAYADSLTRILTAAGKRTADGSEFEKRTADGSEFESPKKKAKVE

SEQ ID NO: 3254 - protein, 2125 aa, synthetic construct
MPAAKRVKLDGGDKKYSIGLDIGTNSVGWAVITDEYKVPSKKFKVLGNTDRHSIKKNLIGALLFDSGETAEATRLKRTARRRYTRRKNRICYLQEIFSNEMAKVDDSFFHRLEESFLVEEDKKHERHPIFGNIVDEVAYHEKYPTIYHLRKKLVDSTDKADLRLIYLALAHMIKFRGHFLIEGDLNPDNSDVDKLFIQLVQTYNQLFEENPINASGVDAKAILSARLSKSRRLENLIAQLPGEKKNGLFGNLIALSLGLTPNFKSNFDLAEDAKLQLSKDTYDDDLDNLLAQIGDQYADLFLAAKNLSDAILLSDILRVNTEITKAPLSASMIKRYDEHHQDLTLLKALVRQQLPEKYKEIFFDQSKNGYAGYIDGGASQEEFYKFIKPILEKMDGTEELLVKLNREDLLRKQRTFDNGSIPHQIHLGELHAILRRQEDFYPFLKDNREKIEKILTFRIPYYVGPLARGNSRFAWMTRKSEETITPWNFEEVVDKGASAQSFIERMTNFDKNLPNEKVLPKHSLLYEYFTVYNELTKVKYVTEGMRKPAFLSGEQKKAIVDLLFKTNRKVTVKQLKEDYFKKIECFDSVEISGVEDRFNASLGTYHDLLKIIKDKDFLDNEENEDILEDIVLTLTLFEDREMIEERLKTYAHLFDDKVMKQLKRRRYTGWGRLSRKLINGIRDKQSGKTILDFLKSDGFANRNFMQLIHDDSLTFKEDIQKAQVSGQGDSLHEHIANLAGSPAIKKGILQTVKVVDELVKVMGRHKPENIVIEMARENQTTQKGQKNSRERMKRIEEGIKELGSQILKEHPVENTQLQNEKLYLYYLQNGRDMYVDQELDINRLSDYDVDHIVPQSFLKDDSIDNKVLTRSDKARGKSDNVPSEEVVKKMKNYWRQLLNAKLITQRKFDNLTKAERGGLSELDKAGFIKRQLVETRQITKHVAQILDSRMNTKYDENDKLIREVKVITLKSKLVSDFRKDFQFYKVREINNYHHAHDAYLNAVVGTALIKKYPKLESEFVYGDYKVYDVRKMIAKSEQEIGKATAKYFFYSNIMNFFKTEITLANGEIRKRPLIETNGETGEIVWDKGRDFATVRKVLSMPQVNIVKKTEVQTGGFSKESILPKRNSDKLIARKKDWDPKKYGGFDSPTVAYSVLVVAKVEKGKSKKLKSVKELLGITIMERSSFEKNPIDFLEAKGYKEVKKDLIIKLPKYSLFELENGRKRMLASAGELQKGNELALPSKYVNFLYLASHYEKLKGSPEDNEQKQLFVEQHKHYLDEIIEQISEFSKRVILADANLDKVLSAYNKHRDKPIREQAENIIHLFTLTNLGAPAAFKYFDTTIDRKRYTSTKEVLDATLIHQSITGLYETRIDLSQLGGDGGGGGGSGGGGSGGGGSGGGGSGGVQEISDSRPMLHIYLNGRRFLGLLDTGADKTCIAGRDWPANWPIHQTESSLQGLGMACGVARSSQPLRWQHEDKSGIIHPFVIPTLPFTLWGRDIMKDIKVRLMTDSPDDSQDLMIGAIESNLFADQISWKSDQPVWLNQWPLKQEKLQALQQLVTEQLQLGHLEESNSPWNTPVFVIKKKSGKWRLLQDLRAVNATMHDMGALQPGLPSPVAVPKGWEIIIIDLQDCFFNIKLHPEDCKRFAFSVPSPNFKRPYQRFQWKVLPQGMKNSPTLCQKFVDKAILTVRDKYQDSYIVHYMDDILLAHPSRSIVDEILTSMIQALNKHGLVVSTEKIQKYDNLKYLGTHIQGDSVSYQKLQIRTDKLRTLNDFQKLLGNINWIRPFLKLTTGELKPLFEILNPDSNPISTRKLTPEACKALQLMNERLSTARVKRLDLSQPWSLCILKTEYTPTACLWQDGVVEWIHLPHISPKVITPYDIFCTQLIIKGRHRSKELFSKDPDYIVVPYTKVQFDLLLQEKEDWPISLLGFLGEVHFHLPKDPLLTFTLQTAIIFPHMTSTTPLEKGIVIFTDGSANGRSVTYIQGREPIIKENTQNTAQQAEIVAVITAFEEVSQPFNLYTDSKYVTGLFPEIETATLSPRTKIYTELKHLQRLIHKRQEKFYIGHIRGHTGLPGPLAQGNAYADSLTRILTAAGKRTADGSEFEKRTADGSEFESPKKKAKVE

SEQ ID NO: 3255 - protein, 2116 aa, synthetic construct
MPAAKRVKLDGGDKKYSIGLDIGTNSVGWAVITDEYKVPSKKFKVLGNTDRHSIKKNLIGALLFDSGETAEATRLKRTARRRYTRRKNRICYLQEIFSNEMAKVDDSFFHRLEESFLVEEDKKHERHPIFGNIVDEVAYHEKYPTIYHLRKKLVDSTDKADLRLIYLALAHMIKFRGHFLIEGDLNPDNSDVDKLFIQLVQTYNQLFEENPINASGVDAKAILSARLSKSRRLENLIAQLPGEKKNGLFGNLIALSLGLTPNFKSNFDLAEDAKLQLSKDTYDDDLDNLLAQIGDQYADLFLAAKNLSDAILLSDILRVNTEITKAPLSASMIKRYDEHHQDLTLLKALVRQQLPEKYKEIFFDQSKNGYAGYIDGGASQEEFYKFIKPILEKMDGTEELLVKLNREDLLRKQRTFDNGSIPHQIHLGELHAILRRQEDFYPFLKDNREKIEKILTFRIPYYVGPLARGNSRFAWMTRKSEETITPWNFEEVVDKGASAQSFIERMTNFDKNLPNEKVLPKHSLLYEYFTVYNELTKVKYVTEGMRKPAFLSGEQKKAIVDLLFKTNRKVTVKQLKEDYFKKIECFDSVEISGVEDRFNASLGTYHDLLKIIKDKDFLDNEENEDILEDIVLTLTLFEDREMIEERLKTYAHLFDDKVMKQLKRRRYTGWGRLSRKLINGIRDKQSGKTILDFLKSDGFANRNFMQLIHDDSLTFKEDIQKAQVSGQGDSLHEHIANLAGSPAIKKGILQTVKVVDELVKVMGRHKPENIVIEMARENQTTQKGQKNSRERMKRIEEGIKELGSQILKEHPVENTQLQNEKLYLYYLQNGRDMYVDQELDINRLSDYDVDHIVPQSFLKDDSIDNKVLTRSDKARGKSDNVPSEEVVKKMKNYWRQLLNAKLITQRKFDNLTKAERGGLSELDKAGFIKRQLVETRQITKHVAQILDSRMNTKYDENDKLIREVKVITLKSKLVSDFRKDFQFYKVREINNYHHAHDAYLNAVVGTALIKKYPKLESEFVYGDYKVYDVRKMIAKSEQEIGKATAKYFFYSNIMNFFKTEITLANGEIRKRPLIETNGETGEIVWDKGRDFATVRKVLSMPQVNIVKKTEVQTGGFSKESILPKRNSDKLIARKKDWDPKKYGGFDSPTVAYSVLVVAKVEKGKSKKLKSVKELLGITIMERSSFEKNPIDFLEAKGYKEVKKDLIIKLPKYSLFELENGRKRMLASAGELQKGNELALPSKYVNFLYLASHYEKLKGSPEDNEQKQLFVEQHKHYLDEIIEQISEFSKRVILADANLDKVLSAYNKHRDKPIREQAENIIHLFTLTNLGAPAAFKYFDTTIDRKRYTSTKEVLDATLIHQSITGLYETRIDLSQLGGDGGPAPEAAAKGGGGGVQEISDSRPMLHIYLNGRRFLGLLDTGADKTCIAGRDWPANWPIHQTESSLQGLGMACGVARSSQPLRWQHEDKSGIIHPFVIPTLPFTLWGRDIMKDIKVRLMTDSPDDSQDLMIGAIESNLFADQISWKSDQPVWLNQWPLKQEKLQALQQLVTEQLQLGHLEESNSPWNTPVFVIKKKSGKWRLLQDLRAVNATMHDMGALQPGLPSPVAVPKGWEIIIIDLQDCFFNIKLHPEDCKRFAFSVPSPNFKRPYQRFQWKVLPQGMKNSPTLCQKFVDKAILTVRDKYQDSYIVHYMDDILLAHPSRSIVDEILTSMIQALNKHGLVVSTEKIQKYDNLKYLGTHIQGDSVSYQKLQIRTDKLRTLNDFQKLLGNINWIRPFLKLTTGELKPLFEILNPDSNPISTRKLTPEACKALQLMNERLSTARVKRLDLSQPWSLCILKTEYTPTACLWQDGVVEWIHLPHISPKVITPYDIFCTQLIIKGRHRSKELFSKDPDYIVVPYTKVQFDLLLQEKEDWPISLLGFLGEVHFHLPKDPLLTFTLQTAIIFPHMTSTTPLEKGIVIFTDGSANGRSVTYIQGREPIIKENTQNTAQQAEIVAVITAFEEVSQPFNLYTDSKYVTGLFPEIETATLSPRTKIYTELKHLQRLIHKRQEKFYIGHIRGHTGLPGPLAQGNAYADSLTRILTAAGKRTADGSEFEKRTADGSEFESPKKKAKVE

SEQ ID NO: 3256 - protein, 2112 aa, synthetic construct
MPAAKRVKLDGGDKKYSIGLDIGTNSVGWAVITDEYKVPSKKFKVLGNTDRHSIKKNLIGALLFDSGETAEATRLKRTARRRYTRRKNRICYLQEIFSNEMAKVDDSFFHRLEESFLVEEDKKHERHPIFGNIVDEVAYHEKYPTIYHLRKKLVDSTDKADLRLIYLALAHMIKFRGHFLIEGDLNPDNSDVDKLFIQLVQTYNQLFEENPINASGVDAKAILSARLSKSRRLENLIAQLPGEKKNGLFGNLIALSLGLTPNFKSNFDLAEDAKLQLSKDTYDDDLDNLLAQIGDQYADLFLAAKNLSDAILLSDILRVNTEITKAPLSASMIKRYDEHHQDLTLLKALVRQQLPEKYKEIFFDQSKNGYAGYIDGGASQEEFYKFIKPILEKMDGTEELLVKLNREDLLRKQRTFDNGSIPHQIHLGELHAILRRQEDFYPFLKDNREKIEKILTFRIPYYVGPLARGNSRFAWMTRKSEETITPWNFEEVVDKGASAQSFIERMTNFDKNLPNEKVLPKHSLLYEYFTVYNELTKVKYVTEGMRKPAFLSGEQKKAIVDLLFKTNRKVTVKQLKEDYFKKIECFDSVEISGVEDRFNASLGTYHDLLKIIKDKDFLDNEENEDILEDIVLTLTLFEDREMIEERLKTYAHLFDDKVMKQLKRRRYTGWGRLSRKLINGIRDKQSGKTILDFLKSDGFANRNFMQLIHDDSLTFKEDIQKAQVSGQGDSLHEHIANLAGSPAIKKGILQTVKVVDELVKVMGRHKPENIVIEMARENQTTQKGQKNSRERMKRIEEGIKELGSQILKEHPVENTQLQNEKLYLYYLQNGRDMYVDQELDINRLSDYDVDHIVPQSFLKDDSIDNKVLTRSDKARGKSDNVPSEEVVKKMKNYWRQLLNAKLITQRKFDNLTKAERGGLSELDKAGFIKRQLVETRQITKHVAQILDSRMNTKYDENDKLIREVKVITLKSKLVSDFRKDFQFYKVREINNYHHAHDAYLNAVVGTALIKKYPKLESEFVYGDYKVYDVRKMIAKSEQEIGKATAKYFFYSNIMNFFKTEITLANGEIRKRPLIETNGETGEIVWDKGRDFATVRKVLSMPQVNIVKKTEVQTGGFSKESILPKRNSDKLIARKKDWDPKKYGGFDSPTVAYSVLVVAKVEKGKSKKLKSVKELLGITIMERSSFEKNPIDFLEAKGYKEVKKDLIIKLPKYSLFELENGRKRMLASAGELQKGNELALPSKYVNFLYLASHYEKLKGSPEDNEQKQLFVEQHKHYLDEIIEQISEFSKRVILADANLDKVLSAYNKHRDKPIREQAENIIHLFTLTNLGAPAAFKYFDTTIDRKRYTSTKEVLDATLIHQSITGLYETRIDLSQLGGDGGPAPAPAPGGVQEISDSRPMLHIYLNGRRFLGLLDTGADKTCIAGRDWPANWPIHQTESSLQGLGMACGVARSSQPLRWQHEDKSGIIHPFVIPTLPFTLWGRDIMKDIKVRLMTDSPDDSQDLMIGAIESNLFADQISWKSDQPVWLNQWPLKQEKLQALQQLVTEQLQLGHLEESNSPWNTPVFVIKKKSGKWRLLQDLRAVNATMHDMGALQPGLPSPVAVPKGWEIIIIDLQDCFFNIKLHPEDCKRFAFSVPSPNFKRPYQRFQWKVLPQGMKNSPTLCQKFVDKAILTVRDKYQDSYIVHYMDDILLAHPSRSIVDEILTSMIQALNKHGLVVSTEKIQKYDNLKYLGTHIQGDSVSYQKLQIRTDKLRTLNDFQKLLGNINWIRPFLKLTTGELKPLFEILNPDSNPISTRKLTPEACKALQLMNERLSTARVKRLDLSQPWSLCILKTEYTPTACLWQDGVVEWIHLPHISPKVITPYDIFCTQLIIKGRHRSKELFSKDPDYIVVPYTKVQFDLLLQEKEDWPISLLGFLGEVHFHLPKDPLLTFTLQTAIIFPHMTSTTPLEKGIVIFTDGSANGRSVTYIQGREPIIKENTQNTAQQAEIVAVITAFEEVSQPFNLYTDSKYVTGLFPEIETATLSPRTKIYTELKHLQRLIHKRQEKFYIGHIRGHTGLPGPLAQGNAYADSLTRILTAAGKRTADGSEFEKRTADGSEFESPKKKAKVE

SEQ ID NO: 3257 - protein, 2116 aa, synthetic construct
MPAAKRVKLDGGDKKYSIGLDIGTNSVGWAVITDEYKVPSKKFKVLGNTDRHSIKKNLIGALLFDSGETAEATRLKRTARRRYTRRKNRICYLQEIFSNEMAKVDDSFFHRLEESFLVEEDKKHERHPIFGNIVDEVAYHEKYPTIYHLRKKLVDSTDKADLRLIYLALAHMIKFRGHFLIEGDLNPDNSDVDKLFIQLVQTYNQLFEENPINASGVDAKAILSARLSKSRRLENLIAQLPGEKKNGLFGNLIALSLGLTPNFKSNFDLAEDAKLQLSKDTYDDDLDNLLAQIGDQYADLFLAAKNLSDAILLSDILRVNTEITKAPLSASMIKRYDEHHQDLTLLKALVRQQLPEKYKEIFFDQSKNGYAGYIDGGASQEEFYKFIKPILEKMDGTEELLVKLNREDLLRKQRTFDNGSIPHQIHLGELHAILRRQEDFYPFLKDNREKIEKILTFRIPYYVGPLARGNSRFAWMTRKSEETITPWNFEEVVDKGASAQSFIERMTNFDKNLPNEKVLPKHSLLYEYFTVYNELTKVKYVTEGMRKPAFLSGEQKKAIVDLLFKTNRKVTVKQLKEDYFKKIECFDSVEISGVEDRFNASLGTYHDLLKIIKDKDFLDNEENEDILEDIVLTLTLFEDREMIEERLKTYAHLFDDKVMKQLKRRRYTGWGRLSRKLINGIRDKQSGKTILDFLKSDGFANRNFMQLIHDDSLTFKEDIQKAQVSGQGDSLHEHIANLAGSPAIKKGILQTVKVVDELVKVMGRHKPENIVIEMARENQTTQKGQKNSRERMKRIEEGIKELGSQILKEHPVENTQLQNEKLYLYYLQNGRDMYVDQELDINRLSDYDVDHIVPQSFLKDDSIDNKVLTRSDKARGKSDNVPSEEVVKKMKNYWRQLLNAKLITQRKFDNLTKAERGGLSELDKAGFIKRQLVETRQITKHVAQILDSRMNTKYDENDKLIREVKVITLKSKLVSDFRKDFQFYKVREINNYHHAHDAYLNAVVGTALIKKYPKLESEFVYGDYKVYDVRKMIAKSEQEIGKATAKYFFYSNIMNFFKTEITLANGEIRKRPLIETNGETGEIVWDKGRDFATVRKVLSMPQVNIVKKTEVQTGGFSKESILPKRNSDKLIARKKDWDPKKYGGFDSPTVAYSVLVVAKVEKGKSKKLKSVKELLGITIMERSSFEKNPIDFLEAKGYKEVKKDLIIKLPKYSLFELENGRKRMLASAGELQKGNELALPSKYVNFLYLASHYEKLKGSPEDNEQKQLFVEQHKHYLDEIIEQISEFSKRVILADANLDKVLSAYNKHRDKPIREQAENIIHLFTLTNLGAPAAFKYFDTTIDRKRYTSTKEVLDATLIHQSITGLYETRIDLSQLGGDGGEAAAKPAPGGGGGVQEISDSRPMLHIYLNGRRFLGLLDTGADKTCIAGRDWPANWPIHQTESSLQGLGMACGVARSSQPLRWQHEDKSGIIHPFVIPTLPFTLWGRDIMKDIKVRLMTDSPDDSQDLMIGAIESNLFADQISWKSDQPVWLNQWPLKQEKLQALQQLVTEQLQLGHLEESNSPWNTPVFVIKKKSGKWRLLQDLRAVNATMHDMGALQPGLPSPVAVPKGWEIIIIDLQDCFFNIKLHPEDCKRFAFSVPSPNFKRPYQRFQWKVLPQGMKNSPTLCQKFVDKAILTVRDKYQDSYIVHYMDDILLAHPSRSIVDEILTSMIQALNKHGLVVSTEKIQKYDNLKYLGTHIQGDSVSYQKLQIRTDKLRTLNDFQKLLGNINWIRPFLKLTTGELKPLFEILNPDSNPISTRKLTPEACKALQLMNERLSTARVKRLDLSQPWSLCILKTEYTPTACLWQDGVVEWIHLPHISPKVITPYDIFCTQLIIKGRHRSKELFSKDPDYIVVPYTKVQFDLLLQEKEDWPISLLGFLGEVHFHLPKDPLLTFTLQTAIIFPHMTSTTPLEKGIVIFTDGSANGRSVTYIQGREPIIKENTQNTAQQAEIVAVITAFEEVSQPFNLYTDSKYVTGLFPEIETATLSPRTKIYTELKHLQRLIHKRQEKFYIGHIRGHTGLPGPLAQGNAYADSLTRILTAAGKRTADGSEFEKRTADGSEFESPKKKAKVE

SEQ ID NO: 3258 - protein, 2116 aa, synthetic construct
MPAAKRVKLDGGDKKYSIGLDIGTNSVGWAVITDEYKVPSKKFKVLGNTDRHSIKKNLIGALLFDSGETAEATRLKRTARRRYTRRKNRICYLQEIFSNEMAKVDDSFFHRLEESFLVEEDKKHERHPIFGNIVDEVAYHEKYPTIYHLRKKLVDSTDKADLRLIYLALAHMIKFRGHFLIEGDLNPDNSDVDKLFIQLVQTYNQLFEENPINASGVDAKAILSARLSKSRRLENLIAQLPGEKKNGLFGNLIALSLGLTPNFKSNFDLAEDAKLQLSKDTYDDDLDNLLAQIGDQYADLFLAAKNLSDAILLSDILRVNTEITKAPLSASMIKRYDEHHQDLTLLKALVRQQLPEKYKEIFFDQSKNGYAGYIDGGASQEEFYKFIKPILEKMDGTEELLVKLNREDLLRKQRTFDNGSIPHQIHLGELHAILRRQEDFYPFLKDNREKIEKILTFRIPYYVGPLARGNSRFAWMTRKSEETITPWNFEEVVDKGASAQSFIERMTNFDKNLPNEKVLPKHSLLYEYFTVYNELTKVKYVTEGMRKPAFLSGEQKKAIVDLLFKTNRKVTVKQLKEDYFKKIECFDSVEISGVEDRFNASLGTYHDLLKIIKDKDFLDNEENEDILEDIVLTLTLFEDREMIEERLKTYAHLFDDKVMKQLKRRRYTGWGRLSRKLINGIRDKQSGKTILDFLKSDGFANRNFMQLIHDDSLTFKEDIQKAQVSGQGDSLHEHIANLAGSPAIKKGILQTVKVVDELVKVMGRHKPENIVIEMARENQTTQKGQKNSRERMKRIEEGIKELGSQILKEHPVENTQLQNEKLYLYYLQNGRDMYVDQELDINRLSDYDVDHIVPQSFLKDDSIDNKVLTRSDKARGKSDNVPSEEVVKKMKNYWRQLLNAKLITQRKFDNLTKAERGGLSELDKAGFIKRQLVETRQITKHVAQILDSRMNTKYDENDKLIREVKVITLKSKLVSDFRKDFQFYKVREINNYHHAHDAYLNAVVGTALIKKYPKLESEFVYGDYKVYDVRKMIAKSEQEIGKATAKYFFYSNIMNFFKTEITLANGEIRKRPLIETNGETGEIVWDKGRDFATVRKVLSMPQVNIVKKTEVQTGGFSKESILPKRNSDKLIARKKDWDPKKYGGFDSPTVAYSVLVVAKVEKGKSKKLKSVKELLGITIMERSSFEKNPIDFLEAKGYKEVKKDLIIKLPKYSLFELENGRKRMLASAGELQKGNELALPSKYVNFLYLASHYEKLKGSPEDNEQKQLFVEQHKHYLDEIIEQISEFSKRVILADANLDKVLSAYNKHRDKPIREQAENIIHLFTLTNLGAPAAFKYFDTTIDRKRYTSTKEVLDATLIHQSITGLYETRIDLSQLGGDGGPAPGGSEAAAKGGVQEISDSRPMLHIYLNGRRFLGLLDTGADKTCIAGRDWPANWPIHQTESSLQGLGMACGVARSSQPLRWQHEDKSGIIHPFVIPTLPFTLWGRDIMKDIKVRLMTDSPDDSQDLMIGAIESNLFADQISWKSDQPVWLNQWPLKQEKLQALQQLVTEQLQLGHLEESNSPWNTPVFVIKKKSGKWRLLQDLRAVNATMHDMGALQPGLPSPVAVPKGWEIIIIDLQDCFFNIKLHPEDCKRFAFSVPSPNFKRPYQRFQWKVLPQGMKNSPTLCQKFVDKAILTVRDKYQDSYIVHYMDDILLAHPSRSIVDEILTSMIQALNKHGLVVSTEKIQKYDNLKYLGTHIQGDSVSYQKLQIRTDKLRTLNDFQKLLGNINWIRPFLKLTTGELKPLFEILNPDSNPISTRKLTPEACKALQLMNERLSTARVKRLDLSQPWSLCILKTEYTPTACLWQDGVVEWIHLPHISPKVITPYDIFCTQLIIKGRHRSKELFSKDPDYIVVPYTKVQFDLLLQEKEDWPISLLGFLGEVHFHLPKDPLLTFTLQTAIIFPHMTSTTPLEKGIVIFTDGSANGRSVTYIQGREPIIKENTQNTAQQAEIVAVITAFEEVSQPFNLYTDSKYVTGLFPEIETATLSPRTKIYTELKHLQRLIHKRQEKFYIGHIRGHTGLPGPLAQGNAYADSLTRILTAAGKRTADGSEFEKRTADGSEFESPKKKAKVE

SEQ ID NO: 3259 - protein, 2123 aa, synthetic construct
MPAAKRVKLDGGDKKYSIGLDIGTNSVGWAVITDEYKVPSKKFKVLGNTDRHSIKKNLIGALLFDSGETAEATRLKRTARRRYTRRKNRICYLQEIFSNEMAKVDDSFFHRLEESFLVEEDKKHERHPIFGNIVDEVAYHEKYPTIYHLRKKLVDSTDKADLRLIYLALAHMIKFRGHFLIEGDLNPDNSDVDKLFIQLVQTYNQLFEENPINASGVDAKAILSARLSKSRRLENLIAQLPGEKKNGLFGNLIALSLGLTPNFKSNFDLAEDAKLQLSKDTYDDDLDNLLAQIGDQYADLFLAAKNLSDAILLSDILRVNTEITKAPLSASMIKRYDEHHQDLTLLKALVRQQLPEKYKEIFFDQSKNGYAGYIDGGASQEEFYKFIKPILEKMDGTEELLVKLNREDLLRKQRTFDNGSIPHQIHLGELHAILRRQEDFYPFLKDNREKIEKILTFRIPYYVGPLARGNSRFAWMTRKSEETITPWNFEEVVDKGASAQSFIERMTNFDKNLPNEKVLPKHSLLYEYFTVYNELTKVKYVTEGMRKPAFLSGEQKKAIVDLLFKTNRKVTVKQLKEDYFKKIECFDSVEISGVEDRFNASLGTYHDLLKIIKDKDFLDNEENEDILEDIVLTLTLFEDREMIEERLKTYAHLFDDKVMKQLKRRRYTGWGRLSRKLINGIRDKQSGKTILDFLKSDGFANRNFMQLIHDDSLTFKEDIQKAQVSGQGDSLHEHIANLAGSPAIKKGILQTVKVVDELVKVMGRHKPENIVIEMARENQTTQKGQKNSRERMKRIEEGIKELGSQILKEHPVENTQLQNEKLYLYYLQNGRDMYVDQELDINRLSDYDVDHIVPQSFLKDDSIDNKVLTRSDKARGKSDNVPSEEVVKKMKNYWRQLLNAKLITQRKFDNLTKAERGGLSELDKAGFIKRQLVETRQITKHVAQILDSRMNTKYDENDKLIREVKVITLKSKLVSDFRKDFQFYKVREINNYHHAHDAYLNAVVGTALIKKYPKLESEFVYGDYKVYDVRKMIAKSEQEIGKATAKYFFYSNIMNFFKTEITLANGEIRKRPLIETNGETGEIVWDKGRDFATVRKVLSMPQVNIVKKTEVQTGGFSKESILPKRNSDKLIARKKDWDPKKYGGFDSPTVAYSVLVVAKVEKGKSKKLKSVKELLGITIMERSSFEKNPIDFLEAKGYKEVKKDLIIKLPKYSLFELENGRKRMLASAGELQKGNELALPSKYVNFLYLASHYEKLKGSPEDNEQKQLFVEQHKHYLDEIIEQISEFSKRVILADANLDKVLSAYNKHRDKPIREQAENIIHLFTLTNLGAPAAFKYFDTTIDRKRYTSTKEVLDATLIHQSITGLYETRIDLSQLGGDGGGSSGSSGSSGSSGSSGSSGGVQEISDSRPMLHIYLNGRRFLGLLDTGADKTCIAGRDWPANWPIHQTESSLQGLGMACGVARSSQPLRWQHEDKSGIIHPFVIPTLPFTLWGRDIMKDIKVRLMTDSPDDSQDLMIGAIESNLFADQISWKSDQPVWLNQWPLKQEKLQALQQLVTEQLQLGHLEESNSPWNTPVFVIKKKSGKWRLLQDLRAVNATMHDMGALQPGLPSPVAVPKGWEIIIIDLQDCFFNIKLHPEDCKRFAFSVPSPNFKRPYQRFQWKVLPQGMKNSPTLCQKFVDKAILTVRDKYQDSYIVHYMDDILLAHPSRSIVDEILTSMIQALNKHGLVVSTEKIQKYDNLKYLGTHIQGDSVSYQKLQIRTDKLRTLNDFQKLLGNINWIRPFLKLTTGELKPLFEILNPDSNPISTRKLTPEACKALQLMNERLSTARVKRLDLSQPWSLCILKTEYTPTACLWQDGVVEWIHLPHISPKVITPYDIFCTQLIIKGRHRSKELFSKDPDYIVVPYTKVQFDLLLQEKEDWPISLLGFLGEVHFHLPKDPLLTFTLQTAIIFPHMTSTTPLEKGIVIFTDGSANGRSVTYIQGREPIIKENTQNTAQQAEIVAVITAFEEVSQPFNLYTDSKYVTGLFPEIETATLSPRTKIYTELKHLQRLIHKRQEKFYIGHIRGHTGLPGPLAQGNAYADSLTRILTAAGKRTADGSEFEKRTADGSEFESPKKKAKVE

SEQ ID NO: 3260 - protein, 2125 aa, synthetic construct; identical to SEQ ID NO: 3157

SEQ ID NO: 3261 - protein, 2116 aa, synthetic construct
MPAAKRVKLDGGDKKYSIGLDIGTNSVGWAVITDEYKVPSKKFKVLGNTDRHSIKKNLIGALLFDSGETAEATRLKRTARRRYTRRKNRICYLQEIFSNEMAKVDDSFFHRLEESFLVEEDKKHERHPIFGNIVDEVAYHEKYPTIYHLRKKLVDSTDKADLRLIYLALAHMIKFRGHFLIEGDLNPDNSDVDKLFIQLVQTYNQLFEENPINASGVDAKAILSARLSKSRRLENLIAQLPGEKKNGLFGNLIALSLGLTPNFKSNFDLAEDAKLQLSKDTYDDDLDNLLAQIGDQYADLFLAAKNLSDAILLSDILRVNTEITKAPLSASMIKRYDEHHQDLTLLKALVRQQLPEKYKEIFFDQSKNGYAGYIDGGASQEEFYKFIKPILEKMDGTEELLVKLNREDLLRKQRTFDNGSIPHQIHLGELHAILRRQEDFYPFLKDNREKIEKILTFRIPYYVGPLARGNSRFAWMTRKSEETITPWNFEEVVDKGASAQSFIERMTNFDKNLPNEKVLPKHSLLYEYFTVYNELTKVKYVTEGMRKPAFLSGEQKKAIVDLLFKTNRKVTVKQLKEDYFKKIECFDSVEISGVEDRFNASLGTYHDLLKIIKDKDFLDNEENEDILEDIVLTLTLFEDREMIEERLKTYAHLFDDKVMKQLKRRRYTGWGRLSRKLINGIRDKQSGKTILDFLKSDGFANRNFMQLIHDDSLTFKEDIQKAQVSGQGDSLHEHIANLAGSPAIKKGILQTVKVVDELVKVMGRHKPENIVIEMARENQTTQKGQKNSRERMKRIEEGIKELGSQILKEHPVENTQLQNEKLYLYYLQNGRDMYVDQELDINRLSDYDVDHIVPQSFLKDDSIDNKVLTRSDKARGKSDNVPSEEVVKKMKNYWRQLLNAKLITQRKFDNLTKAERGGLSELDKAGFIKRQLVETRQITKHVAQILDSRMNTKYDENDKLIREVKVITLKSKLVSDFRKDFQFYKVREINNYHHAHDAYLNAVVGTALIKKYPKLESEFVYGDYKVYDVRKMIAKSEQEIGKATAKYFFYSNIMNFFKTEITLANGEIRKRPLIETNGETGEIVWDKGRDFATVRKVLSMPQVNIVKKTEVQTGGFSKESILPKRNSDKLIARKKDWDPKKYGGFDSPTVAYSVLVVAKVEKGKSKKLKSVKELLGITIMERSSFEKNPIDFLEAKGYKEVKKDLIIKLPKYSLFELENGRKRMLASAGELQKGNELALPSKYVNFLYLASHYEKLKGSPEDNEQKQLFVEQHKHYLDEIIEQISEFSKRVILADANLDKVLSAYNKHRDKPIREQAENIIHLFTLTNLGAPAAFKYFDTTIDRKRYTSTKEVLDATLIHQSITGLYETRIDLSQLGGDGGGGSGSSEAAAKGGVQEISDSRPMLHIYLNGRRFLGLLDTGADKTCIAGRDWPANWPIHQTESSLQGLGMACGVARSSQPLRWQHEDKSGIIHPFVIPTLPFTLWGRDIMKDIKVRLMTDSPDDSQDLMIGAIESNLFADQISWKSDQPVWLNQWPLKQEKLQALQQLVTEQLQLGHLEESNSPWNTPVFVIKKKSGKWRLLQDLRAVNATMHDMGALQPGLPSPVAVPKGWEIIIIDLQDCFFNIKLHPEDCKRFAFSVPSPNFKRPYQRFQWKVLPQGMKNSPTLCQKFVDKAILTVRDKYQDSYIVHYMDDILLAHPSRSIVDEILTSMIQALNKHGLVVSTEKIQKYDNLKYLGTHIQGDSVSYQKLQIRTDKLRTLNDFQKLLGNINWIRPFLKLTTGELKPLFEILNGDSNPISTRKLTPEACKALQLMNERLSTARVKRLDLSQPWSLCILKTEYTPTACLWQDGVVEWIHLPHISPKVITPYDIFCTQLIIKGRHRSKELFSKDPDYIVVPYTKVQFDLLLQEKEDWPISLLGFLGEVHFHLPKDPLLTFTLQTAIIFPHMTSTTPLEKGIVIFTDGSANGRSVTYIQGREPIIKENTQNTAQQAEIVAVITAFEEVSQPFNLYTDSKYVTGLFPEIETATLSPRTKIYTELKHLQRLIHKRQEKFYIGHIRGHTGLPGPLAQGNAYADSLTRILTAAGKRTADGSEFEKRTADGSEFESPKKKAKVE

SEQ ID NO: 3262 - protein, 2114 aa, synthetic construct
MPAAKRVKLDGGDKKYSIGLDIGTNSVGWAVITDEYKVPSKKFKVLGNTDRHSIKKNLIGALLFDSGETAEATRLKRTARRRYTRRKNRICYLQEIFSNEMAKVDDSFFHRLEESFLVEEDKKHERHPIFGNIVDEVAYHEKYPTIYHLRKKLVDSTDKADLRLIYLALAHMIKFRGHFLIEGDLNPDNSDVDKLFIQLVQTYNQLFEENPINASGVDAKAILSARLSKSRRLENLIAQLPGEKKNGLFGNLIALSLGLTPNFKSNFDLAEDAKLQLSKDTYDDDLDNLLAQIGDQYADLFLAAKNLSDAILLSDILRVNTEITKAPLSASMIKRYDEHHQDLTLLKALVRQQLPEKYKEIFFDQSKNGYAGYIDGGASQEEFYKFIKPILEKMDGTEELLVKLNREDLLRKQRTFDNGSIPHQIHLGELHAILRRQEDFYPFLKDNREKIEKILTFRIPYYVGPLARGNSRFAWMTRKSEETITPWNFEEVVDKGASAQSFIERMTNFDKNLPNEKVLPKHSLLYEYFTVYNELTKVKYVTEGMRKPAFLSGEQKKAIVDLLFKTNRKVTVKQLKEDYFKKIECFDSVEISGVEDRFNASLGTYHDLLKIIKDKDFLDNEENEDILEDIVLTLTLFEDREMIEERLKTYAHLFDDKVMKQLKRRRYTGWGRLSRKLINGIRDKQSGKTILDFLKSDGFANRNFMQLIHDDSLTFKEDIQKAQVSGQGDSLHEHIANLAGSPAIKKGILQTVKVVDELVKVMGRHKPENIVIEMARENQTTQKGQKNSRERMKRIEEGIKELGSQILKEHPVENTQLQNEKLYLYYLQNGRDMYVDQELDINRLSDYDVDHIVPQSFLKDDSIDNKVLTRSDKARGKSDNVPSEEVVKKMKNYWRQLLNAKLITQRKFDNLTKAERGGLSELDKAGFIKRQLVETRQITKHVAQILDSRMNTKYDENDKLIREVKVITLKSKLVSDFRKDFQFYKVREINNYHHAHDAYLNAVVGTALIKKYPKLESEFVYGDYKVYDVRKMIAKSEQEIGKATAKYFFYSNIMNFFKTEITLANGEIRKRPLIETNGETGEIVWDKGRDFATVRKVLSMPQVNIVKKTEVQTGGFSKESILPKRNSDKLIARKKDWDPKKYGGFDSPTVAYSVLVVAKVEKGKSKKLKSVKELLGITIMERSSFEKNPIDFLEAKGYKEVKKDLIIKLPKYSLFELENGRKRMLASAGELQKGNELALPSKYVNFLYLASHYEKLKGSPEDNEQKQLFVEQHKHYLDEIIEQISEFSKRVILADANLDKVLSAYNKHRDKPIREQAENIIHLFTLTNLGAPAAFKYFDTTIDRKRYTSTKEVLDATLIHQSITGLYETRIDLSQLGGDGGPAPAPAPAPGGVQEISDSRPMLHIYLNGRRFLGLLDTGADKTCIAGRDWPANWPIHQTESSLQGLGMACGVARSSQPLRWQHEDKSGIIHPFVIPTLPFTLWGRDIMKDIKVRLMTDSPDDSQDLMIGAIESNLFADQISWKSDQPVWLNQWPLKQEKLQALQQLVTEQLQLGHLEESNSPWNTPVFVIKKKSGKWRLLQDLRAVNATMHDMGALQPGLPSPVAVPKGWEIIIIDLQDCFFNIKLHPEDCKRFAFSVPSPNFKRPYQRFQWKVLPQGMKNSPTLCQKFVDKAILTVRDKYQDSYIVHYMDDILLAHPSRSIVDEILTSMIQALNKHGLVVSTEKIQKYDNLKYLGTHIQGDSVSYQKLQIRTDKLRTLNDFQKLLGNINWIRPFLKLTTGELKPLFEILNGDSNPISTRKLTPEACKALQLMNERLSTARVKRLDLSQPWSLCILKTEYTPTACLWQDGVVEWIHLPHISPKVITPYDIFCTQLIIKGRHRSKELFSKDPDYIVVPYTKVQFDLLLQEKEDWPISLLGFLGEVHFHLPKDPLLTFTLQTAIIFPHMTSTTPLEKGIVIFTDGSANGRSVTYIQGREPIIKENTQNTAQQAEIVAVITAFEEVSQPFNLYTDSKYVTGLFPEIETATLSPRTKIYTELKHLQRLIHKRQEKFYIGHIRGHTGLPGPLAQGNAYADSLTRILTAAGKRTADGSEFEKRTADGSEFESPKKKAKVE

SEQ ID NO: 3263 - protein, 2116 aa, synthetic construct; identical to SEQ ID NO: 3146

SEQ ID NO: 3264 - protein, 2114 aa, synthetic construct
MPAAKRVKLDGGDKKYSIGLDIGTNSVGWAVITDEYKVPSKKFKVLGNTDRHSIKKNLIGALLFDSGETAEATRLKRTARRRYTRRKNRICYLQEIFSNEMAKVDDSFFHRLEESFLVEEDKKHERHPIFGNIVDEVAYHEKYPTIYHLRKKLVDSTDKADLRLIYLALAHMIKFRGHFLIEGDLNPDNSDVDKLFIQLVQTYNQLFEENPINASGVDAKAILSARLSKSRRLENLIAQLPGEKKNGLFGNLIALSLGLTPNFKSNFDLAEDAKLQLSKDTYDDDLDNLLAQIGDQYADLFLAAKNLSDAILLSDILRVNTEITKAPLSASMIKRYDEHHQDLTLLKALVRQQLPEKYKEIFFDQSKNGYAGYIDGGASQEEFYKFIKPILEKMDGTEELLVKLNREDLLRKQRTFDNGSIPHQIHLGELHAILRRQEDFYPFLKDNREKIEKILTFRIPYYVGPLARGNSRFAWMTRKSEETITPWNFEEVVDKGASAQSFIERMTNFDKNLPNEKVLPKHSLLYEYFTVYNELTKVKYVTEGMRKPAFLSGEQKKAIVDLLFKTNRKVTVKQLKEDYFKKIECFDSVEISGVEDRFNASLGTYHDLLKIIKDKDFLDNEENEDILEDIVLTLTLFEDREMIEERLKTYAHLFDDKVMKQLKRRRYTGWGRLSRKLINGIRDKQSGKTILDFLKSDGFANRNFMQLIHDDSLTFKEDIQKAQVSGQGDSLHEHIANLAGSPAIKKGILQTVKVVDELVKVMGRHKPENIVIEMARENQTTQKGQKNSRERMKRIEEGIKELGSQILKEHPVENTQLQNEKLYLYYLQNGRDMYVDQELDINRLSDYDVDHIVPQSFLKDDSIDNKVLTRSDKARGKSDNVPSEEVVKKMKNYWRQLLNAKLITQRKFDNLTKAERGGLSELDKAGFIKRQLVETRQITKHVAQILDSRMNTKYDENDKLIREVKVITLKSKLVSDFRKDFQFYKVREINNYHHAHDAYLNAVVGTALIKKYPKLESEFVYGDYKVYDVRKMIAKSEQEIGKATAKYFFYSNIMNFFKTEITLANGEIRKRPLIETNGETGEIVWDKGRDFATVRKVLSMPQVNIVKKTEVQTGGFSKESILPKRNSDKLIARKKDWDPKKYGGFDSPTVAYSVLVVAKVEKGKSKKLKSVKELLGITIMERSSFEKNPIDFLEAKGYKEVKKDLIIKLPKYSLFELENGRKRMLASAGELQKGNELALPSKYVNFLYLASHYEKLKGSPEDNEQKQLFVEQHKHYLDEIIEQISEFSKRVILADANLDKVLSAYNKHRDKPIREQAENIIHLFTLTNLGAPAAFKYFDTTIDRKRYTSTKEVLDATLIHQSITGLYETRIDLSQLGGDGGGSSPAPGGGGGVQEISDSRPMLHIYLNGRRFLGLLDTGADKTCIAGRDWPANWPIHQTESSLQGLGMACGVARSSQPLRWQHEDKSGIIHPFVIPTLPFTLWGRDIMKDIKVRLMTDSPDDSQDLMIGAIESNLFADQISWKSDQPVWLNQWPLKQEKLQALQQLVTEQLQLGHLEESNSPWNTPVFVIKKKSGKWRLLQDLRAVNATMHDMGALQPGLPSPVAVPKGWEIIIIDLQDCFFNIKLHPEDCKRFAFSVPSPNFKRPYQRFQWKVLPQGMKNSPTLCQKFVDKAILTVRDKYQDSYIVHYMDDILLAHPSRSIVDEILTSMIQALNKHGLVVSTEKIQKYDNLKYLGTHIQGDSVSYQKLQIRTDKLRTLNDFQKLLGNINWIRPFLKLTTGELKPLFEILNGDSNPISTRKLTPEACKALQLMNERLSTARVKRLDLSQPWSLCILKTEYTPTACLWQDGVVEWIHLPHISPKVITPYDIFCTQLIIKGRHRSKELFSKDPDYIVVPYTKVQFDLLLQEKEDWPISLLGFLGEVHFHLPKDPLLTFTLQTAIIFPHMTSTTPLEKGIVIFTDGSANGRSVTYIQGREPIIKENTQNTAQQAEIVAVITAFEEVSQPFNLYTDSKYVTGLFPEIETATLSPRTKIYTELKHLQRLIHKRQEKFYIGHIRGHTGLPGPLAQGNAYADSLTRILTAAGKRTADGSEFEKRTADGSEFESPKKKAKVE

SEQ ID NO: 3265 - protein, 2116 aa, synthetic construct
MPAAKRVKLDGGDKKYSIGLDIGTNSVGWAVITDEYKVPSKKFKVLGNTDRHSIKKNLIGALLFDSGETAEATRLKRTARRRYTRRKNRICYLQEIFSNEMAKVDDSFFHRLEESFLVEEDKKHERHPIFGNIVDEVAYHEKYPTIYHLRKKLVDSTDKADLRLIYLALAHMIKFRGHFLIEGDLNPDNSDVDKLFIQLVQTYNQLFEENPINASGVDAKAILSARLSKSRRLENLIAQLPGEKKNGLFGNLIALSLGLTPNFKSNFDLAEDAKLQLSKDTYDDDLDNLLAQIGDQYADLFLAAKNLSDAILLSDILRVNTEITKAPLSASMIKRYDEHHQDLTLLKALVRQQLPEKYKEIFFDQSKNGYAGYIDGGASQEEFYKFIKPILEKMDGTEELLVKLNREDLLRKQRTFDNGSIPHQIHLGELHAILRRQEDFYPFLKDNREKIEKILTFRIPYYVGPLARGNSRFAWMTRKSEETITPWNFEEVVDKGASAQSFIERMTNFDKNLPNEKVLPKHSLLYEYFTVYNELTKVKYVTEGMRKPAFLSGEQKKAIVDLLFKTNRKVTVKQLKEDYFKKIECFDSVEISGVEDRFNASLGTYHDLLKIIKDKDFLDNEENEDILEDIVLTLTLFEDREMIEERLKTYAHLFDDKVMKQLKRRRYTGWGRLSRKLINGIRDKQSGKTILDFLKSDGFANRNFMQLIHDDSLTFKEDIQKAQVSGQGDSLHEHIANLAGSPAIKKGILQTVKVVDELVKVMGRHKPENIVIEMARENQTTQKGQKNSRERMKRIEEGIKELGSQILKEHPVENTQLQNEKLYLYYLQNGRDMYVDQELDINRLSDYDVDHIVPQSFLKDDSIDNKVLTRSDKARGKSDNVPSEEVVKKMKNYWRQLLNAKLITQRKFDNLTKAERGGLSELDKAGFIKRQLVETRQITKHVAQILDSRMNTKYDENDKLIREVKVITLKSKLVSDFRKDFQFYKVREINNYHHAHDAYLNAVVGTALIKKYPKLESEFVYGDYKVYDVRKMIAKSEQEIGKATAKYFFYSNIMNFFKTEITLANGEIRKRPLIETNGETGEIVWDKGRDFATVRKVLSMPQVNIVKKTEVQTGGFSKESILPKRNSDKLIARKKDWDPKKYGGFDSPTVAYSVLVVAKVEKGKSKKLKSVKELLGITIMERSSFEKNPIDFLEAKGYKEVKKDLIIKLPKYSLFELENGRKRMLASAGELQKGNELALPSKYVNFLYLASHYEKLKGSPEDNEQKQLFVEQHKHYLDEIIEQISEFSKRVILADANLDKVLSAYNKHRDKPIREQAENIIHLFTLTNLGAPAAFKYFDTTIDRKRYTSTKEVLDATLIHQSITGLYETRIDLSQLGGDGGGSSEAAAKPAPGGVQEISDSRPMLHIYLNGRRFLGLLDTGADKTCIAGRDWPANWPIHQTESSLQGLGMACGVARSSQPLRWQHEDKSGIIHPFVIPTLPFTLWGRDIMKDIKVRLMTDSPDDSQDLMIGAIESNLFADQISWKSDQPVWLNQWPLKQEKLQALQQLVTEQLQLGHLEESNSPWNTPVFVIKKKSGKWRLLQDLRAVNATMHDMGALQPGLPSPVAVPKGWEIIIIDLQDCFFNIKLHPEDCKRFAFSVPSPNFKRPYQRFQWKVLPQGMKNSPTLCQKFVDKAILTVRDKYQDSYIVHYMDDILLAHPSRSIVDEILTSMIQALNKHGLVVSTEKIQKYDNLKYLGTHIQGDSVSYQKLQIRTDKLRTLNDFQKLLGNINWIRPFLKLTTGELKPLFEILNGDSNPISTRKLTPEACKALQLMNERLSTARVKRLDLSQPWSLCILKTEYTPTACLWQDGVVEWIHLPHISPKVITPYDIFCTQLIIKGRHRSKELFSKDPDYIVVPYTKVQFDLLLQEKEDWPISLLGFLGEVHFHLPKDPLLTFTLQTAIIFPHMTSTTPLEKGIVIFTDGSANGRSVTYIQGREPIIKENTQNTAQQAEIVAVITAFEEVSQPFNLYTDSKYVTGLFPEIETATLSPRTKIYTELKHLQRLIHKRQEKFYIGHIRGHTGLPGPLAQGNAYADSLTRILTAAGKRTADGSEFEKRTADGSEFESPKKKAKVE

SEQ ID NO: 3266 - protein, 2120 aa, synthetic construct
MPAAKRVKLDGGDKKYSIGLDIGTNSVGWAVITDEYKVPSKKFKVLGNTDRHSIKKNLIGALLFDSGETAEATRLKRTARRRYTRRKNRICYLQEIFSNEMAKVDDSFFHRLEESFLVEEDKKHERHPIFGNIVDEVAYHEKYPTIYHLRKKLVDSTDKADLRLIYLALAHMIKFRGHFLIEGDLNPDNSDVDKLFIQLVQTYNQLFEENPINASGVDAKAILSARLSKSRRLENLIAQLPGEKKNGLFGNLIALSLGLTPNFKSNFDLAEDAKLQLSKDTYDDDLDNLLAQIGDQYADLFLAAKNLSDAILLSDILRVNTEITKAPLSASMIKRYDEHHQDLTLLKALVRQQLPEKYKEIFFDQSKNGYAGYIDGGASQEEFYKFIKPILEKMDGTEELLVKLNREDLLRKQRTFDNGSIPHQIHLGELHAILRRQEDFYPFLKDNREKIEKILTFRIPYYVGPLARGNSRFAWMTRKSEETITPWNFEEVVDKGASAQSFIERMTNFDKNLPNEKVLPKHSLLYEYFTVYNELTKVKYVTEGMRKPAFLSGEQKKAIVDLLFKTNRKVTVKQLKEDYFKKIECFDSVEISGVEDRFNASLGTYHDLLKIIKDKDFLDNEENEDILEDIVLTLTLFEDREMIEERLKTYAHLFDDKVMKQLKRRRYTGWGRLSRKLINGIRDKQSGKTILDFLKSDGFANRNFMQLIHDDSLTFKEDIQKAQVSGQGDSLHEHIANLAGSPAIKKGILQTVKVVDELVKVMGRHKPENIVIEMARENQTTQKGQKNSRERMKRIEEGIKELGSQILKEHPVENTQLQNEKLYLYYLQNGRDMYVDQELDINRLSDYDVDHIVPQSFLKDDSIDNKVLTRSDKARGKSDNVPSEEVVKKMKNYWRQLLNAKLITQRKFDNLTKAERGGLSELDKAGFIKRQLVETRQITKHVAQILDSRMNTKYDENDKLIREVKVITLKSKLVSDFRKDFQFYKVREINNYHHAHDAYLNAVVGTALIKKYPKLESEFVYGDYKVYDVRKMIAKSEQEIGKATAKYFFYSNIMNFFKTEITLANGEIRKRPLIETNGETGEIVWDKGRDFATVRKVLSMPQVNIVKKTEVQTGGFSKESILPKRNSDKLIARKKDWDPKKYGGFDSPTVAYSVLVVAKVEKGKSKKLKSVKELLGITIMERSSFEKNPIDFLEAKGYKEVKKDLIIKLPKYSLFELENGRKRMLASAGELQKGNELALPSKYVNFLYLASHYEKLKGSPEDNEQKQLFVEQHKHYLDEIIEQISEFSKRVILADANLDKVLSAYNKHRDKPIREQAENIIHLFTLTNLGAPAAFKYFDTTIDRKRYTSTKEVLDATLIHQSITGLYETRIDLSQLGGDGGGGSGGSGGSGGSGGSGGWVQEISDSRPMLHIYLNGRRFLGLLNTGADKTCIAGRDWPANWPIHQTESSLQGLGMACGVARSSQPLRWQHEDKSGIIHPFVIPTLPFTLWGRDIMKDIKVRLMTDSPDDSQDLMIGAIESNLFADQISWKSDQPVWLNQWPLKQEKLQALQQLVTEQLQLGHLEESNSPWNTPVFVIKKKSGKWRLLQDLRAVNATMHDMGALQPGLPSPVAVPKGWEIIIIDLQDCFFNIKLHPEDCKRFAFSVPSPNFKRPYQRFQWKVLPQGMKNSPTLCQKFVDKAILTVRDKYQDSYIVHYMDDILLAHPSRSIVDEILTSMIQALNKHGLVVSTEKIQKYDNLKYLGTHIQGDSVSYQKLQIRTDKLRTLNDFQKLLGNINWIRPFLKLTTGELKPLFEILNGDSNPISTRKLTPEACKALQLMNERLSTARVKRLDLSQPWSLCILKTEYTPTACLWQDGVVEWIHLPHISPKVITPYDIFCTQLIIKGRHRSKELFSKDPDYIVVPYTKVQFDLLLQEKEDWPISLLGFLGEVHFHLPKDPLLTFTLQTAIIFPHMTSTTPLEKGIVIFTDGSANGRSVTYIQGREPIIKENTQNTAQQAEIVAVITAFEEVSQPFNLYTDSKYVTGLFPEIETATLSPRTKIYTELKHLQRLIHKRQEKFYIGHIRGHTGLPGPLAQGNAYADSLTRILTAGKRTADGSEFEKRTADGSEFESPKKKAKVE

SEQ ID NO: 3267 - protein, 2151 aa, synthetic construct
MPAAKRVKLDGGDKKYSIGLDIGTNSVGWAVITDEYKVPSKKFKVLGNTDRHSIKKNLIGALLFDSGETAEATRLKRTARRRYTRRKNRICYLQEIFSNEMAKVDDSFFHRLEESFLVEEDKKHERHPIFGNIVDEVAYHEKYPTIYHLRKKLVDSTDKADLRLIYLALAHMIKFRGHFLIEGDLNPDNSDVDKLFIQLVQTYNQLFEENPINASGVDAKAILSARLSKSRRLENLIAQLPGEKKNGLFGNLIALSLGLTPNFKSNFDLAEDAKLQLSKDTYDDDLDNLLAQIGDQYADLFLAAKNLSDAILLSDILRVNTEITKAPLSASMIKRYDEHHQDLTLLKALVRQQLPEKYKEIFFDQSKNGYAGYIDGGASQEEFYKFIKPILEKMDGTEELLVKLNREDLLRKQRTFDNGSIPHQIHLGELHAILRRQEDFYPFLKDNREKIEKILTFRIPYYVGPLARGNSRFAWMTRKSEETITPWNFEEVVDKGASAQSFIERMTNFDKNLPNEKVLPKHSLLYEYFTVYNELTKVKYVTEGMRKPAFLSGEQKKAIVDLLFKTNRKVTVKQLKEDYFKKIECFDSVEISGVEDRFNASLGTYHDLLKIIKDKDFLDNEENEDILEDIVLTLTLFEDREMIEERLKTYAHLFDDKVMKQLKRRRYTGWGRLSRKLINGIRDKQSGKTILDFLKSDGFANRNFMQLIHDDSLTFKEDIQKAQVSGQGDSLHEHIANLAGSPAIKKGILQTVKVVDELVKVMGRHKPENIVIEMARENQTTQKGQKNSRERMKRIEEGIKELGSQILKEHPVENTQLQNEKLYLYYLQNGRDMYVDQELDINRLSDYDVDHIVPQSFLKDDSIDNKVLTRSDKARGKSDNVPSEEVVKKMKNYWRQLLNAKLITQRKFDNLTKAERGGLSELDKAGFIKRQLVETRQITKHVAQILDSRMNTKYDENDKLIREVKVITLKSKLVSDFRKDFQFYKVREINNYHHAHDAYLNAVVGTALIKKYPKLESEFVYGDYKVYDVRKMIAKSEQEIGKATAKYFFYSNIMNFFKTEITLANGEIRKRPLIETNGETGEIVWDKGRDFATVRKVLSMPQVNIVKKTEVQTGGFSKESILPKRNSDKLIARKKDWDPKKYGGFDSPTVAYSVLVVAKVEKGKSKKLKSVKELLGITIMERSSFEKNPIDFLEAKGYKEVKKDLIIKLPKYSLFELENGRKRMLASAGELQKGNELALPSKYVNFLYLASHYEKLKGSPEDNEQKQLFVEQHKHYLDEIIEQISEFSKRVILADANLDKVLSAYNKHRDKPIREQAENIIHLFTLTNLGAPAAFKYFDTTIDRKRYTSTKEVLDATLIHQSITGLYETRIDLSQLGGDGGAEAAAKEAAAKEAAAKEAAAKALEAEAAAKEAAAKEAAAKEAAAKAGGWVQEISDSRPMLHIYLNGRRFLGLLNTGADKTCIAGRDWPANWPIHQTESSLQGLGMACGVARSSQPLRWQHEDKSGIIHPFVIPTLPFTLWGRDIMKDIKVRLMTDSPDDSQDLMIGAIESNLFADQISWKSDQPVWLNQWPLKQEKLQALQQLVTEQLQLGHLEESNSPWNTPVFVIKKKSGKWRLLQDLRAVNATMHDMGALQPGLPSPVAVPKGWEIIIIDLQDCFFNIKLHPEDCKRFAFSVPSPNFKRPYQRFQWKVLPQGMKNSPTLCQKFVDKAILTVRDKYQDSYIVHYMDDILLAHPSRSIVDEILTSMIQALNKHGLVVSTEKIQKYDNLKYLGTHIQGDSVSYQKLQIRTDKLRTLNDFQKLLGNINWIRPFLKLTTGELKPLFEILNGDSNPISTRKLTPEACKALQLMNERLSTARVKRLDLSQPWSLCILKTEYTPTACLWQDGVVEWIHLPHISPKVITPYDIFCTQLIIKGRHRSKELFSKDPDYIVVPYTKVQFDLLLQEKEDWPISLLGFLGEVHFHLPKDPLLTFTLQTAIIFPHMTSTTPLEKGIVIFTDGSANGRSVTYIQGREPIIKENTQNTAQQAEIVAVITAFEEVSQPFNLYTDSKYVTGLFPEIETATLSPRTKIYTELKHLQRLIHKRQEKFYIGHIRGHTGLPGPLAQGNAYADSLTRILTAGKRTADGSEFEKRTADGSEFESPKKKAKVE

SEQ ID NO: 3268 - protein, 2135 aa, synthetic construct; identical to SEQ ID NO: 3172

SEQ ID NO: 3269 - protein, 2114 aa, synthetic construct
MPAAKRVKLDGGDKKYSIGLDIGTNSVGWAVITDEYKVPSKKFKVLGNTDRHSIKKNLIGALLFDSGETAEATRLKRTARRRYTRRKNRICYLQEIFSNEMAKVDDSFFHRLEESFLVEEDKKHERHPIFGNIVDEVAYHEKYPTIYHLRKKLVDSTDKADLRLIYLALAHMIKFRGHFLIEGDLNPDNSDVDKLFIQLVQTYNQLFEENPINASGVDAKAILSARLSKSRRLENLIAQLPGEKKNGLFGNLIALSLGLTPNFKSNFDLAEDAKLQLSKDTYDDDLDNLLAQIGDQYADLFLAAKNLSDAILLSDILRVNTEITKAPLSASMIKRYDEHHQDLTLLKALVRQQLPEKYKEIFFDQSKNGYAGYIDGGASQEEFYKFIKPILEKMDGTEELLVKLNREDLLRKQRTFDNGSIPHQIHLGELHAILRRQEDFYPFLKDNREKIEKILTFRIPYYVGPLARGNSRFAWMTRKSEETITPWNFEEVVDKGASAQSFIERMTNFDKNLPNEKVLPKHSLLYEYFTVYNELTKVKYVTEGMRKPAFLSGEQKKAIVDLLFKTNRKVTVKQLKEDYFKKIECFDSVEISGVEDRFNASLGTYHDLLKIIKDKDFLDNEENEDILEDIVLTLTLFEDREMIEERLKTYAHLFDDKVMKQLKRRRYTGWGRLSRKLINGIRDKQSGKTILDFLKSDGFANRNFMQLIHDDSLTFKEDIQKAQVSGQGDSLHEHIANLAGSPAIKKGILQTVKVVDELVKVMGRHKPENIVIEMARENQTTQKGQKNSRERMKRIEEGIKELGSQILKEHPVENTQLQNEKLYLYYLQNGRDMYVDQELDINRLSDYDVDHIVPQSFLKDDSIDNKVLTRSDKARGKSDNVPSEEVVKKMKNYWRQLLNAKLITQRKFDNLTKAERGGLSELDKAGFIKRQLVETRQITKHVAQILDSRMNTKYDENDKLIREVKVITLKSKLVSDFRKDFQFYKVREINNYHHAHDAYLNAVVGTALIKKYPKLESEFVYGDYKVYDVRKMIAKSEQEIGKATAKYFFYSNIMNFFKTEITLANGEIRKRPLIETNGETGEIVWDKGRDFATVRKVLSMPQVNIVKKTEVQTGGFSKESILPKRNSDKLIARKKDWDPKKYGGFDSPTVAYSVLVVAKVEKGKSKKLKSVKELLGITIMERSSFEKNPIDFLEAKGYKEVKKDLIIKLPKYSLFELENGRKRMLASAGELQKGNELALPSKYVNFLYLASHYEKLKGSPEDNEQKQLFVEQHKHYLDEIIEQISEFSKRVILADANLDKVLSAYNKHRDKPIREQAENIIHLFTLTNLGAPAAFKYFDTTIDRKRYTSTKEVLDATLIHQSITGLYETRIDLSQLGGDGGGGSGGGGSSGGWVQEISDSRPMLHIYLNGRRFLGLLNTGADKTCIAGRDWPANWPIHQTESSLQGLGMACGVARSSQPLRWQHEDKSGIIHPFVIPTLPFTLWGRDIMKDIKVRLMTDSPDDSQDLMIGAIESNLFADQISWKSDQPVWLNQWPLKQEKLQALQQLVTEQLQLGHLEESNSPWNTPVFVIKKKSGKWRLLQDLRAVNATMHDMGALQPGLPSPVAVPKGWEIIIIDLQDCFFNIKLHPEDCKRFAFSVPSPNFKRPYQRFQWKVLPQGMKNSPTLCQKFVDKAILTVRDKYQDSYIVHYMDDILLAHPSRSIVDEILTSMIQALNKHGLVVSTEKIQKYDNLKYLGTHIQGDSVSYQKLQIRTDKLRTLNDFQKLLGNINWIRPFLKLTTGELKPLFEILNGDSNPISTRKLTPEACKALQLMNERLSTARVKRLDLSQPWSLCILKTEYTPTACLWQDGVVEWIHLPHISPKVITPYDIFCTQLIIKGRHRSKELFSKDPDYIVVPYTKVQFDLLLQEKEDWPISLLGFLGEVHFHLPKDPLLTFTLQTAIIFPHMTSTTPLEKGIVIFTDGSANGRSVTYIQGREPIIKENTQNTAQQAEIVAVITAFEEVSQPFNLYTDSKYVTGLFPEIETATLSPRTKIYTELKHLQRLIHKRQEKFYIGHIRGHTGLPGPLAQGNAYADSLTRILTAGKRTADGSEFEKRTADGSEFESPKKKAKVE

SEQ ID NO: 3270 - protein, 2116 aa, synthetic construct; identical to SEQ ID NO: 3181

SEQ ID NO: 3271 - protein, 2116 aa, synthetic construct
MPAAKRVKLDGGDKKYSIGLDIGTNSVGWAVITDEYKVPSKKFKVLGNTDRHSIKKNLIGALLFDSGETAEATRLKRTARRRYTRRKNRICYLQEIFSNEMAKVDDSFFHRLEESFLVEEDKKHERHPIFGNIVDEVAYHEKYPTIYHLRKKLVDSTDKADLRLIYLALAHMIKFRGHFLIEGDLNPDNSDVDKLFIQLVQTYNQLFEENPINASGVDAKAILSARLSKSRRLENLIAQLPGEKKNGLFGNLIALSLGLTPNFKSNFDLAEDAKLQLSKDTYDDDLDNLLAQIGDQYADLFLAAKNLSDAILLSDILRVNTEITKAPLSASMIKRYDEHHQDLTLLKALVRQQLPEKYKEIFFDQSKNGYAGYIDGGASQEEFYKFIKPILEKMDGTEELLVKLNREDLLRKQRTFDNGSIPHQIHLGELHAILRRQEDFYPFLKDNREKIEKILTFRIPYYVGPLARGNSRFAWMTRKSEETITPWNFEEVVDKGASAQSFIERMTNFDKNLPNEKVLPKHSLLYEYFTVYNELTKVKYVTEGMRKPAFLSGEQKKAIVDLLFKTNRKVTVKQLKEDYFKKIECFDSVEISGVEDRFNASLGTYHDLLKIIKDKDFLDNEENEDILEDIVLTLTLFEDREMIEERLKTYAHLFDDKVMKQLKRRRYTGWGRLSRKLINGIRDKQSGKTILDFLKSDGFANRNFMQLIHDDSLTFKEDIQKAQVSGQGDSLHEHIANLAGSPAIKKGILQTVKVVDELVKVMGRHKPENIVIEMARENQTTQKGQKNSRERMKRIEEGIKELGSQILKEHPVENTQLQNEKLYLYYLQNGRDMYVDQELDINRLSDYDVDHIVPQSFLKDDSIDNKVLTRSDKARGKSDNVPSEEVVKKMKNYWRQLLNAKLITQRKFDNLTKAERGGLSELDKAGFIKRQLVETRQITKHVAQILDSRMNTKYDENDKLIREVKVITLKSKLVSDFRKDFQFYKVREINNYHHAHDAYLNAVVGTALIKKYPKLESEFVYGDYKVYDVRKMIAKSEQEIGKATAKYFFYSNIMNFFKTEITLANGEIRKRPLIETNGETGEIVWDKGRDFATVRKVLSMPQVNIVKKTEVQTGGFSKESILPKRNSDKLIARKKDWDPKKYGGFDSPTVAYSVLVVAKVEKGKSKKLKSVKELLGITIMERSSFEKNPIDFLEAKGYKEVKKDLIIKLPKYSLFELENGRKRMLASAGELQKGNELALPSKYVNFLYLASHYEKLKGSPEDNEQKQLFVEQHKHYLDEIIEQISEFSKRVILADANLDKVLSAYNKHRDKPIREQAENIIHLFTLTNLGAPAAFKYFDTTIDRKRYTSTKEVLDATLIHQSITGLYETRIDLSQLGGDGGEAAAKGSSGGGGGWVQEISDSRPMLHIYLNGRRFLGLLNTGADKTCIAGRDWPANWPIHQTESSLQGLGMACGVARSSQPLRWQHEDKSGIIHPFVIPTLPFTLWGRDIMKDIKVRLMTDSPDDSQDLMIGAIESNLFADQISWKSDQPVWLNQWPLKQEKLQALQQLVTEQLQLGHLEESNSPWNTPVFVIKKKSGKWRLLQDLRAVNATMHDMGALQPGLPSPVAVPKGWEIIIIDLQDCFFNIKLHPEDCKRFAFSVPSPNFKRPYQRFQWKVLPQGMKNSPTLCQKFVDKAILTVRDKYQDSYIVHYMDDILLAHPSRSIVDEILTSMIQALNKHGLVVSTEKIQKYDNLKYLGTHIQGDSVSYQKLQIRTDKLRTLNDFQKLLGNINWIRPFLKLTTGELKPLFEILNGDSNPISTRKLTPEACKALQLMNERLSTARVKRLDLSQPWSLCILKTEYTPTACLWQDGVVEWIHLPHISPKVITPYDIFCTQLIIKGRHRSKELFSKDPDYIVVPYTKVQFDLLLQEKEDWPISLLGFLGEVHFHLPKDPLLTFTLQTAIIFPHMTSTTPLEKGIVIFTDGSANGRSVTYIQGREPIIKENTQNTAQQAEIVAVITAFEEVSQPFNLYTDSKYVTGLFPEIETATLSPRTKIYTELKHLQRLIHKRQEKFYIGHIRGHTGLPGPLAQGNAYADSLTRILTAGKRTADGSEFEKRTADGSEFESPKKKAKVE

SEQ ID NO: 3272 - protein, 2114 aa, synthetic construct
MPAAKRVKLDGGDKKYSIGLDIGTNSVGWAVITDEYKVPSKKFKVLGNTDRHSIKKNLIGALLFDSGETAEATRLKRTARRRYTRRKNRICYLQEIFSNEMAKVDDSFFHRLEESFLVEEDKKHERHPIFGNIVDEVAYHEKYPTIYHLRKKLVDSTDKADLRLIYLALAHMIKFRGHFLIEGDLNPDNSDVDKLFIQLVQTYNQLFEENPINASGVDAKAILSARLSKSRRLENLIAQLPGEKKNGLFGNLIALSLGLTPNFKSNFDLAEDAKLQLSKDTYDDDLDNLLAQIGDQYADLFLAAKNLSDAILLSDILRVNTEITKAPLSASMIKRYDEHHQDLTLLKALVRQQLPEKYKEIFFDQSKNGYAGYIDGGASQEEFYKFIKPILEKMDGTEELLVKLNREDLLRKQRTFDNGSIPHQIHLGELHAILRRQEDFYPFLKDNREKIEKILTFRIPYYVGPLARGNSRFAWMTRKSEETITPWNFEEVVDKGASAQSFIERMTNFDKNLPNEKVLPKHSLLYEYFTVYNELTKVKYVTEGMRKPAFLSGEQKKAIVDLLFKTNRKVTVKQLKEDYFKKIECFDSVEISGVEDRFNASLGTYHDLLKIIKDKDFLDNEENEDILEDIVLTLTLFEDREMIEERLKTYAHLFDDKVMKQLKRRRYTGWGRLSRKLINGIRDKQSGKTILDFLKSDGFANRNFMQLIHDDSLTFKEDIQKAQVSGQGDSLHEHIANLAGSPAIKKGILQTVKVVDELVKVMGRHKPENIVIEMARENQTTQKGQKNSRERMKRIEEGIKELGSQILKEHPVENTQLQNEKLYLYYLQNGRDMYVDQELDINRLSDYDVDHIVPQSFLKDDSIDNKVLTRSDKARGKSDNVPSEEVVKKMKNYWRQLLNAKLITQRKFDNLTKAERGGLSELDKAGFIKRQLVETRQITKHVAQILDSRMNTKYDENDKLIREVKVITLKSKLVSDFRKDFQFYKVREINNYHHAHDAYLNAVVGTALIKKYPKLESEFVYGDYKVYDVRKMIAKSEQEIGKATAKYFFYSNIMNFFKTEITLANGEIRKRPLIETNGETGEIVWDKGRDFATVRKVLSMPQVNIVKKTEVQTGGFSKESILPKRNSDKLIARKKDWDPKKYGGFDSPTVAYSVLVVAKVEKGKSKKLKSVKELLGITIMERSSFEKNPIDFLEAKGYKEVKKDLIIKLPKYSLFELENGRKRMLASAGELQKGNELALPSKYVNFLYLASHYEKLKGSPEDNEQKQLFVEQHKHYLDEIIEQISEFSKRVILADANLDKVLSAYNKHRDKPIREQAENIIHLFTLTNLGAPAAFKYFDTTIDRKRYTSTKEVLDATLIHQSITGLYETRIDLSQLGGDGGGGGGGSGSSGGWVQEISDSRPMLHIYLNGRRFLGLLNTGADKTCIAGRDWPANWPIHQTESSLQGLGMACGVARSSQPLRWQHEDKSGIIHPFVIPTLPFTLWGRDIMKDIKVRLMTDSPDDSQDLMIGAIESNLFADQISWKSDQPVWLNQWPLKQEKLQALQQLVTEQLQLGHLEESNSPWNTPVFVIKKKSGKWRLLQDLRAVNATMHDMGALQPGLPSPVAVPKGWEIIIIDLQDCFFNIKLHPEDCKRFAFSVPSPNFKRPYQRFQWKVLPQGMKNSPTLCQKFVDKAILTVRDKYQDSYIVHYMDDILLAHPSRSIVDEILTSMIQALNKHGLVVSTEKIQKYDNLKYLGTHIQGDSVSYQKLQIRTDKLRTLNDFQKLLGNINWIRPFLKLTTGELKPLFEILNGDSNPISTRKLTPEACKALQLMNERLSTARVKRLDLSQPWSLCILKTEYTPTACLWQDGVVEWIHLPHISPKVITPYDIFCTQLIIKGRHRSKELFSKDPDYIVVPYTKVQFDLLLQEKEDWPISLLGFLGEVHFHLPKDPLLTFTLQTAIIFPHMTSTTPLEKGIVIFTDGSANGRSVTYIQGREPIIKENTQNTAQQAEIVAVITAFEEVSQPFNLYTDSKYVTGLFPEIETATLSPRTKIYTELKHLQRLIHKRQEKFYIGHIRGHTGLPGPLAQGNAYADSLTRILTAGKRTADGSEFEKRTADGSEFESPKKKAKVE

SEQ ID NO: 3273 - protein, 2116 aa, synthetic construct
MPAAKRVKLDGGDKKYSIGLDIGTNSVGWAVITDEYKVPSKKFKVLGNTDRHSIKKNLIGALLFDSGETAEATRLKRTARRRYTRRKNRICYLQEIFSNEMAKVDDSFFHRLEESFLVEEDKKHERHPIFGNIVDEVAYHEKYPTIYHLRKKLVDSTDKADLRLIYLALAHMIKFRGHFLIEGDLNPDNSDVDKLFIQLVQTYNQLFEENPINASGVDAKAILSARLSKSRRLENLIAQLPGEKKNGLFGNLIALSLGLTPNFKSNFDLAEDAKLQLSKDTYDDDLDNLLAQIGDQYADLFLAAKNLSDAILLSDILRVNTEITKAPLSASMIKRYDEHHQDLTLLKALVRQQLPEKYKEIFFDQSKNGYAGYIDGGASQEEFYKFIKPILEKMDGTEELLVKLNREDLLRKQRTFDNGSIPHQIHLGELHAILRRQEDFYPFLKDNREKIEKILTFRIPYYVGPLARGNSRFAWMTRKSEETITPWNFEEVVDKGASAQSFIERMTNFDKNLPNEKVLPKHSLLYEYFTVYNELTKVKYVTEGMRKPAFLSGEQKKAIVDLLFKTNRKVTVKQLKEDYFKKIECFDSVEISGVEDRFNASLGTYHDLLKIIKDKDFLDNEENEDILEDIVLTLTLFEDREMIEERLKTYAHLFDDKVMKQLKRRRYTGWGRLSRKLINGIRDKQSGKTILDFLKSDGFANRNFMQLIHDDSLTFKEDIQKAQVSGQGDSLHEHIANLAGSPAIKKGILQTVKVVDELVKVMGRHKPENIVIEMARENQTTQKGQKNSRERMKRIEEGIKELGSQILKEHPVENTQLQNEKLYLYYLQNGRDMYVDQELDINRLSDYDVDHIVPQSFLKDDSIDNKVLTRSDKARGKSDNVPSEEVVKKMKNYWRQLLNAKLITQRKFDNLTKAERGGLSELDKAGFIKRQLVETRQITKHVAQILDSRMNTKYDENDKLIREVKVITLKSKLVSDFRKDFQFYKVREINNYHHAHDAYLNAVVGTALIKKYPKLESEFVYGDYKVYDVRKMIAKSEQEIGKATAKYFFYSNIMNFFKTEITLANGEIRKRPLIETNGETGEIVWDKGRDFATVRKVLSMPQVNIVKKTEVQTGGFSKESILPKRNSDKLIARKKDWDPKKYGGFDSPTVAYSVLVVAKVEKGKSKKLKSVKELLGITIMERSSFEKNPIDFLEAKGYKEVKKDLIIKLPKYSLFELENGRKRMLASAGELQKGNELALPSKYVNFLYLASHYEKLKGSPEDNEQKQLFVEQHKHYLDEIIEQISEFSKRVILADANLDKVLSAYNKHRDKPIREQAENIIHLFTLTNLGAPAAFKYFDTTIDRKRYTSTKEVLDATLIHQSITGLYETRIDLSQLGGDGGEAAAKGGGPAPGGWVQEISDSRPMLHIYLNGRRFLGLLNTGADKTCIAGRDWPANWPIHQTESSLQGLGMACGVARSSQPLRWQHEDKSGIIHPFVIPTLPFTLWGRDIMKDIKVRLMTDSPDDSQDLMIGAIESNLFADQISWKSDQPVWLNQWPLKQEKLQALQQLVTEQLQLGHLEESNSPWNTPVFVIKKKSGKWRLLQDLRAVNATMHDMGALQPGLPSPVAVPKGWEIIIIDLQDCFFNIKLHPEDCKRFAFSVPSPNFKRPYQRFQWKVLPQGMKNSPTLCQKFVDKAILTVRDKYQDSYIVHYMDDILLAHPSRSIVDEILTSMIQALNKHGLVVSTEKIQKYDNLKYLGTHIQGDSVSYQKLQIRTDKLRTLNDFQKLLGNINWIRPFLKLTTGELKPLFEILNGDSNPISTRKLTPEACKALQLMNERLSTARVKRLDLSQPWSLCILKTEYTPTACLWQDGVVEWIHLPHISPKVITPYDIFCTQLIIKGRHRSKELFSKDPDYIVVPYTKVQFDLLLQEKEDWPISLLGFLGEVHFHLPKDPLLTFTLQTAIIFPHMTSTTPLEKGIVIFTDGSANGRSVTYIQGREPIIKENTQNTAQQAEIVAVITAFEEVSQPFNLYTDSKYVTGLFPEIETATLSPRTKIYTELKHLQRLIHKRQEKFYIGHIRGHTGLPGPLAQGNAYADSLTRILTAGKRTADGSEFEKRTADGSEFESPKKKAKVE

SEQ ID NO: 3274 - protein, 2116 aa, synthetic construct
MPAAKRVKLDGGDKKYSIGLDIGTNSVGWAVITDEYKVPSKKFKVLGNTDRHSIKKNLIGALLFDSGETAEATRLKRTARRRYTRRKNRICYLQEIFSNEMAKVDDSFFHRLEESFLVEEDKKHERHPIFGNIVDEVAYHEKYPTIYHLRKKLVDSTDKADLRLIYLALAHMIKFRGHFLIEGDLNPDNSDVDKLFIQLVQTYNQLFEENPINASGVDAKAILSARLSKSRRLENLIAQLPGEKKNGLFGNLIALSLGLTPNFKSNFDLAEDAKLQLSKDTYDDDLDNLLAQIGDQYADLFLAAKNLSDAILLSDILRVNTEITKAPLSASMIKRYDEHHQDLTLLKALVRQQLPEKYKEIFFDQSKNGYAGYIDGGASQEEFYKFIKPILEKMDGTEELLVKLNREDLLRKQRTFDNGSIPHQIHLGELHAILRRQEDFYPFLKDNREKIEKILTFRIPYYVGPLARGNSRFAWMTRKSEETITPWNFEEVVDKGASAQSFIERMTNFDKNLPNEKVLPKHSLLYEYFTVYNELTKVKYVTEGMRKPAFLSGEQKKAIVDLLFKTNRKVTVKQLKEDYFKKIECFDSVEISGVEDRFNASLGTYHDLLKIIKDKDFLDNEENEDILEDIVLTLTLFEDREMIEERLKTYAHLFDDKVMKQLKRRRYTGWGRLSRKLINGIRDKQSGKTILDFLKSDGFANRNFMQLIHDDSLTFKEDIQKAQVSGQGDSLHEHIANLAGSPAIKKGILQTVKVVDELVKVMGRHKPENIVIEMARENQTTQKGQKNSRERMKRIEEGIKELGSQILKEHPVENTQLQNEKLYLYYLQNGRDMYVDQELDINRLSDYDVDHIVPQSFLKDDSIDNKVLTRSDKARGKSDNVPSEEVVKKMKNYWRQLLNAKLITQRKFDNLTKAERGGLSELDKAGFIKRQLVETRQITKHVAQILDSRMNTKYDENDKLIREVKVITLKSKLVSDFRKDFQFYKVREINNYHHAHDAYLNAVVGTALIKKYPKLESEFVYGDYKVYDVRKMIAKSEQEIGKATAKYFFYSNIMNFFKTEITLANGEIRKRPLIETNGETGEIVWDKGRDFATVRKVLSMPQVNIVKKTEVQTGGFSKESILPKRNSDKLIARKKDWDPKKYGGFDSPTVAYSVLVVAKVEKGKSKKLKSVKELLGITIMERSSFEKNPIDFLEAKGYKEVKKDLIIKLPKYSLFELENGRKRMLASAGELQKGNELALPSKYVNFLYLASHYEKLKGSPEDNEQKQLFVEQHKHYLDEIIEQISEFSKRVILADANLDKVLSAYNKHRDKPIREQAENIIHLFTLTNLGAPAAFKYFDTTIDRKRYTSTKEVLDATLIHQSITGLYETRIDLSQLGGDGGPAPEAAAKGGGGGWVQEISDSRPMLHIYLNGRRFLGLLNTGADKTCIAGRDWPANWPIHQTESSLQGLGMACGVARSSQPLRWQHEDKSGIIHPFVIPTLPFTLWGRDIMKDIKVRLMTDSPDDSQDLMIGAIESNLFADQISWKSDQPVWLNQWPLKQEKLQALQQLVTEQLQLGHLEESNSPWNTPVFVIKKKSGKWRLLQDLRAVNATMHDMGALQPGLPSPVAVPKGWEIIIIDLQDCFFNIKLHPEDCKRFAFSVPSPNFKRPYQRFQWKVLPQGMKNSPTLCQKFVDKAILTVRDKYQDSYIVHYMDDILLAHPSRSIVDEILTSMIQALNKHGLVVSTEKIQKYDNLKYLGTHIQGDSVSYQKLQIRTDKLRTLNDFQKLLGNINWIRPFLKLTTGELKPLFEILNGDSNPISTRKLTPEACKALQLMNERLSTARVKRLDLSQPWSLCILKTEYTPTACLWQDGVVEWIHLPHISPKVITPYDIFCTQLIIKGRHRSKELFSKDPDYIVVPYTKVQFDLLLQEKEDWPISLLGFLGEVHFHLPKDPLLTFTLQTAIIFPHMTSTTPLEKGIVIFTDGSANGRSVTYIQGREPIIKENTQNTAQQAEIVAVITAFEEVSQPFNLYTDSKYVTGLFPEIETATLSPRTKIYTELKHLQRLIHKRQEKFYIGHIRGHTGLPGPLAQGNAYADSLTRILTAGKRTADGSEFEKRTADGSEFESPKKKAKVE

SEQ ID NO: 3275 - protein, 2114 aa, synthetic construct
MPAAKRVKLDGGDKKYSIGLDIGTNSVGWAVITDEYKVPSKKFKVLGNTDRHSIKKNLIGALLFDSGETAEATRLKRTARRRYTRRKNRICYLQEIFSNEMAKVDDSFFHRLEESFLVEEDKKHERHPIFGNIVDEVAYHEKYPTIYHLRKKLVDSTDKADLRLIYLALAHMIKFRGHFLIEGDLNPDNSDVDKLFIQLVQTYNQLFEENPINASGVDAKAILSARLSKSRRLENLIAQLPGEKKNGLFGNLIALSLGLTPNFKSNFDLAEDAKLQLSKDTYDDDLDNLLAQIGDQYADLFLAAKNLSDAILLSDILRVNTEITKAPLSASMIKRYDEHHQDLTLLKALVRQQLPEKYKEIFFDQSKNGYAGYIDGGASQEEFYKFIKPILEKMDGTEELLVKLNREDLLRKQRTFDNGSIPHQIHLGELHAILRRQEDFYPFLKDNREKIEKILTFRIPYYVGPLARGNSRFAWMTRKSEETITPWNFEEVVDKGASAQSFIERMTNFDKNLPNEKVLPKHSLLYEYFTVYNELTKVKYVTEGMRKPAFLSGEQKKAIVDLLFKTNRKVTVKQLKEDYFKKIECFDSVEISGVEDRFNASLGTYHDLLKIIKDKDFLDNEENEDILEDIVLTLTLFEDREMIEERLKTYAHLFDDKVMKQLKRRRYTGWGRLSRKLINGIRDKQSGKTILDFLKSDGFANRNFMQLIHDDSLTFKEDIQKAQVSGQGDSLHEHIANLAGSPAIKKGILQTVKVVDELVKVMGRHKPENIVIEMARENQTTQKGQKNSRERMKRIEEGIKELGSQILKEHPVENTQLQNEKLYLYYLQNGRDMYVDQELDINRLSDYDVDHIVPQSFLKDDSIDNKVLTRSDKARGKSDNVPSEEVVKKMKNYWRQLLNAKLITQRKFDNLTKAERGGLSELDKAGFIKRQLVETRQITKHVAQILDSRMNTKYDENDKLIREVKVITLKSKLVSDFRKDFQFYKVREINNYHHAHDAYLNAVVGTALIKKYPKLESEFVYGDYKVYDVRKMIAKSEQEIGKATAKYFFYSNIMNFFKTEITLANGEIRKRPLIETNGETGEIVWDKGRDFATVRKVLSMPQVNIVKKTEVQTGGFSKESILPKRNSDKLIARKKDWDPKKYGGFDSPTVAYSVLVVAKVEKGKSKKLKSVKELLGITIMERSSFEKNPIDFLEAKGYKEVKKDLIIKLPKYSLFELENGRKRMLASAGELQKGNELALPSKYVNFLYLASHYEKLKGSPEDNEQKQLFVEQHKHYLDEIIEQISEFSKRVILADANLDKVLSAYNKHRDKPIREQAENIIHLFTLTNLGAPAAFKYFDTTIDRKRYTSTKEVLDATLIHQSITGLYETRIDLSQLGGDGGGGGPAPGGSGGWVQEISDSRPMLHIYLNGRRFLGLLNTGADKTCIAGRDWPANWPIHQTESSLQGLGMACGVARSSQPLRWQHEDKSGIIHPFVIPTLPFTLWGRDIMKDIKVRLMTDSPDDSQDLMIGAIESNLFADQISWKSDQPVWLNQWPLKQEKLQALQQLVTEQLQLGHLEESNSPWNTPVFVIKKKSGKWRLLQDLRAVNATMHDMGALQPGLPSPVAVPKGWEIIIIDLQDCFFNIKLHPEDCKRFAFSVPSPNFKRPYQRFQWKVLPQGMKNSPTLCQKFVDKAILTVRDKYQDSYIVHYMDDILLAHPSRSIVDEILTSMIQALNKHGLVVSTEKIQKYDNLKYLGTHIQGDSVSYQKLQIRTDKLRTLNDFQKLLGNINWIRPFLKLTTGELKPLFEILNGDSNPISTRKLTPEACKALQLMNERLSTARVKRLDLSQPWSLCILKTEYTPTACLWQDGVVEWIHLPHISPKVITPYDIFCTQLIIKGRHRSKELFSKDPDYIVVPYTKVQFDLLLQEKEDWPISLLGFLGEVHFHLPKDPLLTFTLQTAIIFPHMTSTTPLEKGIVIFTDGSANGRSVTYIQGREPIIKENTQNTAQQAEIVAVITAFEEVSQPFNLYTDSKYVTGLFPEIETATLSPRTKIYTELKHLQRLIHKRQEKFYIGHIRGHTGLPGPLAQGNAYADSLTRILTAGKRTADGSEFEKRTADGSEFESPKKKAKVE

SEQ ID NO: 3276 - protein, 2114 aa, synthetic construct
MPAAKRVKLDGGDKKYSIGLDIGTNSVGWAVITDEYKVPSKKFKVLGNTDRHSIKKNLIGALLFDSGETAEATRLKRTARRRYTRRKNRICYLQEIFSNEMAKVDDSFFHRLEESFLVEEDKKHERHPIFGNIVDEVAYHEKYPTIYHLRKKLVDSTDKADLRLIYLALAHMIKFRGHFLIEGDLNPDNSDVDKLFIQLVQTYNQLFEENPINASGVDAKAILSARLSKSRRLENLIAQLPGEKKNGLFGNLIALSLGLTPNFKSNFDLAEDAKLQLSKDTYDDDLDNLLAQIGDQYADLFLAAKNLSDAILLSDILRVNTEITKAPLSASMIKRYDEHHQDLTLLKALVRQQLPEKYKEIFFDQSKNGYAGYIDGGASQEEFYKFIKPILEKMDGTEELLVKLNREDLLRKQRTFDNGSIPHQIHLGELHAILRRQEDFYPFLKDNREKIEKILTFRIPYYVGPLARGNSRFAWMTRKSEETITPWNFEEVVDKGASAQSFIERMTNFDKNLPNEKVLPKHSLLYEYFTVYNELTKVKYVTEGMRKPAFLSGEQKKAIVDLLFKTNRKVTVKQLKEDYFKKIECFDSVEISGVEDRFNASLGTYHDLLKIIKDKDFLDNEENEDILEDIVLTLTLFEDREMIEERLKTYAHLFDDKVMKQLKRRRYTGWGRLSRKLINGIRDKQSGKTILDFLKSDGFANRNFMQLIHDDSLTFKEDIQKAQVSGQGDSLHEHIANLAGSPAIKKGILQTVKVVDELVKVMGRHKPENIVIEMARENQTTQKGQKNSRERMKRIEEGIKELGSQILKEHPVENTQLQNEKLYLYYLQNGRDMYVDQELDINRLSDYDVDHIVPQSFLKDDSIDNKVLTRSDKARGKSDNVPSEEVVKKMKNYWRQLLNAKLITQRKFDNLTKAERGGLSELDKAGFIKRQLVETRQITKHVAQILDSRMNTKYDENDKLIREVKVITLKSKLVSDFRKDFQFYKVREINNYHHAHDAYLNAVVGTALIKKYPKLESEFVYGDYKVYDVRKMIAKSEQEIGKATAKYFFYSNIMNFFKTEITLANGEIRKRPLIETNGETGEIVWDKGRDFATVRKVLSMPQVNIVKKTEVQTGGFSKESILPKRNSDKLIARKKDWDPKKYGGFDSPTVAYSVLVVAKVEKGKSKKLKSVKELLGITIMERSSFEKNPIDFLEAKGYKEVKKDLIIKLPKYSLFELENGRKRMLASAGELQKGNELALPSKYVNFLYLASHYEKLKGSPEDNEQKQLFVEQHKHYLDEIIEQISEFSKRVILADANLDKVLSAYNKHRDKPIREQAENIIHLFTLTNLGAPAAFKYFDTTIDRKRYTSTKEVLDATLIHQSITGLYETRIDLSQLGGDGGGGSGGGPAPGGWVQEISDSRPMLHIYLNGRRFLGLLNTGADKTCIAGRDWPANWPIHQTESSLQGLGMACGVARSSQPLRWQHEDKSGIIHPFVIPTLPFTLWGRDIMKDIKVRLMTDSPDDSQDLMIGAIESNLFADQISWKSDQPVWLNQWPLKQEKLQALQQLVTEQLQLGHLEESNSPWNTPVFVIKKKSGKWRLLQDLRAVNATMHDMGALQPGLPSPVAVPKGWEIIIIDLQDCFFNIKLHPEDCKRFAFSVPSPNFKRPYQRFQWKVLPQGMKNSPTLCQKFVDKAILTVRDKYQDSYIVHYMDDILLAHPSRSIVDEILTSMIQALNKHGLVVSTEKIQKYDNLKYLGTHIQGDSVSYQKLQIRTDKLRTLNDFQKLLGNINWIRPFLKLTTGELKPLFEILNGDSNPISTRKLTPEACKALQLMNERLSTARVKRLDLSQPWSLCILKTEYTPTACLWQDGVVEWIHLPHISPKVITPYDIFCTQLIIKGRHRSKELFSKDPDYIVVPYTKVQFDLLLQEKEDWPISLLGFLGEVHFHLPKDPLLTFTLQTAIIFPHMTSTTPLEKGIVIFTDGSANGRSVTYIQGREPIIKENTQNTAQQAEIVAVITAFEEVSQPFNLYTDSKYVTGLFPEIETATLSPRTKIYTELKHLQRLIHKRQEKFYIGHIRGHTGLPGPLAQGNAYADSLTRILTAGKRTADGSEFEKRTADGSEFESPKKKAKVE

SEQ ID NO: 3277 - protein, 2135 aa, synthetic construct; identical to SEQ ID NO: 3173

SEQ ID NO: 3278 - protein, 2110 aa, synthetic construct
MPAAKRVKLDGGDKKYSIGLDIGTNSVGWAVITDEYKVPSKKFKVLGNTDRHSIKKNLIGALLFDSGETAEATRLKRTARRRYTRRKNRICYLQEIFSNEMAKVDDSFFHRLEESFLVEEDKKHERHPIFGNIVDEVAYHEKYPTIYHLRKKLVDSTDKADLRLIYLALAHMIKFRGHFLIEGDLNPDNSDVDKLFIQLVQTYNQLFEENPINASGVDAKAILSARLSKSRRLENLIAQLPGEKKNGLFGNLIALSLGLTPNFKSNFDLAEDAKLQLSKDTYDDDLDNLLAQIGDQYADLFLAAKNLSDAILLSDILRVNTEITKAPLSASMIKRYDEHHQDLTLLKALVRQQLPEKYKEIFFDQSKNGYAGYIDGGASQEEFYKFIKPILEKMDGTEELLVKLNREDLLRKQRTFDNGSIPHQIHLGELHAILRRQEDFYPFLKDNREKIEKILTFRIPYYVGPLARGNSRFAWMTRKSEETITPWNFEEVVDKGASAQSFIERMTNFDKNLPNEKVLPKHSLLYEYFTVYNELTKVKYVTEGMRKPAFLSGEQKKAIVDLLFKTNRKVTVKQLKEDYFKKIECFDSVEISGVEDRFNASLGTYHDLLKIIKDKDFLDNEENEDILEDIVLTLTLFEDREMIEERLKTYAHLFDDKVMKQLKRRRYTGWGRLSRKLINGIRDKQSGKTILDFLKSDGFANRNFMQLIHDDSLTFKEDIQKAQVSGQGDSLHEHIANLAGSPAIKKGILQTVKVVDELVKVMGRHKPENIVIEMARENQTTQKGQKNSRERMKRIEEGIKELGSQILKEHPVENTQLQNEKLYLYYLQNGRDMYVDQELDINRLSDYDVDHIVPQSFLKDDSIDNKVLTRSDKARGKSDNVPSEEVVKKMKNYWRQLLNAKLITQRKFDNLTKAERGGLSELDKAGFIKRQLVETRQITKHVAQILDSRMNTKYDENDKLIREVKVITLKSKLVSDFRKDFQFYKVREINNYHHAHDAYLNAVVGTALIKKYPKLESEFVYGDYKVYDVRKMIAKSEQEIGKATAKYFFYSNIMNFFKTEITLANGEIRKRPLIETNGETGEIVWDKGRDFATVRKVLSMPQVNIVKKTEVQTGGFSKESILPKRNSDKLIARKKDWDPKKYGGFDSPTVAYSVLVVAKVEKGKSKKLKSVKELLGITIMERSSFEKNPIDFLEAKGYKEVKKDLIIKLPKYSLFELENGRKRMLASAGELQKGNELALPSKYVNFLYLASHYEKLKGSPEDNEQKQLFVEQHKHYLDEIIEQISEFSKRVILADANLDKVLSAYNKHRDKPIREQAENIIHLFTLTNLGAPAAFKYFDTTIDRKRYTSTKEVLDATLIHQSITGLYETRIDLSQLGGDGGEAAAKGGWVQEISDSRPMLHIYLNGRRFLGLLNTGADKTCIAGRDWPANWPIHQTESSLQGLGMACGVARSSQPLRWQHEDKSGIIHPFVIPTLPFTLWGRDIMKDIKVRLMTDSPDDSQDLMIGAIESNLFADQISWKSDQPVWLNQWPLKQEKLQALQQLVTEQLQLGHLEESNSPWNTPVFVIKKKSGKWRLLQDLRAVNATMHDMGALQPGLPSPVAVPKGWEIIIIDLQDCFFNIKLHPEDCKRFAFSVPSPNFKRPYQRFQWKVLPQGMKNSPTLCQKFVDKAILTVRDKYQDSYIVHYMDDILLAHPSRSIVDEILTSMIQALNKHGLVVSTEKIQKYDNLKYLGTHIQGDSVSYQKLQIRTDKLRTLNDFQKLLGNINWIRPFLKLTTGELKPLFEILNGDSNPISTRKLTPEACKALQLMNERLSTARVKRLDLSQPWSLCILKTEYTPTACLWQDGVVEWIHLPHISPKVITPYDIFCTQLIIKGRHRSKELFSKDPDYIVVPYTKVQFDLLLQEKEDWPISLLGFLGEVHFHLPKDPLLTFTLQTAIIFPHMTSTTPLEKGIVIFTDGSANGRSVTYIQGREPIIKENTQNTAQQAEIVAVITAFEEVSQPFNLYTDSKYVTGLFPEIETATLSPRTKIYTELKHLQRLIHKRQEKFYIGHIRGHTGLPGPLAQGNAYADSLTRILTAGKRTADGSEFEKRTADGSEFESPKKKAKVE

SEQ ID NO: 3279 - protein, 2116 aa, synthetic construct
MPAAKRVKLDGGDKKYSIGLDIGTNSVGWAVITDEYKVPSKKFKVLGNTDRHSIKKNLIGALLFDSGETAEATRLKRTARRRYTRRKNRICYLQEIFSNEMAKVDDSFFHRLEESFLVEEDKKHERHPIFGNIVDEVAYHEKYPTIYHLRKKLVDSTDKADLRLIYLALAHMIKFRGHFLIEGDLNPDNSDVDKLFIQLVQTYNQLFEENPINASGVDAKAILSARLSKSRRLENLIAQLPGEKKNGLFGNLIALSLGLTPNFKSNFDLAEDAKLQLSKDTYDDDLDNLLAQIGDQYADLFLAAKNLSDAILLSDILRVNTEITKAPLSASMIKRYDEHHQDLTLLKALVRQQLPEKYKEIFFDQSKNGYAGYIDGGASQEEFYKFIKPILEKMDGTEELLVKLNREDLLRKQRTFDNGSIPHQIHLGELHAILRRQEDFYPFLKDNREKIEKILTFRIPYYVGPLARGNSRFAWMTRKSEETITPWNFEEVVDKGASAQSFIERMTNFDKNLPNEKVLPKHSLLYEYFTVYNELTKVKYVTEGMRKPAFLSGEQKKAIVDLLFKTNRKVTVKQLKEDYFKKIECFDSVEISGVEDRFNASLGTYHDLLKIIKDKDFLDNEENEDILEDIVLTLTLFEDREMIEERLKTYAHLFDDKVMKQLKRRRYTGWGRLSRKLINGIRDKQSGKTILDFLKSDGFANRNFMQLIHDDSLTFKEDIQKAQVSGQGDSLHEHIANLAGSPAIKKGILQTVKVVDELVKVMGRHKPENIVIEMARENQTTQKGQKNSRERMKRIEEGIKELGSQILKEHPVENTQLQNEKLYLYYLQNGRDMYVDQELDINRLSDYDVDHIVPQSFLKDDSIDNKVLTRSDKARGKSDNVPSEEVVKKMKNYWRQLLNAKLITQRKFDNLTKAERGGLSELDKAGFIKRQLVETRQITKHVAQILDSRMNTKYDENDKLIREVKVITLKSKLVSDFRKDFQFYKVREINNYHHAHDAYLNAVVGTALIKKYPKLESEFVYGDYKVYDVRKMIAKSEQEIGKATAKYFFYSNIMNFFKTEITLANGEIRKRPLIETNGETGEIVWDKGRDFATVRKVLSMPQVNIVKKTEVQTGGFSKESILPKRNSDKLIARKKDWDPKKYGGFDSPTVAYSVLVVAKVEKGKSKKLKSVKELLGITIMERSSFEKNPIDFLEAKGYKEVKKDLIIKLPKYSLFELENGRKRMLASAGELQKGNELALPSKYVNFLYLASHYEKLKGSPEDNEQKQLFVEQHKHYLDEIIEQISEFSKRVILADANLDKVLSAYNKHRDKPIREQAENIIHLFTLTNLGAPAAFKYFDTTIDRKRYTSTKEVLDATLIHQSITGLYETRIDLSQLGGDGGGGGGGSEAAAKGGWVQEISDSRPMLHIYLNGRRFLGLLNTGADKTCIAGRDWPANWPIHQTESSLQGLGMACGVARSSQPLRWQHEDKSGIIHPFVIPTLPFTLWGRDIMKDIKVRLMTDSPDDSQDLMIGAIESNLFADQISWKSDQPVWLNQWPLKQEKLQALQQLVTEQLQLGHLEESNSPWNTPVFVIKKKSGKWRLLQDLRAVNATMHDMGALQPGLPSPVAVPKGWEIIIIDLQDCFFNIKLHPEDCKRFAFSVPSPNFKRPYQRFQWKVLPQGMKNSPTLCQKFVDKAILTVRDKYQDSYIVHYMDDILLAHPSRSIVDEILTSMIQALNKHGLVVSTEKIQKYDNLKYLGTHIQGDSVSYQKLQIRTDKLRTLNDFQKLLGNINWIRPFLKLTTGELKPLFEILNGDSNPISTRKLTPEACKALQLMNERLSTARVKRLDLSQPWSLCILKTEYTPTACLWQDGVVEWIHLPHISPKVITPYDIFCTQLIIKGRHRSKELFSKDPDYIVVPYTKVQFDLLLQEKEDWPISLLGFLGEVHFHLPKDPLLTFTLQTAIIFPHMTSTTPLEKGIVIFTDGSANGRSVTYIQGREPIIKENTQNTAQQAEIVAVITAFEEVSQPFNLYTDSKYVTGLFPEIETATLSPRTKIYTELKHLQRLIHKRQEKFYIGHIRGHTGLPGPLAQGNAYADSLTRILTAGKRTADGSEFEKRTADGSEFESPKKKAKVE

SEQ ID NO: 3280 - protein, 2125 aa, synthetic construct; identical to SEQ ID NO: 3193

SEQ ID NO: 3281 - protein, 2120 aa, synthetic construct
MPAAKRVKLDGGDKKYSIGLDIGTNSVGWAVITDEYKVPSKKFKVLGNTDRHSIKKNLIGALLFDSGETAEATRLKRTARRRYTRRKNRICYLQEIFSNEMAKVDDSFFHRLEESFLVEEDKKHERHPIFGNIVDEVAYHEKYPTIYHLRKKLVDSTDKADLRLIYLALAHMIKFRGHFLIEGDLNPDNSDVDKLFIQLVQTYNQLFEENPINASGVDAKAILSARLSKSRRLENLIAQLPGEKKNGLFGNLIALSLGLTPNFKSNFDLAEDAKLQLSKDTYDDDLDNLLAQIGDQYADLFLAAKNLSDAILLSDILRVNTEITKAPLSASMIKRYDEHHQDLTLLKALVRQQLPEKYKEIFFDQSKNGYAGYIDGGASQEEFYKFIKPILEKMDGTEELLVKLNREDLLRKQRTFDNGSIPHQIHLGELHAILRRQEDFYPFLKDNREKIEKILTFRIPYYVGPLARGNSRFAWMTRKSEETITPWNFEEVVDKGASAQSFIERMTNFDKNLPNEKVLPKHSLLYEYFTVYNELTKVKYVTEGMRKPAFLSGEQKKAIVDLLFKTNRKVTVKQLKEDYFKKIECFDSVEISGVEDRFNASLGTYHDLLKIIKDKDFLDNEENEDILEDIVLTLTLFEDREMIEERLKTYAHLFDDKVMKQLKRRRYTGWGRLSRKLINGIRDKQSGKTILDFLKSDGFANRNFMQLIHDDSLTFKEDIQKAQVSGQGDSLHEHIANLAGSPAIKKGILQTVKVVDELVKVMGRHKPENIVIEMARENQTTQKGQKNSRERMKRIEEGIKELGSQILKEHPVENTQLQNEKLYLYYLQNGRDMYVDQELDINRLSDYDVDHIVPQSFLKDDSIDNKVLTRSDKARGKSDNVPSEEVVKKMKNYWRQLLNAKLITQRKFDNLTKAERGGLSELDKAGFIKRQLVETRQITKHVAQILDSRMNTKYDENDKLIREVKVITLKSKLVSDFRKDFQFYKVREINNYHHAHDAYLNAVVGTALIKKYPKLESEFVYGDYKVYDVRKMIAKSEQEIGKATAKYFFYSNIMNFFKTEITLANGEIRKRPLIETNGETGEIVWDKGRDFATVRKVLSMPQVNIVKKTEVQTGGFSKESILPKRNSDKLIARKKDWDPKKYGGFDSPTVAYSVLVVAKVEKGKSKKLKSVKELLGITIMERSSFEKNPIDFLEAKGYKEVKKDLIIKLPKYSLFELENGRKRMLASAGELQKGNELALPSKYVNFLYLASHYEKLKGSPEDNEQKQLFVEQHKHYLDEIIEQISEFSKRVILADANLDKVLSAYNKHRDKPIREQAENIIHLFTLTNLGAPAAFKYFDTTIDRKRYTSTKEVLDATLIHQSITGLYETRIDLSQLGGDGGGSSGSSGSSGSSGSSGGWVQEISDSRPMLHIYLNGRRFLGLLNTGADKTCIAGRDWPANWPIHQTESSLQGLGMACGVARSSQPLRWQHEDKSGIIHPFVIPTLPFTLWGRDIMKDIKVRLMTDSPDDSQDLMIGAIESNLFADQISWKSDQPVWLNQWPLKQEKLQALQQLVTEQLQLGHLEESNSPWNTPVFVIKKKSGKWRLLQDLRAVNATMHDMGALQPGLPSPVAVPKGWEIIIIDLQDCFFNIKLHPEDCKRFAFSVPSPNFKRPYQRFQWKVLPQGMKNSPTLCQKFVDKAILTVRDKYQDSYIVHYMDDILLAHPSRSIVDEILTSMIQALNKHGLVVSTEKIQKYDNLKYLGTHIQGDSVSYQKLQIRTDKLRTLNDFQKLLGNINWIRPFLKLTTGELKPLFEILNGDSNPISTRKLTPEACKALQLMNERLSTARVKRLDLSQPWSLCILKTEYTPTACLWQDGVVEWIHLPHISPKVITPYDIFCTQLIIKGRHRSKELFSKDPDYIVVPYTKVQFDLLLQEKEDWPISLLGFLGEVHFHLPKDPLLTFTLQTAIIFPHMTSTTPLEKGIVIFTDGSANGRSVTYIQGREPIIKENTQNTAQQAEIVAVITAFEEVSQPFNLYTDSKYVTGLFPEIETATLSPRTKIYTELKHLQRLIHKRQEKFYIGHIRGHTGLPGPLAQGNAYADSLTRILTAGKRTADGSEFEKRTADGSEFESPKKKAKVE

SEQ ID NO: 3282 - protein, 2123 aa, synthetic construct
MPAAKRVKLDGGDKKYSIGLDIGTNSVGWAVITDEYKVPSKKFKVLGNTDRHSIKKNLIGALLFDSGETAEATRLKRTARRRYTRRKNRICYLQEIFSNEMAKVDDSFFHRLEESFLVEEDKKHERHPIFGNIVDEVAYHEKYPTIYHLRKKLVDSTDKADLRLIYLALAHMIKFRGHFLIEGDLNPDNSDVDKLFIQLVQTYNQLFEENPINASGVDAKAILSARLSKSRRLENLIAQLPGEKKNGLFGNLIALSLGLTPNFKSNFDLAEDAKLQLSKDTYDDDLDNLLAQIGDQYADLFLAAKNLSDAILLSDILRVNTEITKAPLSASMIKRYDEHHQDLTLLKALVRQQLPEKYKEIFFDQSKNGYAGYIDGGASQEEFYKFIKPILEKMDGTEELLVKLNREDLLRKQRTFDNGSIPHQIHLGELHAILRRQEDFYPFLKDNREKIEKILTFRIPYYVGPLARGNSRFAWMTRKSEETITPWNFEEVVDKGASAQSFIERMTNFDKNLPNEKVLPKHSLLYEYFTVYNELTKVKYVTEGMRKPAFLSGEQKKAIVDLLFKTNRKVTVKQLKEDYFKKIECFDSVEISGVEDRFNASLGTYHDLLKIIKDKDFLDNEENEDILEDIVLTLTLFEDREMIEERLKTYAHLFDDKVMKQLKRRRYTGWGRLSRKLINGIRDKQSGKTILDFLKSDGFANRNFMQLIHDDSLTFKEDIQKAQVSGQGDSLHEHIANLAGSPAIKKGILQTVKVVDELVKVMGRHKPENIVIEMARENQTTQKGQKNSRERMKRIEEGIKELGSQILKEHPVENTQLQNEKLYLYYLQNGRDMYVDQELDINRLSDYDVDHIVPQSFLKDDSIDNKVLTRSDKARGKSDNVPSEEVVKKMKNYWRQLLNAKLITQRKFDNLTKAERGGLSELDKAGFIKRQLVETRQITKHVAQILDSRMNTKYDENDKLIREVKVITLKSKLVSDFRKDFQFYKVREINNYHHAHDAYLNAVVGTALIKKYPKLESEFVYGDYKVYDVRKMIAKSEQEIGKATAKYFFYSNIMNFFKTEITLANGEIRKRPLIETNGETGEIVWDKGRDFATVRKVLSMPQVNIVKKTEVQTGGFSKESILPKRNSDKLIARKKDWDPKKYGGFDSPTVAYSVLVVAKVEKGKSKKLKSVKELLGITIMERSSFEKNPIDFLEAKGYKEVKKDLIIKLPKYSLFELENGRKRMLASAGELQKGNELALPSKYVNFLYLASHYEKLKGSPEDNEQKQLFVEQHKHYLDEIIEQISEFSKRVILADANLDKVLSAYNKHRDKPIREQAENIIHLFTLTNLGAPAAFKYFDTTIDRKRYTSTKEVLDATLIHQSITGLYETRIDLSQLGGDGGGSSGSSGSSGSSGSSGSSGGWVQEISDSRPMLHIYLNGRRFLGLLNTGADKTCIAGRDWPANWPIHQTESSLQGLGMACGVARSSQPLRWQHEDKSGIIHPFVIPTLPFTLWGRDIMKDIKVRLMTDSPDDSQDLMIGAIESNLFADQISWKSDQPVWLNQWPLKQEKLQALQQLVTEQLQLGHLEESNSPWNTPVFVIKKKSGKWRLLQDLRAVNATMHDMGALQPGLPSPVAVPKGWEIIIIDLQDCFFNIKLHPEDCKRFAFSVPSPNFKRPYQRFQWKVLPQGMKNSPTLCQKFVDKAILTVRDKYQDSYIVHYMDDILLAHPSRSIVDEILTSMIQALNKHGLVVSTEKIQKYDNLKYLGTHIQGDSVSYQKLQIRTDKLRTLNDFQKLLGNINWIRPFLKLTTGELKPLFEILNGDSNPISTRKLTPEACKALQLMNERLSTARVKRLDLSQPWSLCILKTEYTPTACLWQDGVVEWIHLPHISPKVITPYDIFCTQLIIKGRHRSKELFSKDPDYIVVPYTKVQFDLLLQEKEDWPISLLGFLGEVHFHLPKDPLLTFTLQTAIIFPHMTSTTPLEKGIVIFTDGSANGRSVTYIQGREPIIKENTQNTAQQAEIVAVITAFEEVSQPFNLYTDSKYVTGLFPEIETATLSPRTKIYTELKHLQRLIHKRQEKFYIGHIRGHTGLPGPLAQGNAYADSLTRILTAGKRTADGSEFEKRTADGSEFESPKKKAKVE

SEQ ID NO: 3283 - protein, 2116 aa, synthetic construct
MPAAKRVKLDGGDKKYSIGLDIGTNSVGWAVITDEYKVPSKKFKVLGNTDRHSIKKNLIGALLFDSGETAEATRLKRTARRRYTRRKNRICYLQEIFSNEMAKVDDSFFHRLEESFLVEEDKKHERHPIFGNIVDEVAYHEKYPTIYHLRKKLVDSTDKADLRLIYLALAHMIKFRGHFLIEGDLNPDNSDVDKLFIQLVQTYNQLFEENPINASGVDAKAILSARLSKSRRLENLIAQLPGEKKNGLFGNLIALSLGLTPNFKSNFDLAEDAKLQLSKDTYDDDLDNLLAQIGDQYADLFLAAKNLSDAILLSDILRVNTEITKAPLSASMIKRYDEHHQDLTLLKALVRQQLPEKYKEIFFDQSKNGYAGYIDGGASQEEFYKFIKPILEKMDGTEELLVKLNREDLLRKQRTFDNGSIPHQIHLGELHAILRRQEDFYPFLKDNREKIEKILTFRIPYYVGPLARGNSRFAWMTRKSEETITPWNFEEVVDKGASAQSFIERMTNFDKNLPNEKVLPKHSLLYEYFTVYNELTKVKYVTEGMRKPAFLSGEQKKAIVDLLFKTNRKVTVKQLKEDYFKKIECFDSVEISGVEDRFNASLGTYHDLLKIIKDKDFLDNEENEDILEDIVLTLTLFEDREMIEERLKTYAHLFDDKVMKQLKRRRYTGWGRLSRKLINGIRDKQSGKTILDFLKSDGFANRNFMQLIHDDSLTFKEDIQKAQVSGQGDSLHEHIANLAGSPAIKKGILQTVKVVDELVKVMGRHKPENIVIEMARENQTTQKGQKNSRERMKRIEEGIKELGSQILKEHPVENTQLQNEKLYLYYLQNGRDMYVDQELDINRLSDYDVDHIVPQSFLKDDSIDNKVLTRSDKARGKSDNVPSEEVVKKMKNYWRQLLNAKLITQRKFDNLTKAERGGLSELDKAGFIKRQLVETRQITKHVAQILDSRMNTKYDENDKLIREVKVITLKSKLVSDFRKDFQFYKVREINNYHHAHDAYLNAVVGTALIKKYPKLESEFVYGDYKVYDVRKMIAKSEQEIGKATAKYFFYSNIMNFFKTEITLANGEIRKRPLIETNGETGEIVWDKGRDFATVRKVLSMPQVNIVKKTEVQTGGFSKESILPKRNSDKLIARKKDWDPKKYGGFDSPTVAYSVLVVAKVEKGKSKKLKSVKELLGITIMERSSFEKNPIDFLEAKGYKEVKKDLIIKLPKYSLFELENGRKRMLASAGELQKGNELALPSKYVNFLYLASHYEKLKGSPEDNEQKQLFVEQHKHYLDEIIEQISEFSKRVILADANLDKVLSAYNKHRDKPIREQAENIIHLFTLTNLGAPAAFKYFDTTIDRKRYTSTKEVLDATLIHQSITGLYETRIDLSQLGGDGGEAAAKGGGGSSGGWVQEISDSRPMLHIYLNGRRFLGLLNTGADKTCIAGRDWPANWPIHQTESSLQGLGMACGVARSSQPLRWQHEDKSGIIHPFVIPTLPFTLWGRDIMKDIKVRLMTDSPDDSQDLMIGAIESNLFADQISWKSDQPVWLNQWPLKQEKLQALQQLVTEQLQLGHLEESNSPWNTPVFVIKKKSGKWRLLQDLRAVNATMHDMGALQPGLPSPVAVPKGWEIIIIDLQDCFFNIKLHPEDCKRFAFSVPSPNFKRPYQRFQWKVLPQGMKNSPTLCQKFVDKAILTVRDKYQDSYIVHYMDDILLAHPSRSIVDEILTSMIQALNKHGLVVSTEKIQKYDNLKYLGTHIQGDSVSYQKLQIRTDKLRTLNDFQKLLGNINWIRPFLKLTTGELKPLFEILNGDSNPISTRKLTPEACKALQLMNERLSTARVKRLDLSQPWSLCILKTEYTPTACLWQDGVVEWIHLPHISPKVITPYDIFCTQLIIKGRHRSKELFSKDPDYIVVPYTKVQFDLLLQEKEDWPISLLGFLGEVHFHLPKDPLLTFTLQTAIIFPHMTSTTPLEKGIVIFTDGSANGRSVTYIQGREPIIKENTQNTAQQAEIVAVITAFEEVSQPFNLYTDSKYVTGLFPEIETATLSPRTKIYTELKHLQRLIHKRQEKFYIGHIRGHTGLPGPLAQGNAYADSLTRILTAGKRTADGSEFEKRTADGSEFESPKKKAKVE

SEQ ID NO: 3284 - protein, 2116 aa, synthetic construct
MPAAKRVKLDGGDKKYSIGLDIGTNSVGWAVITDEYKVPSKKFKVLGNTDRHSIKKNLIGALLFDSGETAEATRLKRTARRRYTRRKNRICYLQEIFSNEMAKVDDSFFHRLEESFLVEEDKKHERHPIFGNIVDEVAYHEKYPTIYHLRKKLVDSTDKADLRLIYLALAHMIKFRGHFLIEGDLNPDNSDVDKLFIQLVQTYNQLFEENPINASGVDAKAILSARLSKSRRLENLIAQLPGEKKNGLFGNLIALSLGLTPNFKSNFDLAEDAKLQLSKDTYDDDLDNLLAQIGDQYADLFLAAKNLSDAILLSDILRVNTEITKAPLSASMIKRYDEHHQDLTLLKALVRQQLPEKYKEIFFDQSKNGYAGYIDGGASQEEFYKFIKPILEKMDGTEELLVKLNREDLLRKQRTFDNGSIPHQIHLGELHAILRRQEDFYPFLKDNREKIEKILTFRIPYYVGPLARGNSRFAWMTRKSEETITPWNFEEVVDKGASAQSFIERMTNFDKNLPNEKVLPKHSLLYEYFTVYNELTKVKYVTEGMRKPAFLSGEQKKAIVDLLFKTNRKVTVKQLKEDYFKKIECFDSVEISGVEDRFNASLGTYHDLLKIIKDKDFLDNEENEDILEDIVLTLTLFEDREMIEERLKTYAHLFDDKVMKQLKRRRYTGWGRLSRKLINGIRDKQSGKTILDFLKSDGFANRNFMQLIHDDSLTFKEDIQKAQVSGQGDSLHEHIANLAGSPAIKKGILQTVKVVDELVKVMGRHKPENIVIEMARENQTTQKGQKNSRERMKRIEEGIKELGSQILKEHPVENTQLQNEKLYLYYLQNGRDMYVDQELDINRLSDYDVDHIVPQSFLKDDSIDNKVLTRSDKARGKSDNVPSEEVVKKMKNYWRQLLNAKLITQRKFDNLTKAERGGLSELDKAGFIKRQLVETRQITKHVAQILDSRMNTKYDENDKLIREVKVITLKSKLVSDFRKDFQFYKVREINNYHHAHDAYLNAVVGTALIKKYPKLESEFVYGDYKVYDVRKMIAKSEQEIGKATAKYFFYSNIMNFFKTEITLANGEIRKRPLIETNGETGEIVWDKGRDFATVRKVLSMPQVNIVKKTEVQTGGFSKESILPKRNSDKLIARKKDWDPKKYGGFDSPTVAYSVLVVAKVEKGKSKKLKSVKELLGITIMERSSFEKNPIDFLEAKGYKEVKKDLIIKLPKYSLFELENGRKRMLASAGELQKGNELALPSKYVNFLYLASHYEKLKGSPEDNEQKQLFVEQHKHYLDEIIEQISEFSKRVILADANLDKVLSAYNKHRDKPIREQAENIIHLFTLTNLGAPAAFKYFDTTIDRKRYTSTKEVLDATLIHQSITGLYETRIDLSQLGGDGGEAAAKGGGGGSGGWVQEISDSRPMLHIYLNGRRFLGLLNTGADKTCIAGRDWPANWPIHQTESSLQGLGMACGVARSSQPLRWQHEDKSGIIHPFVIPTLPFTLWGRDIMKDIKVRLMTDSPDDSQDLMIGAIESNLFADQISWKSDQPVWLNQWPLKQEKLQALQQLVTEQLQLGHLEESNSPWNTPVFVIKKKSGKWRLLQDLRAVNATMHDMGALQPGLPSPVAVPKGWEIIIIDLQDCFFNIKLHPEDCKRFAFSVPSPNFKRPYQRFQWKVLPQGMKNSPTLCQKFVDKAILTVRDKYQDSYIVHYMDDILLAHPSRSIVDEILTSMIQALNKHGLVVSTEKIQKYDNLKYLGTHIQGDSVSYQKLQIRTDKLRTLNDFQKLLGNINWIRPFLKLTTGELKPLFEILNGDSNPISTRKLTPEACKALQLMNERLSTARVKRLDLSQPWSLCILKTEYTPTACLWQDGVVEWIHLPHISPKVITPYDIFCTQLIIKGRHRSKELFSKDPDYIVVPYTKVQFDLLLQEKEDWPISLLGFLGEVHFHLPKDPLLTFTLQTAIIFPHMTSTTPLEKGIVIFTDGSANGRSVTYIQGREPIIKENTQNTAQQAEIVAVITAFEEVSQPFNLYTDSKYVTGLFPEIETATLSPRTKIYTELKHLQRLIHKRQEKFYIGHIRGHTGLPGPLAQGNAYADSLTRILTAGKRTADGSEFEKRTADGSEFESPKKKAKVE

SEQ ID NO: 3285 - protein, 2116 aa, synthetic construct
MPAAKRVKLDGGDKKYSIGLDIGTNSVGWAVITDEYKVPSKKFKVLGNTDRHSIKKNLIGALLFDSGETAEATRLKRTARRRYTRRKNRICYLQEIFSNEMAKVDDSFFHRLEESFLVEEDKKHERHPIFGNIVDEVAYHEKYPTIYHLRKKLVDSTDKADLRLIYLALAHMIKFRGHFLIEGDLNPDNSDVDKLFIQLVQTYNQLFEENPINASGVDAKAILSARLSKSRRLENLIAQLPGEKKNGLFGNLIALSLGLTPNFKSNFDLAEDAKLQLSKDTYDDDLDNLLAQIGDQYADLFLAAKNLSDAILLSDILRVNTEITKAPLSASMIKRYDEHHQDLTLLKALVRQQLPEKYKEIFFDQSKNGYAGYIDGGASQEEFYKFIKPILEKMDGTEELLVKLNREDLLRKQRTFDNGSIPHQIHLGELHAILRRQEDFYPFLKDNREKIEKILTFRIPYYVGPLARGNSRFAWMTRKSEETITPWNFEEVVDKGASAQSFIERMTNFDKNLPNEKVLPKHSLLYEYFTVYNELTKVKYVTEGMRKPAFLSGEQKKAIVDLLFKTNRKVTVKQLKEDYFKKIECFDSVEISGVEDRFNASLGTYHDLLKIIKDKDFLDNEENEDILEDIVLTLTLFEDREMIEERLKTYAHLFDDKVMKQLKRRRYTGWGRLSRKLINGIRDKQSGKTILDFLKSDGFANRNFMQLIHDDSLTFKEDIQKAQVSGQGDSLHEHIANLAGSPAIKKGILQTVKVVDELVKVMGRHKPENIVIEMARENQTTQKGQKNSRERMKRIEEGIKELGSQILKEHPVENTQLQNEKLYLYYLQNGRDMYVDQELDINRLSDYDVDHIVPQSFLKDDSIDNKVLTRSDKARGKSDNVPSEEVVKKMKNYWRQLLNAKLITQRKFDNLTKAERGGLSELDKAGFIKRQLVETRQITKHVAQILDSRMNTKYDENDKLIREVKVITLKSKLVSDFRKDFQFYKVREINNYHHAHDAYLNAVVGTALIKKYPKLESEFVYGDYKVYDVRKMIAKSEQEIGKATAKYFFYSNIMNFFKTEITLANGEIRKRPLIETNGETGEIVWDKGRDFATVRKVLSMPQVNIVKKTEVQTGGFSKESILPKRNSDKLIARKKDWDPKKYGGFDSPTVAYSVLVVAKVEKGKSKKLKSVKELLGITIMERSSFEKNPIDFLEAKGYKEVKKDLIIKLPKYSLFELENGRKRMLASAGELQKGNELALPSKYVNFLYLASHYEKLKGSPEDNEQKQLFVEQHKHYLDEIIEQISEFSKRVILADANLDKVLSAYNKHRDKPIREQAENIIHLFTLTNLGAPAAFKYFDTTIDRKRYTSTKEVLDATLIHQSITGLYETRIDLSQLGGDGGGGGGSSEAAAKGGWVQEISDSRPMLHIYLNGRRFLGLLNTGADKTCIAGRDWPANWPIHQTESSLQGLGMACGVARSSQPLRWQHEDKSGIIHPFVIPTLPFTLWGRDIMKDIKVRLMTDSPDDSQDLMIGAIESNLFADQISWKSDQPVWLNQWPLKQEKLQALQQLVTEQLQLGHLEESNSPWNTPVFVIKKKSGKWRLLQDLRAVNATMHDMGALQPGLPSPVAVPKGWEIIIIDLQDCFFNIKLHPEDCKRFAFSVPSPNFKRPYQRFQWKVLPQGMKNSPTLCQKFVDKAILTVRDKYQDSYIVHYMDDILLAHPSRSIVDEILTSMIQALNKHGLVVSTEKIQKYDNLKYLGTHIQGDSVSYQKLQIRTDKLRTLNDFQKLLGNINWIRPFLKLTTGELKPLFEILNGDSNPISTRKLTPEACKALQLMNERLSTARVKRLDLSQPWSLCILKTEYTPTACLWQDGVVEWIHLPHISPKVITPYDIFCTQLIIKGRHRSKELFSKDPDYIVVPYTKVQFDLLLQEKEDWPISLLGFLGEVHFHLPKDPLLTFTLQTAIIFPHMTSTTPLEKGIVIFTDGSANGRSVTYIQGREPIIKENTQNTAQQAEIVAVITAFEEVSQPFNLYTDSKYVTGLFPEIETATLSPRTKIYTELKHLQRLIHKRQEKFYIGHIRGHTGLPGPLAQGNAYADSLTRILTAGKRTADGSEFEKRTADGSEFESPKKKAKVE

SEQ ID NO: 3286 - protein, 2116 aa, synthetic construct
MPAAKRVKLDGGDKKYSIGLDIGTNSVGWAVITDEYKVPSKKFKVLGNTDRHSIKKNLIGALLFDSGETAEATRLKRTARRRYTRRKNRICYLQEIFSNEMAKVDDSFFHRLEESFLVEEDKKHERHPIFGNIVDEVAYHEKYPTIYHLRKKLVDSTDKADLRLIYLALAHMIKFRGHFLIEGDLNPDNSDVDKLFIQLVQTYNQLFEENPINASGVDAKAILSARLSKSRRLENLIAQLPGEKKNGLFGNLIALSLGLTPNFKSNFDLAEDAKLQLSKDTYDDDLDNLLAQIGDQYADLFLAAKNLSDAILLSDILRVNTEITKAPLSASMIKRYDEHHQDLTLLKALVRQQLPEKYKEIFFDQSKNGYAGYIDGGASQEEFYKFIKPILEKMDGTEELLVKLNREDLLRKQRTFDNGSIPHQIHLGELHAILRRQEDFYPFLKDNREKIEKILTFRIPYYVGPLARGNSRFAWMTRKSEETITPWNFEEVVDKGASAQSFIERMTNFDKNLPNEKVLPKHSLLYEYFTVYNELTKVKYVTEGMRKPAFLSGEQKKAIVDLLFKTNRKVTVKQLKEDYFKKIECFDSVEISGVEDRFNASLGTYHDLLKIIKDKDFLDNEENEDILEDIVLTLTLFEDREMIEERLKTYAHLFDDKVMKQLKRRRYTGWGRLSRKLINGIRDKQSGKTILDFLKSDGFANRNFMQLIHDDSLTFKEDIQKAQVSGQGDSLHEHIANLAGSPAIKKGILQTVKVVDELVKVMGRHKPENIVIEMARENQTTQKGQKNSRERMKRIEEGIKELGSQILKEHPVENTQLQNEKLYLYYLQNGRDMYVDQELDINRLSDYDVDHIVPQSFLKDDSIDNKVLTRSDKARGKSDNVPSEEVVKKMKNYWRQLLNAKLITQRKFDNLTKAERGGLSELDKAGFIKRQLVETRQITKHVAQILDSRMNTKYDENDKLIREVKVITLKSKLVSDFRKDFQFYKVREINNYHHAHDAYLNAVVGTALIKKYPKLESEFVYGDYKVYDVRKMIAKSEQEIGKATAKYFFYSNIMNFFKTEITLANGEIRKRPLIETNGETGEIVWDKGRDFATVRKVLSMPQVNIVKKTEVQTGGFSKESILPKRNSDKLIARKKDWDPKKYGGFDSPTVAYSVLVVAKVEKGKSKKLKSVKELLGITIMERSSFEKNPIDFLEAKGYKEVKKDLIIKLPKYSLFELENGRKRMLASAGELQKGNELALPSKYVNFLYLASHYEKLKGSPEDNEQKQLFVEQHKHYLDEIIEQISEFSKRVILADANLDKVLSAYNKHRDKPIREQAENIIHLFTLTNLGAPAAFKYFDTTIDRKRYTSTKEVLDATLIHQSITGLYETRIDLSQLGGDGGGGSGGGEAAAKGGWVQEISDSRPMLHIYLNGRRFLGLLNTGADKTCIAGRDWPANWPIHQTESSLQGLGMACGVARSSQPLRWQHEDKSGIIHPFVIPTLPFTLWGRDIMKDIKVRLMTDSPDDSQDLMIGAIESNLFADQISWKSDQPVWLNQWPLKQEKLQALQQLVTEQLQLGHLEESNSPWNTPVFVIKKKSGKWRLLQDLRAVNATMHDMGALQPGLPSPVAVPKGWEIIIIDLQDCFFNIKLHPEDCKRFAFSVPSPNFKRPYQRFQWKVLPQGMKNSPTLCQKFVDKAILTVRDKYQDSYIVHYMDDILLAHPSRSIVDEILTSMIQALNKHGLVVSTEKIQKYDNLKYLGTHIQGDSVSYQKLQIRTDKLRTLNDFQKLLGNINWIRPFLKLTTGELKPLFEILNGDSNPISTRKLTPEACKALQLMNERLSTARVKRLDLSQPWSLCILKTEYTPTACLWQDGVVEWIHLPHISPKVITPYDIFCTQLIIKGRHRSKELFSKDPDYIVVPYTKVQFDLLLQEKEDWPISLLGFLGEVHFHLPKDPLLTFTLQTAIIFPHMTSTTPLEKGIVIFTDGSANGRSVTYIQGREPIIKENTQNTAQQAEIVAVITAFEEVSQPFNLYTDSKYVTGLFPEIETATLSPRTKIYTELKHLQRLIHKRQEKFYIGHIRGHTGLPGPLAQGNAYADSLTRILTAGKRTADGSEFEKRTADGSEFESPKKKAKVE

SEQ ID NO: 3287 - protein, 2114 aa, synthetic construct; identical to SEQ ID NO: 3179

SEQ ID NO: 3288 - protein, 2116 aa, synthetic construct
MPAAKRVKLDGGDKKYSIGLDIGTNSVGWAVITDEYKVPSKKFKVLGNTDRHSIKKNLIGALLFDSGETAEATRLKRTARRRYTRRKNRICYLQEIFSNEMAKVDDSFFHRLEESFLVEEDKKHERHPIFGNIVDEVAYHEKYPTIYHLRKKLVDSTDKADLRLIYLALAHMIKFRGHFLIEGDLNPDNSDVDKLFIQLVQTYNQLFEENPINASGVDAKAILSARLSKSRRLENLIAQLPGEKKNGLFGNLIALSLGLTPNFKSNFDLAEDAKLQLSKDTYDDDLDNLLAQIGDQYADLFLAAKNLSDAILLSDILRVNTEITKAPLSASMIKRYDEHHQDLTLLKALVRQQLPEKYKEIFFDQSKNGYAGYIDGGASQEEFYKFIKPILEKMDGTEELLVKLNREDLLRKQRTFDNGSIPHQIHLGELHAILRRQEDFYPFLKDNREKIEKILTFRIPYYVGPLARGNSRFAWMTRKSEETITPWNFEEVVDKGASAQSFIERMTNFDKNLPNEKVLPKHSLLYEYFTVYNELTKVKYVTEGMRKPAFLSGEQKKAIVDLLFKTNRKVTVKQLKEDYFKKIECFDSVEISGVEDRFNASLGTYHDLLKIIKDKDFLDNEENEDILEDIVLTLTLFEDREMIEERLKTYAHLFDDKVMKQLKRRRYTGWGRLSRKLINGIRDKQSGKTILDFLKSDGFANRNFMQLIHDDSLTFKEDIQKAQVSGQGDSLHEHIANLAGSPAIKKGILQTVKVVDELVKVMGRHKPENIVIEMARENQTTQKGQKNSRERMKRIEEGIKELGSQILKEHPVENTQLQNEKLYLYYLQNGRDMYVDQELDINRLSDYDVDHIVPQSFLKDDSIDNKVLTRSDKARGKSDNVPSEEVVKKMKNYWRQLLNAKLITQRKFDNLTKAERGGLSELDKAGFIKRQLVETRQITKHVAQILDSRMNTKYDENDKLIREVKVITLKSKLVSDFRKDFQFYKVREINNYHHAHDAYLNAVVGTALIKKYPKLESEFVYGDYKVYDVRKMIAKSEQEIGKATAKYFFYSNIMNFFKTEITLANGEIRKRPLIETNGETGEIVWDKGRDFATVRKVLSMPQVNIVKKTEVQTGGFSKESILPKRNSDKLIARKKDWDPKKYGGFDSPTVAYSVLVVAKVEKGKSKKLKSVKELLGITIMERSSFEKNPIDFLEAKGYKEVKKDLIIKLPKYSLFELENGRKRMLASAGELQKGNELALPSKYVNFLYLASHYEKLKGSPEDNEQKQLFVEQHKHYLDEIIEQISEFSKRVILADANLDKVLSAYNKHRDKPIREQAENIIHLFTLTNLGAPAAFKYFDTTIDRKRYTSTKEVLDATLIHQSITGLYETRIDLSQLGGDGGPAPEAAAKGGSGGWVQEISDSRPMLHIYLNGRRFLGLLNTGADKTCIAGRDWPANWPIHQTESSLQGLGMACGVARSSQPLRWQHEDKSGIIHPFVIPTLPFTLWGRDIMKDIKVRLMTDSPDDSQDLMIGAIESNLFADQISWKSDQPVWLNQWPLKQEKLQALQQLVTEQLQLGHLEESNSPWNTPVFVIKKKSGKWRLLQDLRAVNATMHDMGALQPGLPSPVAVPKGWEIIIIDLQDCFFNIKLHPEDCKRFAFSVPSPNFKRPYQRFQWKVLPQGMKNSPTLCQKFVDKAILTVRDKYQDSYIVHYMDDILLAHPSRSIVDEILTSMIQALNKHGLVVSTEKIQKYDNLKYLGTHIQGDSVSYQKLQIRTDKLRTLNDFQKLLGNINWIRPFLKLTTGELKPLFEILNGDSNPISTRKLTPEACKALQLMNERLSTARVKRLDLSQPWSLCILKTEYTPTACLWQDGVVEWIHLPHISPKVITPYDIFCTQLIIKGRHRSKELFSKDPDYIVVPYTKVQFDLLLQEKEDWPISLLGFLGEVHFHLPKDPLLTFTLQTAIIFPHMTSTTPLEKGIVIFTDGSANGRSVTYIQGREPIIKENTQNTAQQAEIVAVITAFEEVSQPFNLYTDSKYVTGLFPEIETATLSPRTKIYTELKHLQRLIHKRQEKFYIGHIRGHTGLPGPLAQGNAYADSLTRILTAGKRTADGSEFEKRTADGSEFESPKKKAKVE

SEQ ID NO: 3289 - protein, 2116 aa, synthetic construct; identical to SEQ ID NO: 3178

SEQ ID NO: 3290 - protein, 2116 aa, synthetic construct
MPAAKRVKLDGGDKKYSIGLDIGTNSVGWAVITDEYKVPSKKFKVLGNTDRHSIKKNLIGALLFDSGETAEATRLKRTARRRYTRRKNRICYLQEIFSNEMAKVDDSFFHRLEESFLVEEDKKHERHPIFGNIVDEVAYHEKYPTIYHLRKKLVDSTDKADLRLIYLALAHMIKFRGHFLIEGDLNPDNSDVDKLFIQLVQTYNQLFEENPINASGVDAKAILSARLSKSRRLENLIAQLPGEKKNGLFGNLIALSLGLTPNFKSNFDLAEDAKLQLSKDTYDDDLDNLLAQIGDQYADLFLAAKNLSDAILLSDILRVNTEITKAPLSASMIKRYDEHHQDLTLLKALVRQQLPEKYKEIFFDQSKNGYAGYIDGGASQEEFYKFIKPILEKMDGTEELLVKLNREDLLRKQRTFDNGSIPHQIHLGELHAILRRQEDFYPFLKDNREKIEKILTFRIPYYVGPLARGNSRFAWMTRKSEETITPWNFEEVVDKGASAQSFIERMTNFDKNLPNEKVLPKHSLLYEYFTVYNELTKVKYVTEGMRKPAFLSGEQKKAIVDLLFKTNRKVTVKQLKEDYFKKIECFDSVEISGVEDRFNASLGTYHDLLKIIKDKDFLDNEENEDILEDIVLTLTLFEDREMIEERLKTYAHLFDDKVMKQLKRRRYTGWGRLSRKLINGIRDKQSGKTILDFLKSDGFANRNFMQLIHDDSLTFKEDIQKAQVSGQGDSLHEHIANLAGSPAIKKGILQTVKVVDELVKVMGRHKPENIVIEMARENQTTQKGQKNSRERMKRIEEGIKELGSQILKEHPVENTQLQNEKLYLYYLQNGRDMYVDQELDINRLSDYDVDHIVPQSFLKDDSIDNKVLTRSDKARGKSDNVPSEEVVKKMKNYWRQLLNAKLITQRKFDNLTKAERGGLSELDKAGFIKRQLVETRQITKHVAQILDSRMNTKYDENDKLIREVKVITLKSKLVSDFRKDFQFYKVREINNYHHAHDAYLNAVVGTALIKKYPKLESEFVYGDYKVYDVRKMIAKSEQEIGKATAKYFFYSNIMNFFKTEITLANGEIRKRPLIETNGETGEIVWDKGRDFATVRKVLSMPQVNIVKKTEVQTGGFSKESILPKRNSDKLIARKKDWDPKKYGGFDSPTVAYSVLVVAKVEKGKSKKLKSVKELLGITIMERSSFEKNPIDFLEAKGYKEVKKDLIIKLPKYSLFELENGRKRMLASAGELQKGNELALPSKYVNFLYLASHYEKLKGSPEDNEQKQLFVEQHKHYLDEIIEQISEFSKRVILADANLDKVLSAYNKHRDKPIREQAENIIHLFTLTNLGAPAAFKYFDTTIDRKRYTSTKEVLDATLIHQSITGLYETRIDLSQLGGDGGPAPGGSEAAAKGGWVQEISDSRPMLHIYLNGRRFLGLLNTGADKTCIAGRDWPANWPIHQTESSLQGLGMACGVARSSQPLRWQHEDKSGIIHPFVIPTLPFTLWGRDIMKDIKVRLMTDSPDDSQDLMIGAIESNLFADQISWKSDQPVWLNQWPLKQEKLQALQQLVTEQLQLGHLEESNSPWNTPVFVIKKKSGKWRLLQDLRAVNATMHDMGALQPGLPSPVAVPKGWEIIIIDLQDCFFNIKLHPEDCKRFAFSVPSPNFKRPYQRFQWKVLPQGMKNSPTLCQKFVDKAILTVRDKYQDSYIVHYMDDILLAHPSRSIVDEILTSMIQALNKHGLVVSTEKIQKYDNLKYLGTHIQGDSVSYQKLQIRTDKLRTLNDFQKLLGNINWIRPFLKLTTGELKPLFEILNGDSNPISTRKLTPEACKALQLMNERLSTARVKRLDLSQPWSLCILKTEYTPTACLWQDGVVEWIHLPHISPKVITPYDIFCTQLIIKGRHRSKELFSKDPDYIVVPYTKVQFDLLLQEKEDWPISLLGFLGEVHFHLPKDPLLTFTLQTAIIFPHMTSTTPLEKGIVIFTDGSANGRSVTYIQGREPIIKENTQNTAQQAEIVAVITAFEEVSQPFNLYTDSKYVTGLFPEIETATLSPRTKIYTELKHLQRLIHKRQEKFYIGHIRGHTGLPGPLAQGNAYADSLTRILTAGKRTADGSEFEKRTADGSEFESPKKKAKVE

SEQ ID NO: 3291 - protein, 2116 aa, synthetic construct
MPAAKRVKLDGGDKKYSIGLDIGTNSVGWAVITDEYKVPSKKFKVLGNTDRHSIKKNLIGALLFDSGETAEATRLKRTARRRYTRRKNRICYLQEIFSNEMAKVDDSFFHRLEESFLVEEDKKHERHPIFGNIVDEVAYHEKYPTIYHLRKKLVDSTDKADLRLIYLALAHMIKFRGHFLIEGDLNPDNSDVDKLFIQLVQTYNQLFEENPINASGVDAKAILSARLSKSRRLENLIAQLPGEKKNGLFGNLIALSLGLTPNFKSNFDLAEDAKLQLSKDTYDDDLDNLLAQIGDQYADLFLAAKNLSDAILLSDILRVNTEITKAPLSASMIKRYDEHHQDLTLLKALVRQQLPEKYKEIFFDQSKNGYAGYIDGGASQEEFYKFIKPILEKMDGTEELLVKLNREDLLRKQRTFDNGSIPHQIHLGELHAILRRQEDFYPFLKDNREKIEKILTFRIPYYVGPLARGNSRFAWMTRKSEETITPWNFEEVVDKGASAQSFIERMTNFDKNLPNEKVLPKHSLLYEYFTVYNELTKVKYVTEGMRKPAFLSGEQKKAIVDLLFKTNRKVTVKQLKEDYFKKIECFDSVEISGVEDRFNASLGTYHDLLKIIKDKDFLDNEENEDILEDIVLTLTLFEDREMIEERLKTYAHLFDDKVMKQLKRRRYTGWGRLSRKLINGIRDKQSGKTILDFLKSDGFANRNFMQLIHDDSLTFKEDIQKAQVSGQGDSLHEHIANLAGSPAIKKGILQTVKVVDELVKVMGRHKPENIVIEMARENQTTQKGQKNSRERMKRIEEGIKELGSQILKEHPVENTQLQNEKLYLYYLQNGRDMYVDQELDINRLSDYDVDHIVPQSFLKDDSIDNKVLTRSDKARGKSDNVPSEEVVKKMKNYWRQLLNAKLITQRKFDNLTKAERGGLSELDKAGFIKRQLVETRQITKHVAQILDSRMNTKYDENDKLIREVKVITLKSKLVSDFRKDFQFYKVREINNYHHAHDAYLNAVVGTALIKKYPKLESEFVYGDYKVYDVRKMIAKSEQEIGKATAKYFFYSNIMNFFKTEITLANGEIRKRPLIETNGETGEIVWDKGRDFATVRKVLSMPQVNIVKKTEVQTGGFSKESILPKRNSDKLIARKKDWDPKKYGGFDSPTVAYSVLVVAKVEKGKSKKLKSVKELLGITIMERSSFEKNPIDFLEAKGYKEVKKDLIIKLPKYSLFELENGRKRMLASAGELQKGNELALPSKYVNFLYLASHYEKLKGSPEDNEQKQLFVEQHKHYLDEIIEQISEFSKRVILADANLDKVLSAYNKHRDKPIREQAENIIHLFTLTNLGAPAAFKYFDTTIDRKRYTSTKEVLDATLIHQSITGLYETRIDLSQLGGDGGGGSEAAAKGGGGGWVQEISDSRPMLHIYLNGRRFLGLLNTGADKTCIAGRDWPANWPIHQTESSLQGLGMACGVARSSQPLRWQHEDKSGIIHPFVIPTLPFTLWGRDIMKDIKVRLMTDSPDDSQDLMIGAIESNLFADQISWKSDQPVWLNQWPLKQEKLQALQQLVTEQLQLGHLEESNSPWNTPVFVIKKKSGKWRLLQDLRAVNATMHDMGALQPGLPSPVAVPKGWEIIIIDLQDCFFNIKLHPEDCKRFAFSVPSPNFKRPYQRFQWKVLPQGMKNSPTLCQKFVDKAILTVRDKYQDSYIVHYMDDILLAHPSRSIVDEILTSMIQALNKHGLVVSTEKIQKYDNLKYLGTHIQGDSVSYQKLQIRTDKLRTLNDFQKLLGNINWIRPFLKLTTGELKPLFEILNGDSNPISTRKLTPEACKALQLMNERLSTARVKRLDLSQPWSLCILKTEYTPTACLWQDGVVEWIHLPHISPKVITPYDIFCTQLIIKGRHRSKELFSKDPDYIVVPYTKVQFDLLLQEKEDWPISLLGFLGEVHFHLPKDPLLTFTLQTAIIFPHMTSTTPLEKGIVIFTDGSANGRSVTYIQGREPIIKENTQNTAQQAEIVAVITAFEEVSQPFNLYTDSKYVTGLFPEIETATLSPRTKIYTELKHLQRLIHKRQEKFYIGHIRGHTGLPGPLAQGNAYADSLTRILTAGKRTADGSEFEKRTADGSEFESPKKKAKVE

SEQ ID NO: 3292 - protein, 2114 aa, synthetic construct
MPAAKRVKLDGGDKKYSIGLDIGTNSVGWAVITDEYKVPSKKFKVLGNTDRHSIKKNLIGALLFDSGETAEATRLKRTARRRYTRRKNRICYLQEIFSNEMAKVDDSFFHRLEESFLVEEDKKHERHPIFGNIVDEVAYHEKYPTIYHLRKKLVDSTDKADLRLIYLALAHMIKFRGHFLIEGDLNPDNSDVDKLFIQLVQTYNQLFEENPINASGVDAKAILSARLSKSRRLENLIAQLPGEKKNGLFGNLIALSLGLTPNFKSNFDLAEDAKLQLSKDTYDDDLDNLLAQIGDQYADLFLAAKNLSDAILLSDILRVNTEITKAPLSASMIKRYDEHHQDLTLLKALVRQQLPEKYKEIFFDQSKNGYAGYIDGGASQEEFYKFIKPILEKMDGTEELLVKLNREDLLRKQRTFDNGSIPHQIHLGELHAILRRQEDFYPFLKDNREKIEKILTFRIPYYVGPLARGNSRFAWMTRKSEETITPWNFEEVVDKGASAQSFIERMTNFDKNLPNEKVLPKHSLLYEYFTVYNELTKVKYVTEGMRKPAFLSGEQKKAIVDLLFKTNRKVTVKQLKEDYFKKIECFDSVEISGVEDRFNASLGTYHDLLKIIKDKDFLDNEENEDILEDIVLTLTLFEDREMIEERLKTYAHLFDDKVMKQLKRRRYTGWGRLSRKLINGIRDKQSGKTILDFLKSDGFANRNFMQLIHDDSLTFKEDIQKAQVSGQGDSLHEHIANLAGSPAIKKGILQTVKVVDELVKVMGRHKPENIVIEMARENQTTQKGQKNSRERMKRIEEGIKELGSQILKEHPVENTQLQNEKLYLYYLQNGRDMYVDQELDINRLSDYDVDHIVPQSFLKDDSIDNKVLTRSDKARGKSDNVPSEEVVKKMKNYWRQLLNAKLITQRKFDNLTKAERGGLSELDKAGFIKRQLVETRQITKHVAQILDSRMNTKYDENDKLIREVKVITLKSKLVSDFRKDFQFYKVREINNYHHAHDAYLNAVVGTALIKKYPKLESEFVYGDYKVYDVRKMIAKSEQEIGKATAKYFFYSNIMNFFKTEITLANGEIRKRPLIETNGETGEIVWDKGRDFATVRKVLSMPQVNIVKKTEVQTGGFSKESILPKRNSDKLIARKKDWDPKKYGGFDSPTVAYSVLVVAKVEKGKSKKLKSVKELLGITIMERSSFEKNPIDFLEAKGYKEVKKDLIIKLPKYSLFELENGRKRMLASAGELQKGNELALPSKYVNFLYLASHYEKLKGSPEDNEQKQLFVEQHKHYLDEIIEQISEFSKRVILADANLDKVLSAYNKHRDKPIREQAENIIHLFTLTNLGAPAAFKYFDTTIDRKRYTSTKEVLDATLIHQSITGLYETRIDLSQLGGDGGGGSGGSGGSGGWVQEISDSRPMLHIYLNGRRFLGLLNTGADKTCIAGRDWPANWPIHQTESSLQGLGMACGVARSSQPLRWQHEDKSGIIHPFVIPTLPFTLWGRDIMKDIKVRLMTDSPDDSQDLMIGAIESNLFADQISWKSDQPVWLNQWPLKQEKLQALQQLVTEQLQLGHLEESNSPWNTPVFVIKKKSGKWRLLQDLRAVNATMHDMGALQPGLPSPVAVPKGWEIIIIDLQDCFFNIKLHPEDCKRFAFSVPSPNFKRPYQRFQWKVLPQGMKNSPTLCQKFVDKAILTVRDKYQDSYIVHYMDDILLAHPSRSIVDEILTSMIQALNKHGLVVSTEKIQKYDNLKYLGTHIQGDSVSYQKLQIRTDKLRTLNDFQKLLGNINWIRPFLKLTTGELKPLFEILNGDSNPISTRKLTPEACKALQLMNERLSTARVKRLDLSQPWSLCILKTEYTPTACLWQDGVVEWIHLPHISPKVITPYDIFCTQLIIKGRHRSKELFSKDPDYIVVPYTKVQFDLLLQEKEDWPISLLGFLGEVHFHLPKDPLLTFTLQTAIIFPHMTSTTPLEKGIVIFTDGSANGRSVTYIQGREPIIKENTQNTAQQAEIVAVITAFEEVSQPFNLYTDSKYVTGLFPEIETATLSPRTKIYTELKHLQRLIHKRQEKFYIGHIRGHTGLPGPLAQGNAYADSLTRILTAGKRTADGSEFEKRTADGSEFESPKKKAKVE

SEQ ID NO: 3293 - protein, 2113 aa, synthetic construct
MPAAKRVKLDGGDKKYSIGLDIGTNSVGWAVITDEYKVPSKKFKVLGNTDRHSIKKNLIGALLFDSGETAEATRLKRTARRRYTRRKNRICYLQEIFSNEMAKVDDSFFHRLEESFLVEEDKKHERHPIFGNIVDEVAYHEKYPTIYHLRKKLVDSTDKADLRLIYLALAHMIKFRGHFLIEGDLNPDNSDVDKLFIQLVQTYNQLFEENPINASGVDAKAILSARLSKSRRLENLIAQLPGEKKNGLFGNLIALSLGLTPNFKSNFDLAEDAKLQLSKDTYDDDLDNLLAQIGDQYADLFLAAKNLSDAILLSDILRVNTEITKAPLSASMIKRYDEHHQDLTLLKALVRQQLPEKYKEIFFDQSKNGYAGYIDGGASQEEFYKFIKPILEKMDGTEELLVKLNREDLLRKQRTFDNGSIPHQIHLGELHAILRRQEDFYPFLKDNREKIEKILTFRIPYYVGPLARGNSRFAWMTRKSEETITPWNFEEVVDKGASAQSFIERMTNFDKNLPNEKVLPKHSLLYEYFTVYNELTKVKYVTEGMRKPAFLSGEQKKAIVDLLFKTNRKVTVKQLKEDYFKKIECFDSVEISGVEDRFNASLGTYHDLLKIIKDKDFLDNEENEDILEDIVLTLTLFEDREMIEERLKTYAHLFDDKVMKQLKRRRYTGWGRLSRKLINGIRDKQSGKTILDFLKSDGFANRNFMQLIHDDSLTFKEDIQKAQVSGQGDSLHEHIANLAGSPAIKKGILQTVKVVDELVKVMGRHKPENIVIEMARENQTTQKGQKNSRERMKRIEEGIKELGSQILKEHPVENTQLQNEKLYLYYLQNGRDMYVDQELDINRLSDYDVDHIVPQSFLKDDSIDNKVLTRSDKARGKSDNVPSEEVVKKMKNYWRQLLNAKLITQRKFDNLTKAERGGLSELDKAGFIKRQLVETRQITKHVAQILDSRMNTKYDENDKLIREVKVITLKSKLVSDFRKDFQFYKVREINNYHHAHDAYLNAVVGTALIKKYPKLESEFVYGDYKVYDVRKMIAKSEQEIGKATAKYFFYSNIMNFFKTEITLANGEIRKRPLIETNGETGEIVWDKGRDFATVRKVLSMPQVNIVKKTEVQTGGFSKESILPKRNSDKLIARKKDWDPKKYGGFDSPTVAYSVLVVAKVEKGKSKKLKSVKELLGITIMERSSFEKNPIDFLEAKGYKEVKKDLIIKLPKYSLFELENGRKRMLASAGELQKGNELALPSKYVNFLYLASHYEKLKGSPEDNEQKQLFVEQHKHYLDEIIEQISEFSKRVILADANLDKVLSAYNKHRDKPIREQAENIIHLFTLTNLGAPAAFKYFDTTIDRKRYTSTKEVLDATLIHQSITGLYETRIDLSQLGGDGGGGSEAAAKGGWVQEISDSRPMLHIYLNGRRFLGLLNTGADKTCIAGRDWPANWPIHQTESSLQGLGMACGVARSSQPLRWQHEDKSGIIHPFVIPTLPFTLWGRDIMKDIKVRLMTDSPDDSQDLMIGAIESNLFADQISWKSDQPVWLNQWPLKQEKLQALQQLVTEQLQLGHLEESNSPWNTPVFVIKKKSGKWRLLQDLRAVNATMHDMGALQPGLPSPVAVPKGWEIIIIDLQDCFFNIKLHPEDCKRFAFSVPSPNFKRPYQRFQWKVLPQGMKNSPTLCQKFVDKAILTVRDKYQDSYIVHYMDDILLAHPSRSIVDEILTSMIQALNKHGLVVSTEKIQKYDNLKYLGTHIQGDSVSYQKLQIRTDKLRTLNDFQKLLGNINWIRPFLKLTTGELKPLFEILNGDSNPISTRKLTPEACKALQLMNERLSTARVKRLDLSQPWSLCILKTEYTPTACLWQDGVVEWIHLPHISPKVITPYDIFCTQLIIKGRHRSKELFSKDPDYIVVPYTKVQFDLLLQEKEDWPISLLGFLGEVHFHLPKDPLLTFTLQTAIIFPHMTSTTPLEKGIVIFTDGSANGRSVTYIQGREPIIKENTQNTAQQAEIVAVITAFEEVSQPFNLYTDSKYVTGLFPEIETATLSPRTKIYTELKHLQRLIHKRQEKFYIGHIRGHTGLPGPLAQGNAYADSLTRILTAGKRTADGSEFEKRTADGSEFESPKKKAKVE

SEQ ID NO: 3294 - protein, 2043 aa, synthetic construct
MPAAKRVKLDGGDKKYSIGLDIGTNSVGWAVITDEYKVPSKKFKVLGNTDRHSIKKNLIGALLFDSGETAEATRLKRTARRRYTRRKNRICYLQEIFSNEMAKVDDSFFHRLEESFLVEEDKKHERHPIFGNIVDEVAYHEKYPTIYHLRKKLVDSTDKADLRLIYLALAHMIKFRGHFLIEGDLNPDNSDVDKLFIQLVQTYNQLFEENPINASGVDAKAILSARLSKSRRLENLIAQLPGEKKNGLFGNLIALSLGLTPNFKSNFDLAEDAKLQLSKDTYDDDLDNLLAQIGDQYADLFLAAKNLSDAILLSDILRVNTEITKAPLSASMIKRYDEHHQDLTLLKALVRQQLPEKYKEIFFDQSKNGYAGYIDGGASQEEFYKFIKPILEKMDGTEELLVKLNREDLLRKQRTFDNGSIPHQIHLGELHAILRRQEDFYPFLKDNREKIEKILTFRIPYYVGPLARGNSRFAWMTRKSEETITPWNFEEVVDKGASAQSFIERMTNFDKNLPNEKVLPKHSLLYEYFTVYNELTKVKYVTEGMRKPAFLSGEQKKAIVDLLFKTNRKVTVKQLKEDYFKKIECFDSVEISGVEDRFNASLGTYHDLLKIIKDKDFLDNEENEDILEDIVLTLTLFEDREMIEERLKTYAHLFDDKVMKQLKRRRYTGWGRLSRKLINGIRDKQSGKTILDFLKSDGFANRNFMQLIHDDSLTFKEDIQKAQVSGQGDSLHEHIANLAGSPAIKKGILQTVKVVDELVKVMGRHKPENIVIEMARENQTTQKGQKNSRERMKRIEEGIKELGSQILKEHPVENTQLQNEKLYLYYLQNGRDMYVDQELDINRLSDYDVDHIVPQSFLKDDSIDNKVLTRSDKARGKSDNVPSEEVVKKMKNYWRQLLNAKLITQRKFDNLTKAERGGLSELDKAGFIKRQLVETRQITKHVAQILDSRMNTKYDENDKLIREVKVITLKSKLVSDFRKDFQFYKVREINNYHHAHDAYLNAVVGTALIKKYPKLESEFVYGDYKVYDVRKMIAKSEQEIGKATAKYFFYSNIMNFFKTEITLANGEIRKRPLIETNGETGEIVWDKGRDFATVRKVLSMPQVNIVKKTEVQTGGFSKESILPKRNSDKLIARKKDWDPKKYGGFDSPTVAYSVLVVAKVEKGKSKKLKSVKELLGITIMERSSFEKNPIDFLEAKGYKEVKKDLIIKLPKYSLFELENGRKRMLASAGELQKGNELALPSKYVNFLYLASHYEKLKGSPEDNEQKQLFVEQHKHYLDEIIEQISEFSKRVILADANLDKVLSAYNKHRDKPIREQAENIIHLFTLTNLGAPAAFKYFDTTIDRKRYTSTKEVLDATLIHQSITGLYETRIDLSQLGGDGGEAAAKEAAAKEAAAKEAAAKEAAAKEAAAKGGGRDIMKDIKVRLMTDSPDDSQDLMIGAIESNLFADQISWKSDQPVWLNQWPLKQEKLQALQQLVTEQLQLGHLEESNSPWNTPVFVIKKKSGKWRLLQDLRAVNATMHDMGALQPGLPSPVAVPKGWEIIIIDLQDCFFNIKLHPEDCKRFAFSVPSPNFKRPYQRFQWKVLPQGMKNSPTLCQKFVDKAILTVRDKYQDSYIVHYMDDILLAHPSRSIVDEILTSMIQALNKHGLVVSTEKIQKYDNLKYLGTHIQGDSVSYQKLQIRTDKLRTLNDFQKLLGNINWIRPFLKLTTGELKPLFEILNGDSNPISTRKLTPEACKALQLMNERLSTARVKRLDLSQPWSLCILKTEYTPTACLWQDGVVEWIHLPHISPKVITPYDIFCTQLIIKGRHRSKELFSKDPDYIVVPYTKVQFDLLLQEKEDWPISLLGFLGEVHFHLPKDPLLTFTLQTAIIFPHMTSTTPLEKGIVIFTDGSANGRSVTYIQGREPIIKENTQNTAQQAEIVAVITAFEEVSQPFNLYTDSKYVTGLFPEIETATLSPRTKIYTELKHLQRLIHKRQEKFYIGHIRGHTGLPGPLAQGNAYADSLTRILTAGKRTADGSEFEKRTADGSEFESPKKKAKVE

SEQ ID NO: 3295 - protein, 2046 aa, synthetic construct; identical to SEQ ID NO: 3238

SEQ ID NO: 3296 - protein, 2028 aa, synthetic construct; identical to SEQ ID NO: 3201

SEQ ID NO: 3297 - protein, 2031 aa, synthetic construct
MPAAKRVKLDGGDKKYSIGLDIGTNSVGWAVITDEYKVPSKKFKVLGNTDRHSIKKNLIGALLFDSGETAEATRLKRTARRRYTRRKNRICYLQEIFSNEMAKVDDSFFHRLEESFLVEEDKKHERHPIFGNIVDEVAYHEKYPTIYHLRKKLVDSTDKADLRLIYLALAHMIKFRGHFLIEGDLNPDNSDVDKLFIQLVQTYNQLFEENPINASGVDAKAILSARLSKSRRLENLIAQLPGEKKNGLFGNLIALSLGLTPNFKSNFDLAEDAKLQLSKDTYDDDLDNLLAQIGDQYADLFLAAKNLSDAILLSDILRVNTEITKAPLSASMIKRYDEHHQDLTLLKALVRQQLPEKYKEIFFDQSKNGYAGYIDGGASQEEFYKFIKPILEKMDGTEELLVKLNREDLLRKQRTFDNGSIPHQIHLGELHAILRRQEDFYPFLKDNREKIEKILTFRIPYYVGPLARGNSRFAWMTRKSEETITPWNFEEVVDKGASAQSFIERMTNFDKNLPNEKVLPKHSLLYEYFTVYNELTKVKYVTEGMRKPAFLSGEQKKAIVDLLFKTNRKVTVKQLKEDYFKKIECFDSVEISGVEDRFNASLGTYHDLLKIIKDKDFLDNEENEDILEDIVLTLTLFEDREMIEERLKTYAHLFDDKVMKQLKRRRYTGWGRLSRKLINGIRDKQSGKTILDFLKSDGFANRNFMQLIHDDSLTFKEDIQKAQVSGQGDSLHEHIANLAGSPAIKKGILQTVKVVDELVKVMGRHKPENIVIEMARENQTTQKGQKNSRERMKRIEEGIKELGSQILKEHPVENTQLQNEKLYLYYLQNGRDMYVDQELDINRLSDYDVDHIVPQSFLKDDSIDNKVLTRSDKARGKSDNVPSEEVVKKMKNYWRQLLNAKLITQRKFDNLTKAERGGLSELDKAGFIKRQLVETRQITKHVAQILDSRMNTKYDENDKLIREVKVITLKSKLVSDFRKDFQFYKVREINNYHHAHDAYLNAVVGTALIKKYPKLESEFVYGDYKVYDVRKMIAKSEQEIGKATAKYFFYSNIMNFFKTEITLANGEIRKRPLIETNGETGEIVWDKGRDFATVRKVLSMPQVNIVKKTEVQTGGFSKESILPKRNSDKLIARKKDWDPKKYGGFDSPTVAYSVLVVAKVEKGKSKKLKSVKELLGITIMERSSFEKNPIDFLEAKGYKEVKKDLIIKLPKYSLFELENGRKRMLASAGELQKGNELALPSKYVNFLYLASHYEKLKGSPEDNEQKQLFVEQHKHYLDEIIEQISEFSKRVILADANLDKVLSAYNKHRDKPIREQAENIIHLFTLTNLGAPAAFKYFDTTIDRKRYTSTKEVLDATLIHQSITGLYETRIDLSQLGGDGGGSSGSSGSSGSSGSSGSSGGGRDIMKDIKVRLMTDSPDDSQDLMIGAIESNLFADQISWKSDQPVWLNQWPLKQEKLQALQQLVTEQLQLGHLEESNSPWNTPVFVIKKKSGKWRLLQDLRAVNATMHDMGALQPGLPSPVAVPKGWEIIIIDLQDCFFNIKLHPEDCKRFAFSVPSPNFKRPYQRFQWKVLPQGMKNSPTLCQKFVDKAILTVRDKYQDSYIVHYMDDILLAHPSRSIVDEILTSMIQALNKHGLVVSTEKIQKYDNLKYLGTHIQGDSVSYQKLQIRTDKLRTLNDFQKLLGNINWIRPFLKLTTGELKPLFEILNGDSNPISTRKLTPEACKALQLMNERLSTARVKRLDLSQPWSLCILKTEYTPTACLWQDGVVEWIHLPHISPKVITPYDIFCTQLIIKGRHRSKELFSKDPDYIVVPYTKVQFDLLLQEKEDWPISLLGFLGEVHFHLPKDPLLTFTLQTAIIFPHMTSTTPLEKGIVIFTDGSANGRSVTYIQGREPIIKENTQNTAQQAEIVAVITAFEEVSQPFNLYTDSKYVTGLFPEIETATLSPRTKIYTELKHLQRLIHKRQEKFYIGHIRGHTGLPGPLAQGNAYADSLTRILTAGKRTADGSEFEKRTADGSEFESPKKKAKVE

SEQ ID NO: 3298 - protein, 2028 aa, synthetic construct
MPAAKRVKLDGGDKKYSIGLDIGTNSVGWAVITDEYKVPSKKFKVLGNTDRHSIKKNLIGALLFDSGETAEATRLKRTARRRYTRRKNRICYLQEIFSNEMAKVDDSFFHRLEESFLVEEDKKHERHPIFGNIVDEVAYHEKYPTIYHLRKKLVDSTDKADLRLIYLALAHMIKFRGHFLIEGDLNPDNSDVDKLFIQLVQTYNQLFEENPINASGVDAKAILSARLSKSRRLENLIAQLPGEKKNGLFGNLIALSLGLTPNFKSNFDLAEDAKLQLSKDTYDDDLDNLLAQIGDQYADLFLAAKNLSDAILLSDILRVNTEITKAPLSASMIKRYDEHHQDLTLLKALVRQQLPEKYKEIFFDQSKNGYAGYIDGGASQEEFYKFIKPILEKMDGTEELLVKLNREDLLRKQRTFDNGSIPHQIHLGELHAILRRQEDFYPFLKDNREKIEKILTFRIPYYVGPLARGNSRFAWMTRKSEETITPWNFEEVVDKGASAQSFIERMTNFDKNLPNEKVLPKHSLLYEYFTVYNELTKVKYVTEGMRKPAFLSGEQKKAIVDLLFKTNRKVTVKQLKEDYFKKIECFDSVEISGVEDRFNASLGTYHDLLKIIKDKDFLDNEENEDILEDIVLTLTLFEDREMIEERLKTYAHLFDDKVMKQLKRRRYTGWGRLSRKLINGIRDKQSGKTILDFLKSDGFANRNFMQLIHDDSLTFKEDIQKAQVSGQGDSLHEHIANLAGSPAIKKGILQTVKVVDELVKVMGRHKPENIVIEMARENQTTQKGQKNSRERMKRIEEGIKELGSQILKEHPVENTQLQNEKLYLYYLQNGRDMYVDQELDINRLSDYDVDHIVPQSFLKDDSIDNKVLTRSDKARGKSDNVPSEEVVKKMKNYWRQLLNAKLITQRKFDNLTKAERGGLSELDKAGFIKRQLVETRQITKHVAQILDSRMNTKYDENDKLIREVKVITLKSKLVSDFRKDFQFYKVREINNYHHAHDAYLNAVVGTALIKKYPKLESEFVYGDYKVYDVRKMIAKSEQEIGKATAKYFFYSNIMNFFKTEITLANGEIRKRPLIETNGETGEIVWDKGRDFATVRKVLSMPQVNIVKKTEVQTGGFSKESILPKRNSDKLIARKKDWDPKKYGGFDSPTVAYSVLVVAKVEKGKSKKLKSVKELLGITIMERSSFEKNPIDFLEAKGYKEVKKDLIIKLPKYSLFELENGRKRMLASAGELQKGNELALPSKYVNFLYLASHYEKLKGSPEDNEQKQLFVEQHKHYLDEIIEQISEFSKRVILADANLDKVLSAYNKHRDKPIREQAENIIHLFTLTNLGAPAAFKYFDTTIDRKRYTSTKEVLDATLIHQSITGLYETRIDLSQLGGDGGGGGGSEAAAKGGGGSGGGRDIMKDIKVRLMTDSPDDSQDLMIGAIESNLFADQISWKSDQPVWLNQWPLKQEKLQALQQLVTEQLQLGHLEESNSPWNTPVFVIKKKSGKWRLLQDLRAVNATMHDMGALQPGLPSPVAVPKGWEIIIIDLQDCFFNIKLHPEDCKRFAFSVPSPNFKRPYQRFQWKVLPQGMKNSPTLCQKFVDKAILTVRDKYQDSYIVHYMDDILLAHPSRSIVDEILTSMIQALNKHGLVVSTEKIQKYDNLKYLGTHIQGDSVSYQKLQIRTDKLRTLNDFQKLLGNINWIRPFLKLTTGELKPLFEILNGDSNPISTRKLTPEACKALQLMNERLSTARVKRLDLSQPWSLCILKTEYTPTACLWQDGVVEWIHLPHISPKVITPYDIFCTQLIIKGRHRSKELFSKDPDYIVVPYTKVQFDLLLQEKEDWPISLLGFLGEVHFHLPKDPLLTFTLQTAIIFPHMTSTTPLEKGIVIFTDGSANGRSVTYIQGREPIIKENTQNTAQQAEIVAVITAFEEVSQPFNLYTDSKYVTGLFPEIETATLSPRTKIYTELKHLQRLIHKRQEKFYIGHIRGHTGLPGPLAQGNAYADSLTRILTAGKRTADGSEFEKRTADGSEFESPKKKAKVE

SEQ ID NO: 3299 - protein, 2028 aa, synthetic construct
MPAAKRVKLDGGDKKYSIGLDIGTNSVGWAVITDEYKVPSKKFKVLGNTDRHSIKKNLIGALLFDSGETAEATRLKRTARRRYTRRKNRICYLQEIFSNEMAKVDDSFFHRLEESFLVEEDKKHERHPIFGNIVDEVAYHEKYPTIYHLRKKLVDSTDKADLRLIYLALAHMIKFRGHFLIEGDLNPDNSDVDKLFIQLVQTYNQLFEENPINASGVDAKAILSARLSKSRRLENLIAQLPGEKKNGLFGNLIALSLGLTPNFKSNFDLAEDAKLQLSKDTYDDDLDNLLAQIGDQYADLFLAAKNLSDAILLSDILRVNTEITKAPLSASMIKRYDEHHQDLTLLKALVRQQLPEKYKEIFFDQSKNGYAGYIDGGASQEEFYKFIKPILEKMDGTEELLVKLNREDLLRKQRTFDNGSIPHQIHLGELHAILRRQEDFYPFLKDNREKIEKILTFRIPYYVGPLARGNSRFAWMTRKSEETITPWNFEEVVDKGASAQSFIERMTNFDKNLPNEKVLPKHSLLYEYFTVYNELTKVKYVTEGMRKPAFLSGEQKKAIVDLLFKTNRKVTVKQLKEDYFKKIECFDSVEISGVEDRFNASLGTYHDLLKIIKDKDFLDNEENEDILEDIVLTLTLFEDREMIEERLKTYAHLFDDKVMKQLKRRRYTGWGRLSRKLINGIRDKQSGKTILDFLKSDGFANRNFMQLIHDDSLTFKEDIQKAQVSGQGDSLHEHIANLAGSPAIKKGILQTVKVVDELVKVMGRHKPENIVIEMARENQTTQKGQKNSRERMKRIEEGIKELGSQILKEHPVENTQLQNEKLYLYYLQNGRDMYVDQELDINRLSDYDVDHIVPQSFLKDDSIDNKVLTRSDKARGKSDNVPSEEVVKKMKNYWRQLLNAKLITQRKFDNLTKAERGGLSELDKAGFIKRQLVETRQITKHVAQILDSRMNTKYDENDKLIREVKVITLKSKLVSDFRKDFQFYKVREINNYHHAHDAYLNAVVGTALIKKYPKLESEFVYGDYKVYDVRKMIAKSEQEIGKATAKYFFYSNIMNFFKTEITLANGEIRKRPLIETNGETGEIVWDKGRDFATVRKVLSMPQVNIVKKTEVQTGGFSKESILPKRNSDKLIARKKDWDPKKYGGFDSPTVAYSVLVVAKVEKGKSKKLKSVKELLGITIMERSSFEKNPIDFLEAKGYKEVKKDLIIKLPKYSLFELENGRKRMLASAGELQKGNELALPSKYVNFLYLASHYEKLKGSPEDNEQKQLFVEQHKHYLDEIIEQISEFSKRVILADANLDKVLSAYNKHRDKPIREQAENIIHLFTLTNLGAPAAFKYFDTTIDRKRYTSTKEVLDATLIHQSITGLYETRIDLSQLGGDGGEAAAKEAAAKEAAAKGGGRDIMKDIKVRLMTDSPDDSQDLMIGAIESNLFADQISWKSDQPVWLNQWPLKQEKLQALQQLVTEQLQLGHLEESNSPWNTPVFVIKKKSGKWRLLQDLRAVNATMHDMGALQPGLPSPVAVPKGWEIIIIDLQDCFFNIKLHPEDCKRFAFSVPSPNFKRPYQRFQWKVLPQGMKNSPTLCQKFVDKAILTVRDKYQDSYIVHYMDDILLAHPSRSIVDEILTSMIQALNKHGLVVSTEKIQKYDNLKYLGTHIQGDSVSYQKLQIRTDKLRTLNDFQKLLGNINWIRPFLKLTTGELKPLFEILNGDSNPISTRKLTPEACKALQLMNERLSTARVKRLDLSQPWSLCILKTEYTPTACLWQDGVVEWIHLPHISPKVITPYDIFCTQLIIKGRHRSKELFSKDPDYIVVPYTKVQFDLLLQEKEDWPISLLGFLGEVHFHLPKDPLLTFTLQTAIIFPHMTSTTPLEKGIVIFTDGSANGRSVTYIQGREPIIKENTQNTAQQAEIVAVITAFEEVSQPFNLYTDSKYVTGLFPEIETATLSPRTKIYTELKHLQRLIHKRQEKFYIGHIRGHTGLPGPLAQGNAYADSLTRILTAGKRTADGSEFEKRTADGSEFESPKKKAKVE

SEQ ID NO: 3300 - protein, 2024 aa, synthetic construct; identical to SEQ ID NO: 3213

SEQ ID NO: 3301 - protein, 2024 aa, synthetic construct
MPAAKRVKLDGGDKKYSIGLDIGTNSVGWAVITDEYKVPSKKFKVLGNTDRHSIKKNLIGALLFDSGETAEATRLKRTARRRYTRRKNRICYLQEIFSNEMAKVDDSFFHRLEESFLVEEDKKHERHPIFGNIVDEVAYHEKYPTIYHLRKKLVDSTDKADLRLIYLALAHMIKFRGHFLIEGDLNPDNSDVDKLFIQLVQTYNQLFEENPINASGVDAKAILSARLSKSRRLENLIAQLPGEKKNGLFGNLIALSLGLTPNFKSNFDLAEDAKLQLSKDTYDDDLDNLLAQIGDQYADLFLAAKNLSDAILLSDILRVNTEITKAPLSASMIKRYDEHHQDLTLLKALVRQQLPEKYKEIFFDQSKNGYAGYIDGGASQEEFYKFIKPILEKMDGTEELLVKLNREDLLRKQRTFDNGSIPHQIHLGELHAILRRQEDFYPFLKDNREKIEKILTFRIPYYVGPLARGNSRFAWMTRKSEETITPWNFEEVVDKGASAQSFIERMTNFDKNLPNEKVLPKHSLLYEYFTVYNELTKVKYVTEGMRKPAFLSGEQKKAIVDLLFKTNRKVTVKQLKEDYFKKIECFDSVEISGVEDRFNASLGTYHDLLKIIKDKDFLDNEENEDILEDIVLTLTLFEDREMIEERLKTYAHLFDDKVMKQLKRRRYTGWGRLSRKLINGIRDKQSGKTILDFLKSDGFANRNFMQLIHDDSLTFKEDIQKAQVSGQGDSLHEHIANLAGSPAIKKGILQTVKVVDELVKVMGRHKPENIVIEMARENQTTQKGQKNSRERMKRIEEGIKELGSQILKEHPVENTQLQNEKLYLYYLQNGRDMYVDQELDINRLSDYDVDHIVPQSFLKDDSIDNKVLTRSDKARGKSDNVPSEEVVKKMKNYWRQLLNAKLITQRKFDNLTKAERGGLSELDKAGFIKRQLVETRQITKHVAQILDSRMNTKYDENDKLIREVKVITLKSKLVSDFRKDFQFYKVREINNYHHAHDAYLNAVVGTALIKKYPKLESEFVYGDYKVYDVRKMIAKSEQEIGKATAKYFFYSNIMNFFKTEITLANGEIRKRPLIETNGETGEIVWDKGRDFATVRKVLSMPQVNIVKKTEVQTGGFSKESILPKRNSDKLIARKKDWDPKKYGGFDSPTVAYSVLVVAKVEKGKSKKLKSVKELLGITIMERSSFEKNPIDFLEAKGYKEVKKDLIIKLPKYSLFELENGRKRMLASAGELQKGNELALPSKYVNFLYLASHYEKLKGSPEDNEQKQLFVEQHKHYLDEIIEQISEFSKRVILADANLDKVLSAYNKHRDKPIREQAENIIHLFTLTNLGAPAAFKYFDTTIDRKRYTSTKEVLDATLIHQSITGLYETRIDLSQLGGDGGEAAAKGSSGGSGGGRDIMKDIKVRLMTDSPDDSQDLMIGAIESNLFADQISWKSDQPVWLNQWPLKQEKLQALQQLVTEQLQLGHLEESNSPWNTPVFVIKKKSGKWRLLQDLRAVNATMHDMGALQPGLPSPVAVPKGWEIIIIDLQDCFFNIKLHPEDCKRFAFSVPSPNFKRPYQRFQWKVLPQGMKNSPTLCQKFVDKAILTVRDKYQDSYIVHYMDDILLAHPSRSIVDEILTSMIQALNKHGLVVSTEKIQKYDNLKYLGTHIQGDSVSYQKLQIRTDKLRTLNDFQKLLGNINWIRPFLKLTTGELKPLFEILNGDSNPISTRKLTPEACKALQLMNERLSTARVKRLDLSQPWSLCILKTEYTPTACLWQDGVVEWIHLPHISPKVITPYDIFCTQLIIKGRHRSKELFSKDPDYIVVPYTKVQFDLLLQEKEDWPISLLGFLGEVHFHLPKDPLLTFTLQTAIIFPHMTSTTPLEKGIVIFTDGSANGRSVTYIQGREPIIKENTQNTAQQAEIVAVITAFEEVSQPFNLYTDSKYVTGLFPEIETATLSPRTKIYTELKHLQRLIHKRQEKFYIGHIRGHTGLPGPLAQGNAYADSLTRILTAGKRTADGSEFEKRTADGSEFESPKKKAKVE

SEQ ID NO: 3302 - protein, 2028 aa, synthetic construct
MPAAKRVKLDGGDKKYSIGLDIGTNSVGWAVITDEYKVPSKKFKVLGNTDRHSIKKNLIGALLFDSGETAEATRLKRTARRRYTRRKNRICYLQEIFSNEMAKVDDSFFHRLEESFLVEEDKKHERHPIFGNIVDEVAYHEKYPTIYHLRKKLVDSTDKADLRLIYLALAHMIKFRGHFLIEGDLNPDNSDVDKLFIQLVQTYNQLFEENPINASGVDAKAILSARLSKSRRLENLIAQLPGEKKNGLFGNLIALSLGLTPNFKSNFDLAEDAKLQLSKDTYDDDLDNLLAQIGDQYADLFLAAKNLSDAILLSDILRVNTEITKAPLSASMIKRYDEHHQDLTLLKALVRQQLPEKYKEIFFDQSKNGYAGYIDGGASQEEFYKFIKPILEKMDGTEELLVKLNREDLLRKQRTFDNGSIPHQIHLGELHAILRRQEDFYPFLKDNREKIEKILTFRIPYYVGPLARGNSRFAWMTRKSEETITPWNFEEVVDKGASAQSFIERMTNFDKNLPNEKVLPKHSLLYEYFTVYNELTKVKYVTEGMRKPAFLSGEQKKAIVDLLFKTNRKVTVKQLKEDYFKKIECFDSVEISGVEDRFNASLGTYHDLLKIIKDKDFLDNEENEDILEDIVLTLTLFEDREMIEERLKTYAHLFDDKVMKQLKRRRYTGWGRLSRKLINGIRDKQSGKTILDFLKSDGFANRNFMQLIHDDSLTFKEDIQKAQVSGQGDSLHEHIANLAGSPAIKKGILQTVKVVDELVKVMGRHKPENIVIEMARENQTTQKGQKNSRERMKRIEEGIKELGSQILKEHPVENTQLQNEKLYLYYLQNGRDMYVDQELDINRLSDYDVDHIVPQSFLKDDSIDNKVLTRSDKARGKSDNVPSEEVVKKMKNYWRQLLNAKLITQRKFDNLTKAERGGLSELDKAGFIKRQLVETRQITKHVAQILDSRMNTKYDENDKLIREVKVITLKSKLVSDFRKDFQFYKVREINNYHHAHDAYLNAVVGTALIKKYPKLESEFVYGDYKVYDVRKMIAKSEQEIGKATAKYFFYSNIMNFFKTEITLANGEIRKRPLIETNGETGEIVWDKGRDFATVRKVLSMPQVNIVKKTEVQTGGFSKESILPKRNSDKLIARKKDWDPKKYGGFDSPTVAYSVLVVAKVEKGKSKKLKSVKELLGITIMERSSFEKNPIDFLEAKGYKEVKKDLIIKLPKYSLFELENGRKRMLASAGELQKGNELALPSKYVNFLYLASHYEKLKGSPEDNEQKQLFVEQHKHYLDEIIEQISEFSKRVILADANLDKVLSAYNKHRDKPIREQAENIIHLFTLTNLGAPAAFKYFDTTIDRKRYTSTKEVLDATLIHQSITGLYETRIDLSQLGGDGGGGSGGSGGSGGSGGSGGGRDIMKDIKVRLMTDSPDDSQDLMIGAIESNLFADQISWKSDQPVWLNQWPLKQEKLQALQQLVTEQLQLGHLEESNSPWNTPVFVIKKKSGKWRLLQDLRAVNATMHDMGALQPGLPSPVAVPKGWEIIIIDLQDCFFNIKLHPEDCKRFAFSVPSPNFKRPYQRFQWKVLPQGMKNSPTLCQKFVDKAILTVRDKYQDSYIVHYMDDILLAHPSRSIVDEILTSMIQALNKHGLVVSTEKIQKYDNLKYLGTHIQGDSVSYQKLQIRTDKLRTLNDFQKLLGNINWIRPFLKLTTGELKPLFEILNGDSNPISTRKLTPEACKALQLMNERLSTARVKRLDLSQPWSLCILKTEYTPTACLWQDGVVEWIHLPHISPKVITPYDIFCTQLIIKGRHRSKELFSKDPDYIVVPYTKVQFDLLLQEKEDWPISLLGFLGEVHFHLPKDPLLTFTLQTAIIFPHMTSTTPLEKGIVIFTDGSANGRSVTYIQGREPIIKENTQNTAQQAEIVAVITAFEEVSQPFNLYTDSKYVTGLFPEIETATLSPRTKIYTELKHLQRLIHKRQEKFYIGHIRGHTGLPGPLAQGNAYADSLTRILTAGKRTADGSEFEKRTADGSEFESPKKKAKVE

SEQ ID NO: 3303 - protein, 2028 aa, synthetic construct
MPAAKRVKLDGGDKKYSIGLDIGTNSVGWAVITDEYKVPSKKFKVLGNTDRHSIKKNLIGALLFDSGETAEATRLKRTARRRYTRRKNRICYLQEIFSNEMAKVDDSFFHRLEESFLVEEDKKHERHPIFGNIVDEVAYHEKYPTIYHLRKKLVDSTDKADLRLIYLALAHMIKFRGHFLIEGDLNPDNSDVDKLFIQLVQTYNQLFEENPINASGVDAKAILSARLSKSRRLENLIAQLPGEKKNGLFGNLIALSLGLTPNFKSNFDLAEDAKLQLSKDTYDDDLDNLLAQIGDQYADLFLAAKNLSDAILLSDILRVNTEITKAPLSASMIKRYDEHHQDLTLLKALVRQQLPEKYKEIFFDQSKNGYAGYIDGGASQEEFYKFIKPILEKMDGTEELLVKLNREDLLRKQRTFDNGSIPHQIHLGELHAILRRQEDFYPFLKDNREKIEKILTFRIPYYVGPLARGNSRFAWMTRKSEETITPWNFEEVVDKGASAQSFIERMTNFDKNLPNEKVLPKHSLLYEYFTVYNELTKVKYVTEGMRKPAFLSGEQKKAIVDLLFKTNRKVTVKQLKEDYFKKIECFDSVEISGVEDRFNASLGTYHDLLKIIKDKDFLDNEENEDILEDIVLTLTLFEDREMIEERLKTYAHLFDDKVMKQLKRRRYTGWGRLSRKLINGIRDKQSGKTILDFLKSDGFANRNFMQLIHDDSLTFKEDIQKAQVSGQGDSLHEHIANLAGSPAIKKGILQTVKVVDELVKVMGRHKPENIVIEMARENQTTQKGQKNSRERMKRIEEGIKELGSQILKEHPVENTQLQNEKLYLYYLQNGRDMYVDQELDINRLSDYDVDHIVPQSFLKDDSIDNKVLTRSDKARGKSDNVPSEEVVKKMKNYWRQLLNAKLITQRKFDNLTKAERGGLSELDKAGFIKRQLVETRQITKHVAQILDSRMNTKYDENDKLIREVKVITLKSKLVSDFRKDFQFYKVREINNYHHAHDAYLNAVVGTALIKKYPKLESEFVYGDYKVYDVRKMIAKSEQEIGKATAKYFFYSNIMNFFKTEITLANGEIRKRPLIETNGETGEIVWDKGRDFATVRKVLSMPQVNIVKKTEVQTGGFSKESILPKRNSDKLIARKKDWDPKKYGGFDSPTVAYSVLVVAKVEKGKSKKLKSVKELLGITIMERSSFEKNPIDFLEAKGYKEVKKDLIIKLPKYSLFELENGRKRMLASAGELQKGNELALPSKYVNFLYLASHYEKLKGSPEDNEQKQLFVEQHKHYLDEIIEQISEFSKRVILADANLDKVLSAYNKHRDKPIREQAENIIHLFTLTNLGAPAAFKYFDTTIDRKRYTSTKEVLDATLIHQSITGLYETRIDLSQLGGDGGGSSGSSGSSGSSGSSGGGRDIMKDIKVRLMTDSPDDSQDLMIGAIESNLFADQISWKSDQPVWLNQWPLKQEKLQALQQLVTEQLQLGHLEESNSPWNTPVFVIKKKSGKWRLLQDLRAVNATMHDMGALQPGLPSPVAVPKGWEIIIIDLQDCFFNIKLHPEDCKRFAFSVPSPNFKRPYQRFQWKVLPQGMKNSPTLCQKFVDKAILTVRDKYQDSYIVHYMDDILLAHPSRSIVDEILTSMIQALNKHGLVVSTEKIQKYDNLKYLGTHIQGDSVSYQKLQIRTDKLRTLNDFQKLLGNINWIRPFLKLTTGELKPLFEILNGDSNPISTRKLTPEACKALQLMNERLSTARVKRLDLSQPWSLCILKTEYTPTACLWQDGVVEWIHLPHISPKVITPYDIFCTQLIIKGRHRSKELFSKDPDYIVVPYTKVQFDLLLQEKEDWPISLLGFLGEVHFHLPKDPLLTFTLQTAIIFPHMTSTTPLEKGIVIFTDGSANGRSVTYIQGREPIIKENTQNTAQQAEIVAVITAFEEVSQPFNLYTDSKYVTGLFPEIETATLSPRTKIYTELKHLQRLIHKRQEKFYIGHIRGHTGLPGPLAQGNAYADSLTRILTAGKRTADGSEFEKRTADGSEFESPKKKAKVE

SEQ ID NO: 3304 - protein, 2022 aa, synthetic construct; identical to SEQ ID NO: 3221

SEQ ID NO: 3305 - protein, 2022 aa, synthetic construct
MPAAKRVKLDGGDKKYSIGLDIGTNSVGWAVITDEYKVPSKKFKVLGNTDRHSIKKNLIGALLFDSGETAEATRLKRTARRRYTRRKNRICYLQEIFSNEMAKVDDSFFHRLEESFLVEEDKKHERHPIFGNIVDEVAYHEKYPTIYHLRKKLVDSTDKADLRLIYLALAHMIKFRGHFLIEGDLNPDNSDVDKLFIQLVQTYNQLFEENPINASGVDAKAILSARLSKSRRLENLIAQLPGEKKNGLFGNLIALSLGLTPNFKSNFDLAEDAKLQLSKDTYDDDLDNLLAQIGDQYADLFLAAKNLSDAILLSDILRVNTEITKAPLSASMIKRYDEHHQDLTLLKALVRQQLPEKYKEIFFDQSKNGYAGYIDGGASQEEFYKFIKPILEKMDGTEELLVKLNREDLLRKQRTFDNGSIPHQIHLGELHAILRRQEDFYPFLKDNREKIEKILTFRIPYYVGPLARGNSRFAWMTRKSEETITPWNFEEVVDKGASAQSFIERMTNFDKNLPNEKVLPKHSLLYEYFTVYNELTKVKYVTEGMRKPAFLSGEQKKAIVDLLFKTNRKVTVKQLKEDYFKKIECFDSVEISGVEDRFNASLGTYHDLLKIIKDKDFLDNEENEDILEDIVLTLTLFEDREMIEERLKTYAHLFDDKVMKQLKRRRYTGWGRLSRKLINGIRDKQSGKTILDFLKSDGFANRNFMQLIHDDSLTFKEDIQKAQVSGQGDSLHEHIANLAGSPAIKKGILQTVKVVDELVKVMGRHKPENIVIEMARENQTTQKGQKNSRERMKRIEEGIKELGSQILKEHPVENTQLQNEKLYLYYLQNGRDMYVDQELDINRLSDYDVDHIVPQSFLKDDSIDNKVLTRSDKARGKSDNVPSEEVVKKMKNYWRQLLNAKLITQRKFDNLTKAERGGLSELDKAGFIKRQLVETRQITKHVAQILDSRMNTKYDENDKLIREVKVITLKSKLVSDFRKDFQFYKVREINNYHHAHDAYLNAVVGTALIKKYPKLESEFVYGDYKVYDVRKMIAKSEQEIGKATAKYFFYSNIMNFFKTEITLANGEIRKRPLIETNGETGEIVWDKGRDFATVRKVLSMPQVNIVKKTEVQTGGFSKESILPKRNSDKLIARKKDWDPKKYGGFDSPTVAYSVLVVAKVEKGKSKKLKSVKELLGITIMERSSFEKNPIDFLEAKGYKEVKKDLIIKLPKYSLFELENGRKRMLASAGELQKGNELALPSKYVNFLYLASHYEKLKGSPEDNEQKQLFVEQHKHYLDEIIEQISEFSKRVILADANLDKVLSAYNKHRDKPIREQAENIIHLFTLTNLGAPAAFKYFDTTIDRKRYTSTKEVLDATLIHQSITGLYETRIDLSQLGGDGGGSSGGSPAPGGGRDIMKDIKVRLMTDSPDDSQDLMIGAIESNLFADQISWKSDQPVWLNQWPLKQEKLQALQQLVTEQLQLGHLEESNSPWNTPVFVIKKKSGKWRLLQDLRAVNATMHDMGALQPGLPSPVAVPKGWEIIIIDLQDCFFNIKLHPEDCKRFAFSVPSPNFKRPYQRFQWKVLPQGMKNSPTLCQKFVDKAILTVRDKYQDSYIVHYMDDILLAHPSRSIVDEILTSMIQALNKHGLVVSTEKIQKYDNLKYLGTHIQGDSVSYQKLQIRTDKLRTLNDFQKLLGNINWIRPFLKLTTGELKPLFEILNGDSNPISTRKLTPEACKALQLMNERLSTARVKRLDLSQPWSLCILKTEYTPTACLWQDGVVEWIHLPHISPKVITPYDIFCTQLIIKGRHRSKELFSKDPDYIVVPYTKVQFDLLLQEKEDWPISLLGFLGEVHFHLPKDPLLTFTLQTAIIFPHMTSTTPLEKGIVIFTDGSANGRSVTYIQGREPIIKENTQNTAQQAEIVAVITAFEEVSQPFNLYTDSKYVTGLFPEIETATLSPRTKIYTELKHLQRLIHKRQEKFYIGHIRGHTGLPGPLAQGNAYADSLTRILTAGKRTADGSEFEKRTADGSEFESPKKKAKVE

SEQ ID NO: 3306 - protein, 2024 aa, synthetic construct
MPAAKRVKLDGGDKKYSIGLDIGTNSVGWAVITDEYKVPSKKFKVLGNTDRHSIKKNLIGALLFDSGETAEATRLKRTARRRYTRRKNRICYLQEIFSNEMAKVDDSFFHRLEESFLVEEDKKHERHPIFGNIVDEVAYHEKYPTIYHLRKKLVDSTDKADLRLIYLALAHMIKFRGHFLIEGDLNPDNSDVDKLFIQLVQTYNQLFEENPINASGVDAKAILSARLSKSRRLENLIAQLPGEKKNGLFGNLIALSLGLTPNFKSNFDLAEDAKLQLSKDTYDDDLDNLLAQIGDQYADLFLAAKNLSDAILLSDILRVNTEITKAPLSASMIKRYDEHHQDLTLLKALVRQQLPEKYKEIFFDQSKNGYAGYIDGGASQEEFYKFIKPILEKMDGTEELLVKLNREDLLRKQRTFDNGSIPHQIHLGELHAILRRQEDFYPFLKDNREKIEKILTFRIPYYVGPLARGNSRFAWMTRKSEETITPWNFEEVVDKGASAQSFIERMTNFDKNLPNEKVLPKHSLLYEYFTVYNELTKVKYVTEGMRKPAFLSGEQKKAIVDLLFKTNRKVTVKQLKEDYFKKIECFDSVEISGVEDRFNASLGTYHDLLKIIKDKDFLDNEENEDILEDIVLTLTLFEDREMIEERLKTYAHLFDDKVMKQLKRRRYTGWGRLSRKLINGIRDKQSGKTILDFLKSDGFANRNFMQLIHDDSLTFKEDIQKAQVSGQGDSLHEHIANLAGSPAIKKGILQTVKVVDELVKVMGRHKPENIVIEMARENQTTQKGQKNSRERMKRIEEGIKELGSQILKEHPVENTQLQNEKLYLYYLQNGRDMYVDQELDINRLSDYDVDHIVPQSFLKDDSIDNKVLTRSDKARGKSDNVPSEEVVKKMKNYWRQLLNAKLITQRKFDNLTKAERGGLSELDKAGFIKRQLVETRQITKHVAQILDSRMNTKYDENDKLIREVKVITLKSKLVSDFRKDFQFYKVREINNYHHAHDAYLNAVVGTALIKKYPKLESEFVYGDYKVYDVRKMIAKSEQEIGKATAKYFFYSNIMNFFKTEITLANGEIRKRPLIETNGETGEIVWDKGRDFATVRKVLSMPQVNIVKKTEVQTGGFSKESILPKRNSDKLIARKKDWDPKKYGGFDSPTVAYSVLVVAKVEKGKSKKLKSVKELLGITIMERSSFEKNPIDFLEAKGYKEVKKDLIIKLPKYSLFELENGRKRMLASAGELQKGNELALPSKYVNFLYLASHYEKLKGSPEDNEQKQLFVEQHKHYLDEIIEQISEFSKRVILADANLDKVLSAYNKHRDKPIREQAENIIHLFTLTNLGAPAAFKYFDTTIDRKRYTSTKEVLDATLIHQSITGLYETRIDLSQLGGDGGEAAAKGGGGSSGGGRDIMKDIKVRLMTDSPDDSQDLMIGAIESNLFADQISWKSDQPVWLNQWPLKQEKLQALQQLVTEQLQLGHLEESNSPWNTPVFVIKKKSGKWRLLQDLRAVNATMHDMGALQPGLPSPVAVPKGWEIIIIDLQDCFFNIKLHPEDCKRFAFSVPSPNFKRPYQRFQWKVLPQGMKNSPTLCQKFVDKAILTVRDKYQDSYIVHYMDDILLAHPSRSIVDEILTSMIQALNKHGLVVSTEKIQKYDNLKYLGTHIQGDSVSYQKLQIRTDKLRTLNDFQKLLGNINWIRPFLKLTTGELKPLFEILNGDSNPISTRKLTPEACKALQLMNERLSTARVKRLDLSQPWSLCILKTEYTPTACLWQDGVVEWIHLPHISPKVITPYDIFCTQLIIKGRHRSKELFSKDPDYIVVPYTKVQFDLLLQEKEDWPISLLGFLGEVHFHLPKDPLLTFTLQTAIIFPHMTSTTPLEKGIVIFTDGSANGRSVTYIQGREPIIKENTQNTAQQAEIVAVITAFEEVSQPFNLYTDSKYVTGLFPEIETATLSPRTKIYTELKHLQRLIHKRQEKFYIGHIRGHTGLPGPLAQGNAYADSLTRILTAGKRTADGSEFEKRTADGSEFESPKKKAKVE

SEQ ID NO: 3307 - protein, 2021 aa, synthetic construct
MPAAKRVKLDGGDKKYSIGLDIGTNSVGWAVITDEYKVPSKKFKVLGNTDRHSIKKNLIGALLFDSGETAEATRLKRTARRRYTRRKNRICYLQEIFSNEMAKVDDSFFHRLEESFLVEEDKKHERHPIFGNIVDEVAYHEKYPTIYHLRKKLVDSTDKADLRLIYLALAHMIKFRGHFLIEGDLNPDNSDVDKLFIQLVQTYNQLFEENPINASGVDAKAILSARLSKSRRLENLIAQLPGEKKNGLFGNLIALSLGLTPNFKSNFDLAEDAKLQLSKDTYDDDLDNLLAQIGDQYADLFLAAKNLSDAILLSDILRVNTEITKAPLSASMIKRYDEHHQDLTLLKALVRQQLPEKYKEIFFDQSKNGYAGYIDGGASQEEFYKFIKPILEKMDGTEELLVKLNREDLLRKQRTFDNGSIPHQIHLGELHAILRRQEDFYPFLKDNREKIEKILTFRIPYYVGPLARGNSRFAWMTRKSEETITPWNFEEVVDKGASAQSFIERMTNFDKNLPNEKVLPKHSLLYEYFTVYNELTKVKYVTEGMRKPAFLSGEQKKAIVDLLFKTNRKVTVKQLKEDYFKKIECFDSVEISGVEDRFNASLGTYHDLLKIIKDKDFLDNEENEDILEDIVLTLTLFEDREMIEERLKTYAHLFDDKVMKQLKRRRYTGWGRLSRKLINGIRDKQSGKTILDFLKSDGFANRNFMQLIHDDSLTFKEDIQKAQVSGQGDSLHEHIANLAGSPAIKKGILQTVKVVDELVKVMGRHKPENIVIEMARENQTTQKGQKNSRERMKRIEEGIKELGSQILKEHPVENTQLQNEKLYLYYLQNGRDMYVDQELDINRLSDYDVDHIVPQSFLKDDSIDNKVLTRSDKARGKSDNVPSEEVVKKMKNYWRQLLNAKLITQRKFDNLTKAERGGLSELDKAGFIKRQLVETRQITKHVAQILDSRMNTKYDENDKLIREVKVITLKSKLVSDFRKDFQFYKVREINNYHHAHDAYLNAVVGTALIKKYPKLESEFVYGDYKVYDVRKMIAKSEQEIGKATAKYFFYSNIMNFFKTEITLANGEIRKRPLIETNGETGEIVWDKGRDFATVRKVLSMPQVNIVKKTEVQTGGFSKESILPKRNSDKLIARKKDWDPKKYGGFDSPTVAYSVLVVAKVEKGKSKKLKSVKELLGITIMERSSFEKNPIDFLEAKGYKEVKKDLIIKLPKYSLFELENGRKRMLASAGELQKGNELALPSKYVNFLYLASHYEKLKGSPEDNEQKQLFVEQHKHYLDEIIEQISEFSKRVILADANLDKVLSAYNKHRDKPIREQAENIIHLFTLTNLGAPAAFKYFDTTIDRKRYTSTKEVLDATLIHQSITGLYETRIDLSQLGGDGGGSSEAAAKGGGRDIMKDIKVRLMTDSPDDSQDLMIGAIESNLFADQISWKSDQPVWLNQWPLKQEKLQALQQLVTEQLQLGHLEESNSPWNTPVFVIKKKSGKWRLLQDLRAVNATMHDMGALQPGLPSPVAVPKGWEIIIIDLQDCFFNIKLHPEDCKRFAFSVPSPNFKRPYQRFQWKVLPQGMKNSPTLCQKFVDKAILTVRDKYQDSYIVHYMDDILLAHPSRSIVDEILTSMIQALNKHGLVVSTEKIQKYDNLKYLGTHIQGDSVSYQKLQIRTDKLRTLNDFQKLLGNINWIRPFLKLTTGELKPLFEILNGDSNPISTRKLTPEACKALQLMNERLSTARVKRLDLSQPWSLCILKTEYTPTACLWQDGVVEWIHLPHISPKVITPYDIFCTQLIIKGRHRSKELFSKDPDYIVVPYTKVQFDLLLQEKEDWPISLLGFLGEVHFHLPKDPLLTFTLQTAIIFPHMTSTTPLEKGIVIFTDGSANGRSVTYIQGREPIIKENTQNTAQQAEIVAVITAFEEVSQPFNLYTDSKYVTGLFPEIETATLSPRTKIYTELKHLQRLIHKRQEKFYIGHIRGHTGLPGPLAQGNAYADSLTRILTAGKRTADGSEFEKRTADGSEFESPKKKAKVE

SEQ ID NO: 3308 - protein, 2022 aa, synthetic construct; identical to SEQ ID NO: 3224

SEQ ID NO: 3309 - protein, 2024 aa, synthetic construct
MPAAKRVKLDGGDKKYSIGLDIGTNSVGWAVITDEYKVPSKKFKVLGNTDRHSIKKNLIGALLFDSGETAEATRLKRTARRRYTRRKNRICYLQEIFSNEMAKVDDSFFHRLEESFLVEEDKKHERHPIFGNIVDEVAYHEKYPTIYHLRKKLVDSTDKADLRLIYLALAHMIKFRGHFLIEGDLNPDNSDVDKLFIQLVQTYNQLFEENPINASGVDAKAILSARLSKSRRLENLIAQLPGEKKNGLFGNLIALSLGLTPNFKSNFDLAEDAKLQLSKDTYDDDLDNLLAQIGDQYADLFLAAKNLSDAILLSDILRVNTEITKAPLSASMIKRYDEHHQDLTLLKALVRQQLPEKYKEIFFDQSKNGYAGYIDGGASQEEFYKFIKPILEKMDGTEELLVKLNREDLLRKQRTFDNGSIPHQIHLGELHAILRRQEDFYPFLKDNREKIEKILTFRIPYYVGPLARGNSRFAWMTRKSEETITPWNFEEVVDKGASAQSFIERMTNFDKNLPNEKVLPKHSLLYEYFTVYNELTKVKYVTEGMRKPAFLSGEQKKAIVDLLFKTNRKVTVKQLKEDYFKKIECFDSVEISGVEDRFNASLGTYHDLLKIIKDKDFLDNEENEDILEDIVLTLTLFEDREMIEERLKTYAHLFDDKVMKQLKRRRYTGWGRLSRKLINGIRDKQSGKTILDFLKSDGFANRNFMQLIHDDSLTFKEDIQKAQVSGQGDSLHEHIANLAGSPAIKKGILQTVKVVDELVKVMGRHKPENIVIEMARENQTTQKGQKNSRERMKRIEEGIKELGSQILKEHPVENTQLQNEKLYLYYLQNGRDMYVDQELDINRLSDYDVDHIVPQSFLKDDSIDNKVLTRSDKARGKSDNVPSEEVVKKMKNYWRQLLNAKLITQRKFDNLTKAERGGLSELDKAGFIKRQLVETRQITKHVAQILDSRMNTKYDENDKLIREVKVITLKSKLVSDFRKDFQFYKVREINNYHHAHDAYLNAVVGTALIKKYPKLESEFVYGDYKVYDVRKMIAKSEQEIGKATAKYFFYSNIMNFFKTEITLANGEIRKRPLIETNGETGEIVWDKGRDFATVRKVLSMPQVNIVKKTEVQTGGFSKESILPKRNSDKLIARKKDWDPKKYGGFDSPTVAYSVLVVAKVEKGKSKKLKSVKELLGITIMERSSFEKNPIDFLEAKGYKEVKKDLIIKLPKYSLFELENGRKRMLASAGELQKGNELALPSKYVNFLYLASHYEKLKGSPEDNEQKQLFVEQHKHYLDEIIEQISEFSKRVILADANLDKVLSAYNKHRDKPIREQAENIIHLFTLTNLGAPAAFKYFDTTIDRKRYTSTKEVLDATLIHQSITGLYETRIDLSQLGGDGGPAPAPAPAPAPGGGRDIMKDIKVRLMTDSPDDSQDLMIGAIESNLFADQISWKSDQPVWLNQWPLKQEKLQALQQLVTEQLQLGHLEESNSPWNTPVFVIKKKSGKWRLLQDLRAVNATMHDMGALQPGLPSPVAVPKGWEIIIIDLQDCFFNIKLHPEDCKRFAFSVPSPNFKRPYQRFQWKVLPQGMKNSPTLCQKFVDKAILTVRDKYQDSYIVHYMDDILLAHPSRSIVDEILTSMIQALNKHGLVVSTEKIQKYDNLKYLGTHIQGDSVSYQKLQIRTDKLRTLNDFQKLLGNINWIRPFLKLTTGELKPLFEILNGDSNPISTRKLTPEACKALQLMNERLSTARVKRLDLSQPWSLCILKTEYTPTACLWQDGVVEWIHLPHISPKVITPYDIFCTQLIIKGRHRSKELFSKDPDYIVVPYTKVQFDLLLQEKEDWPISLLGFLGEVHFHLPKDPLLTFTLQTAIIFPHMTSTTPLEKGIVIFTDGSANGRSVTYIQGREPIIKENTQNTAQQAEIVAVITAFEEVSQPFNLYTDSKYVTGLFPEIETATLSPRTKIYTELKHLQRLIHKRQEKFYIGHIRGHTGLPGPLAQGNAYADSLTRILTAGKRTADGSEFEKRTADGSEFESPKKKAKVE

SEQ ID NO: 3310 - protein, 2024 aa, synthetic construct
MPAAKRVKLDGGDKKYSIGLDIGTNSVGWAVITDEYKVPSKKFKVLGNTDRHSIKKNLIGALLFDSGETAEATRLKRTARRRYTRRKNRICYLQEIFSNEMAKVDDSFFHRLEESFLVEEDKKHERHPIFGNIVDEVAYHEKYPTIYHLRKKLVDSTDKADLRLIYLALAHMIKFRGHFLIEGDLNPDNSDVDKLFIQLVQTYNQLFEENPINASGVDAKAILSARLSKSRRLENLIAQLPGEKKNGLFGNLIALSLGLTPNFKSNFDLAEDAKLQLSKDTYDDDLDNLLAQIGDQYADLFLAAKNLSDAILLSDILRVNTEITKAPLSASMIKRYDEHHQDLTLLKALVRQQLPEKYKEIFFDQSKNGYAGYIDGGASQEEFYKFIKPILEKMDGTEELLVKLNREDLLRKQRTFDNGSIPHQIHLGELHAILRRQEDFYPFLKDNREKIEKILTFRIPYYVGPLARGNSRFAWMTRKSEETITPWNFEEVVDKGASAQSFIERMTNFDKNLPNEKVLPKHSLLYEYFTVYNELTKVKYVTEGMRKPAFLSGEQKKAIVDLLFKTNRKVTVKQLKEDYFKKIECFDSVEISGVEDRFNASLGTYHDLLKIIKDKDFLDNEENEDILEDIVLTLTLFEDREMIEERLKTYAHLFDDKVMKQLKRRRYTGWGRLSRKLINGIRDKQSGKTILDFLKSDGFANRNFMQLIHDDSLTFKEDIQKAQVSGQGDSLHEHIANLAGSPAIKKGILQTVKVVDELVKVMGRHKPENIVIEMARENQTTQKGQKNSRERMKRIEEGIKELGSQILKEHPVENTQLQNEKLYLYYLQNGRDMYVDQELDINRLSDYDVDHIVPQSFLKDDSIDNKVLTRSDKARGKSDNVPSEEVVKKMKNYWRQLLNAKLITQRKFDNLTKAERGGLSELDKAGFIKRQLVETRQITKHVAQILDSRMNTKYDENDKLIREVKVITLKSKLVSDFRKDFQFYKVREINNYHHAHDAYLNAVVGTALIKKYPKLESEFVYGDYKVYDVRKMIAKSEQEIGKATAKYFFYSNIMNFFKTEITLANGEIRKRPLIETNGETGEIVWDKGRDFATVRKVLSMPQVNIVKKTEVQTGGFSKESILPKRNSDKLIARKKDWDPKKYGGFDSPTVAYSVLVVAKVEKGKSKKLKSVKELLGITIMERSSFEKNPIDFLEAKGYKEVKKDLIIKLPKYSLFELENGRKRMLASAGELQKGNELALPSKYVNFLYLASHYEKLKGSPEDNEQKQLFVEQHKHYLDEIIEQISEFSKRVILADANLDKVLSAYNKHRDKPIREQAENIIHLFTLTNLGAPAAFKYFDTTIDRKRYTSTKEVLDATLIHQSITGLYETRIDLSQLGGDGGGSSEAAAKGGSGGGRDIMKDIKVRLMTDSPDDSQDLMIGAIESNLFADQISWKSDQPVWLNQWPLKQEKLQALQQLVTEQLQLGHLEESNSPWNTPVFVIKKKSGKWRLLQDLRAVNATMHDMGALQPGLPSPVAVPKGWEIIIIDLQDCFFNIKLHPEDCKRFAFSVPSPNFKRPYQRFQWKVLPQGMKNSPTLCQKFVDKAILTVRDKYQDSYIVHYMDDILLAHPSRSIVDEILTSMIQALNKHGLVVSTEKIQKYDNLKYLGTHIQGDSVSYQKLQIRTDKLRTLNDFQKLLGNINWIRPFLKLTTGELKPLFEILNGDSNPISTRKLTPEACKALQLMNERLSTARVKRLDLSQPWSLCILKTEYTPTACLWQDGVVEWIHLPHISPKVITPYDIFCTQLIIKGRHRSKELFSKDPDYIVVPYTKVQFDLLLQEKEDWPISLLGFLGEVHFHLPKDPLLTFTLQTAIIFPHMTSTTPLEKGIVIFTDGSANGRSVTYIQGREPIIKENTQNTAQQAEIVAVITAFEEVSQPFNLYTDSKYVTGLFPEIETATLSPRTKIYTELKHLQRLIHKRQEKFYIGHIRGHTGLPGPLAQGNAYADSLTRILTAGKRTADGSEFEKRTADGSEFESPKKKAKVE

SEQ ID NO: 3311 - protein, 2024 aa, synthetic construct
MPAAKRVKLDGGDKKYSIGLDIGTNSVGWAVITDEYKVPSKKFKVLGNTDRHSIKKNLIGALLFDSGETAEATRLKRTARRRYTRRKNRICYLQEIFSNEMAKVDDSFFHRLEESFLVEEDKKHERHPIFGNIVDEVAYHEKYPTIYHLRKKLVDSTDKADLRLIYLALAHMIKFRGHFLIEGDLNPDNSDVDKLFIQLVQTYNQLFEENPINASGVDAKAILSARLSKSRRLENLIAQLPGEKKNGLFGNLIALSLGLTPNFKSNFDLAEDAKLQLSKDTYDDDLDNLLAQIGDQYADLFLAAKNLSDAILLSDILRVNTEITKAPLSASMIKRYDEHHQDLTLLKALVRQQLPEKYKEIFFDQSKNGYAGYIDGGASQEEFYKFIKPILEKMDGTEELLVKLNREDLLRKQRTFDNGSIPHQIHLGELHAILRRQEDFYPFLKDNREKIEKILTFRIPYYVGPLARGNSRFAWMTRKSEETITPWNFEEVVDKGASAQSFIERMTNFDKNLPNEKVLPKHSLLYEYFTVYNELTKVKYVTEGMRKPAFLSGEQKKAIVDLLFKTNRKVTVKQLKEDYFKKIECFDSVEISGVEDRFNASLGTYHDLLKIIKDKDFLDNEENEDILEDIVLTLTLFEDREMIEERLKTYAHLFDDKVMKQLKRRRYTGWGRLSRKLINGIRDKQSGKTILDFLKSDGFANRNFMQLIHDDSLTFKEDIQKAQVSGQGDSLHEHIANLAGSPAIKKGILQTVKVVDELVKVMGRHKPENIVIEMARENQTTQKGQKNSRERMKRIEEGIKELGSQILKEHPVENTQLQNEKLYLYYLQNGRDMYVDQELDINRLSDYDVDHIVPQSFLKDDSIDNKVLTRSDKARGKSDNVPSEEVVKKMKNYWRQLLNAKLITQRKFDNLTKAERGGLSELDKAGFIKRQLVETRQITKHVAQILDSRMNTKYDENDKLIREVKVITLKSKLVSDFRKDFQFYKVREINNYHHAHDAYLNAVVGTALIKKYPKLESEFVYGDYKVYDVRKMIAKSEQEIGKATAKYFFYSNIMNFFKTEITLANGEIRKRPLIETNGETGEIVWDKGRDFATVRKVLSMPQVNIVKKTEVQTGGFSKESILPKRNSDKLIARKKDWDPKKYGGFDSPTVAYSVLVVAKVEKGKSKKLKSVKELLGITIMERSSFEKNPIDFLEAKGYKEVKKDLIIKLPKYSLFELENGRKRMLASAGELQKGNELALPSKYVNFLYLASHYEKLKGSPEDNEQKQLFVEQHKHYLDEIIEQISEFSKRVILADANLDKVLSAYNKHRDKPIREQAENIIHLFTLTNLGAPAAFKYFDTTIDRKRYTSTKEVLDATLIHQSITGLYETRIDLSQLGGDGGGGGGSSEAAAKGGGRDIMKDIKVRLMTDSPDDSQDLMIGAIESNLFADQISWKSDQPVWLNQWPLKQEKLQALQQLVTEQLQLGHLEESNSPWNTPVFVIKKKSGKWRLLQDLRAVNATMHDMGALQPGLPSPVAVPKGWEIIIIDLQDCFFNIKLHPEDCKRFAFSVPSPNFKRPYQRFQWKVLPQGMKNSPTLCQKFVDKAILTVRDKYQDSYIVHYMDDILLAHPSRSIVDEILTSMIQALNKHGLVVSTEKIQKYDNLKYLGTHIQGDSVSYQKLQIRTDKLRTLNDFQKLLGNINWIRPFLKLTTGELKPLFEILNGDSNPISTRKLTPEACKALQLMNERLSTARVKRLDLSQPWSLCILKTEYTPTACLWQDGVVEWIHLPHISPKVITPYDIFCTQLIIKGRHRSKELFSKDPDYIVVPYTKVQFDLLLQEKEDWPISLLGFLGEVHFHLPKDPLLTFTLQTAIIFPHMTSTTPLEKGIVIFTDGSANGRSVTYIQGREPIIKENTQNTAQQAEIVAVITAFEEVSQPFNLYTDSKYVTGLFPEIETATLSPRTKIYTELKHLQRLIHKRQEKFYIGHIRGHTGLPGPLAQGNAYADSLTRILTAGKRTADGSEFEKRTADGSEFESPKKKAKVE

SEQ ID NO: 3312 - protein, 2022 aa, synthetic construct; identical to SEQ ID NO: 3229

SEQ ID NO: 3313 - protein, 2021 aa, synthetic construct; identical to SEQ ID NO: 3208

SEQ ID NO: 3314 - protein, 2024 aa, synthetic construct
MPAAKRVKLDGGDKKYSIGLDIGTNSVGWAVITDEYKVPSKKFKVLGNTDRHSIKKNLIGALLFDSGETAEATRLKRTARRRYTRRKNRICYLQEIFSNEMAKVDDSFFHRLEESFLVEEDKKHERHPIFGNIVDEVAYHEKYPTIYHLRKKLVDSTDKADLRLIYLALAHMIKFRGHFLIEGDLNPDNSDVDKLFIQLVQTYNQLFEENPINASGVDAKAILSARLSKSRRLENLIAQLPGEKKNGLFGNLIALSLGLTPNFKSNFDLAEDAKLQLSKDTYDDDLDNLLAQIGDQYADLFLAAKNLSDAILLSDILRVNTEITKAPLSASMIKRYDEHHQDLTLLKALVRQQLPEKYKEIFFDQSKNGYAGYIDGGASQEEFYKFIKPILEKMDGTEELLVKLNREDLLRKQRTFDNGSIPHQIHLGELHAILRRQEDFYPFLKDNREKIEKILTFRIPYYVGPLARGNSRFAWMTRKSEETITPWNFEEVVDKGASAQSFIERMTNFDKNLPNEKVLPKHSLLYEYFTVYNELTKVKYVTEGMRKPAFLSGEQKKAIVDLLFKTNRKVTVKQLKEDYFKKIECFDSVEISGVEDRFNASLGTYHDLLKIIKDKDFLDNEENEDILEDIVLTLTLFEDREMIEERLKTYAHLFDDKVMKQLKRRRYTGWGRLSRKLINGIRDKQSGKTILDFLKSDGFANRNFMQLIHDDSLTFKEDIQKAQVSGQGDSLHEHIANLAGSPAIKKGILQTVKVVDELVKVMGRHKPENIVIEMARENQTTQKGQKNSRERMKRIEEGIKELGSQILKEHPVENTQLQNEKLYLYYLQNGRDMYVDQELDINRLSDYDVDHIVPQSFLKDDSIDNKVLTRSDKARGKSDNVPSEEVVKKMKNYWRQLLNAKLITQRKFDNLTKAERGGLSELDKAGFIKRQLVETRQITKHVAQILDSRMNTKYDENDKLIREVKVITLKSKLVSDFRKDFQFYKVREINNYHHAHDAYLNAVVGTALIKKYPKLESEFVYGDYKVYDVRKMIAKSEQEIGKATAKYFFYSNIMNFFKTEITLANGEIRKRPLIETNGETGEIVWDKGRDFATVRKVLSMPQVNIVKKTEVQTGGFSKESILPKRNSDKLIARKKDWDPKKYGGFDSPTVAYSVLVVAKVEKGKSKKLKSVKELLGITIMERSSFEKNPIDFLEAKGYKEVKKDLIIKLPKYSLFELENGRKRMLASAGELQKGNELALPSKYVNFLYLASHYEKLKGSPEDNEQKQLFVEQHKHYLDEIIEQISEFSKRVILADANLDKVLSAYNKHRDKPIREQAENIIHLFTLTNLGAPAAFKYFDTTIDRKRYTSTKEVLDATLIHQSITGLYETRIDLSQLGGDGGGSSGGSEAAAKGGGRDIMKDIKVRLMTDSPDDSQDLMIGAIESNLFADQISWKSDQPVWLNQWPLKQEKLQALQQLVTEQLQLGHLEESNSPWNTPVFVIKKKSGKWRLLQDLRAVNATMHDMGALQPGLPSPVAVPKGWEIIIIDLQDCFFNIKLHPEDCKRFAFSVPSPNFKRPYQRFQWKVLPQGMKNSPTLCQKFVDKAILTVRDKYQDSYIVHYMDDILLAHPSRSIVDEILTSMIQALNKHGLVVSTEKIQKYDNLKYLGTHIQGDSVSYQKLQIRTDKLRTLNDFQKLLGNINWIRPFLKLTTGELKPLFEILNGDSNPISTRKLTPEACKALQLMNERLSTARVKRLDLSQPWSLCILKTEYTPTACLWQDGVVEWIHLPHISPKVITPYDIFCTQLIIKGRHRSKELFSKDPDYIVVPYTKVQFDLLLQEKEDWPISLLGFLGEVHFHLPKDPLLTFTLQTAIIFPHMTSTTPLEKGIVIFTDGSANGRSVTYIQGREPIIKENTQNTAQQAEIVAVITAFEEVSQPFNLYTDSKYVTGLFPEIETATLSPRTKIYTELKHLQRLIHKRQEKFYIGHIRGHTGLPGPLAQGNAYADSLTRILTAGKRTADGSEFEKRTADGSEFESPKKKAKVE

SEQ ID NO: 3315 - protein, 2022 aa, synthetic construct; identical to SEQ ID NO: 3199

SEQ ID NO: 3316 - protein, 2022 aa, synthetic construct
MPAAKRVKLDGGDKKYSIGLDIGTNSVGWAVITDEYKVPSKKFKVLGNTDRHSIKKNLIGALLFDSGETAEATRLKRTARRRYTRRKNRICYLQEIFSNEMAKVDDSFFHRLEESFLVEEDKKHERHPIFGNIVDEVAYHEKYPTIYHLRKKLVDSTDKADLRLIYLALAHMIKFRGHFLIEGDLNPDNSDVDKLFIQLVQTYNQLFEENPINASGVDAKAILSARLSKSRRLENLIAQLPGEKKNGLFGNLIALSLGLTPNFKSNFDLAEDAKLQLSKDTYDDDLDNLLAQIGDQYADLFLAAKNLSDAILLSDILRVNTEITKAPLSASMIKRYDEHHQDLTLLKALVRQQLPEKYKEIFFDQSKNGYAGYIDGGASQEEFYKFIKPILEKMDGTEELLVKLNREDLLRKQRTFDNGSIPHQIHLGELHAILRRQEDFYPFLKDNREKIEKILTFRIPYYVGPLARGNSRFAWMTRKSEETITPWNFEEVVDKGASAQSFIERMTNFDKNLPNEKVLPKHSLLYEYFTVYNELTKVKYVTEGMRKPAFLSGEQKKAIVDLLFKTNRKVTVKQLKEDYFKKIECFDSVEISGVEDRFNASLGTYHDLLKIIKDKDFLDNEENEDILEDIVLTLTLFEDREMIEERLKTYAHLFDDKVMKQLKRRRYTGWGRLSRKLINGIRDKQSGKTILDFLKSDGFANRNFMQLIHDDSLTFKEDIQKAQVSGQGDSLHEHIANLAGSPAIKKGILQTVKVVDELVKVMGRHKPENIVIEMARENQTTQKGQKNSRERMKRIEEGIKELGSQILKEHPVENTQLQNEKLYLYYLQNGRDMYVDQELDINRLSDYDVDHIVPQSFLKDDSIDNKVLTRSDKARGKSDNVPSEEVVKKMKNYWRQLLNAKLITQRKFDNLTKAERGGLSELDKAGFIKRQLVETRQITKHVAQILDSRMNTKYDENDKLIREVKVITLKSKLVSDFRKDFQFYKVREINNYHHAHDAYLNAVVGTALIKKYPKLESEFVYGDYKVYDVRKMIAKSEQEIGKATAKYFFYSNIMNFFKTEITLANGEIRKRPLIETNGETGEIVWDKGRDFATVRKVLSMPQVNIVKKTEVQTGGFSKESILPKRNSDKLIARKKDWDPKKYGGFDSPTVAYSVLVVAKVEKGKSKKLKSVKELLGITIMERSSFEKNPIDFLEAKGYKEVKKDLIIKLPKYSLFELENGRKRMLASAGELQKGNELALPSKYVNFLYLASHYEKLKGSPEDNEQKQLFVEQHKHYLDEIIEQISEFSKRVILADANLDKVLSAYNKHRDKPIREQAENIIHLFTLTNLGAPAAFKYFDTTIDRKRYTSTKEVLDATLIHQSITGLYETRIDLSQLGGDGGGGSGGSGGSGGGRDIMKDIKVRLMTDSPDDSQDLMIGAIESNLFADQISWKSDQPVWLNQWPLKQEKLQALQQLVTEQLQLGHLEESNSPWNTPVFVIKKKSGKWRLLQDLRAVNATMHDMGALQPGLPSPVAVPKGWEIIIIDLQDCFFNIKLHPEDCKRFAFSVPSPNFKRPYQRFQWKVLPQGMKNSPTLCQKFVDKAILTVRDKYQDSYIVHYMDDILLAHPSRSIVDEILTSMIQALNKHGLVVSTEKIQKYDNLKYLGTHIQGDSVSYQKLQIRTDKLRTLNDFQKLLGNINWIRPFLKLTTGELKPLFEILNGDSNPISTRKLTPEACKALQLMNERLSTARVKRLDLSQPWSLCILKTEYTPTACLWQDGVVEWIHLPHISPKVITPYDIFCTQLIIKGRHRSKELFSKDPDYIVVPYTKVQFDLLLQEKEDWPISLLGFLGEVHFHLPKDPLLTFTLQTAIIFPHMTSTTPLEKGIVIFTDGSANGRSVTYIQGREPIIKENTQNTAQQAEIVAVITAFEEVSQPFNLYTDSKYVTGLFPEIETATLSPRTKIYTELKHLQRLIHKRQEKFYIGHIRGHTGLPGPLAQGNAYADSLTRILTAGKRTADGSEFEKRTADGSEFESPKKKAKVE

SEQ ID NO: 3317 - protein, 2025 aa, synthetic construct
MPAAKRVKLDGGDKKYSIGLDIGTNSVGWAVITDEYKVPSKKFKVLGNTDRHSIKKNLIGALLFDSGETAEATRLKRTARRRYTRRKNRICYLQEIFSNEMAKVDDSFFHRLEESFLVEEDKKHERHPIFGNIVDEVAYHEKYPTIYHLRKKLVDSTDKADLRLIYLALAHMIKFRGHFLIEGDLNPDNSDVDKLFIQLVQTYNQLFEENPINASGVDAKAILSARLSKSRRLENLIAQLPGEKKNGLFGNLIALSLGLTPNFKSNFDLAEDAKLQLSKDTYDDDLDNLLAQIGDQYADLFLAAKNLSDAILLSDILRVNTEITKAPLSASMIKRYDEHHQDLTLLKALVRQQLPEKYKEIFFDQSKNGYAGYIDGGASQEEFYKFIKPILEKMDGTEELLVKLNREDLLRKQRTFDNGSIPHQIHLGELHAILRRQEDFYPFLKDNREKIEKILTFRIPYYVGPLARGNSRFAWMTRKSEETITPWNFEEVVDKGASAQSFIERMTNFDKNLPNEKVLPKHSLLYEYFTVYNELTKVKYVTEGMRKPAFLSGEQKKAIVDLLFKTNRKVTVKQLKEDYFKKIECFDSVEISGVEDRFNASLGTYHDLLKIIKDKDFLDNEENEDILEDIVLTLTLFEDREMIEERLKTYAHLFDDKVMKQLKRRRYTGWGRLSRKLINGIRDKQSGKTILDFLKSDGFANRNFMQLIHDDSLTFKEDIQKAQVSGQGDSLHEHIANLAGSPAIKKGILQTVKVVDELVKVMGRHKPENIVIEMARENQTTQKGQKNSRERMKRIEEGIKELGSQILKEHPVENTQLQNEKLYLYYLQNGRDMYVDQELDINRLSDYDVDHIVPQSFLKDDSIDNKVLTRSDKARGKSDNVPSEEVVKKMKNYWRQLLNAKLITQRKFDNLTKAERGGLSELDKAGFIKRQLVETRQITKHVAQILDSRMNTKYDENDKLIREVKVITLKSKLVSDFRKDFQFYKVREINNYHHAHDAYLNAVVGTALIKKYPKLESEFVYGDYKVYDVRKMIAKSEQEIGKATAKYFFYSNIMNFFKTEITLANGEIRKRPLIETNGETGEIVWDKGRDFATVRKVLSMPQVNIVKKTEVQTGGFSKESILPKRNSDKLIARKKDWDPKKYGGFDSPTVAYSVLVVAKVEKGKSKKLKSVKELLGITIMERSSFEKNPIDFLEAKGYKEVKKDLIIKLPKYSLFELENGRKRMLASAGELQKGNELALPSKYVNFLYLASHYEKLKGSPEDNEQKQLFVEQHKHYLDEIIEQISEFSKRVILADANLDKVLSAYNKHRDKPIREQAENIIHLFTLTNLGAPAAFKYFDTTIDRKRYTSTKEVLDATLIHQSITGLYETRIDLSQLGGDGGGGSGGSGGSGGSGGGRDIMKDIKVRLMTDSPDDSQDLMIGAIESNLFADQISWKSDQPVWLNQWPLKQEKLQALQQLVTEQLQLGHLEESNSPWNTPVFVIKKKSGKWRLLQDLRAVNATMHDMGALQPGLPSPVAVPKGWEIIIIDLQDCFFNIKLHPEDCKRFAFSVPSPNFKRPYQRFQWKVLPQGMKNSPTLCQKFVDKAILTVRDKYQDSYIVHYMDDILLAHPSRSIVDEILTSMIQALNKHGLVVSTEKIQKYDNLKYLGTHIQGDSVSYQKLQIRTDKLRTLNDFQKLLGNINWIRPFLKLTTGELKPLFEILNGDSNPISTRKLTPEACKALQLMNERLSTARVKRLDLSQPWSLCILKTEYTPTACLWQDGVVEWIHLPHISPKVITPYDIFCTQLIIKGRHRSKELFSKDPDYIVVPYTKVQFDLLLQEKEDWPISLLGFLGEVHFHLPKDPLLTFTLQTAIIFPHMTSTTPLEKGIVIFTDGSANGRSVTYIQGREPIIKENTQNTAQQAEIVAVITAFEEVSQPFNLYTDSKYVTGLFPEIETATLSPRTKIYTELKHLQRLIHKRQEKFYIGHIRGHTGLPGPLAQGNAYADSLTRILTAGKRTADGSEFEKRTADGSEFESPKKKAKVE

SEQ ID NO: 3318 - protein, 2024 aa, synthetic construct; identical to SEQ ID NO: 3207

SEQ ID NO: 3319 - protein, 2016 aa, synthetic construct; identical to SEQ ID NO: 3210

SEQ ID NO: 3320 - protein, 2024 aa, synthetic construct
MPAAKRVKLDGGDKKYSIGLDIGTNSVGWAVITDEYKVPSKKFKVLGNTDRHSIKKNLIGALLFDSGETAEATRLKRTARRRYTRRKNRICYLQEIFSNEMAKVDDSFFHRLEESFLVEEDKKHERHPIFGNIVDEVAYHEKYPTIYHLRKKLVDSTDKADLRLIYLALAHMIKFRGHFLIEGDLNPDNSDVDKLFIQLVQTYNQLFEENPINASGVDAKAILSARLSKSRRLENLIAQLPGEKKNGLFGNLIALSLGLTPNFKSNFDLAEDAKLQLSKDTYDDDLDNLLAQIGDQYADLFLAAKNLSDAILLSDILRVNTEITKAPLSASMIKRYDEHHQDLTLLKALVRQQLPEKYKEIFFDQSKNGYAGYIDGGASQEEFYKFIKPILEKMDGTEELLVKLNREDLLRKQRTFDNGSIPHQIHLGELHAILRRQEDFYPFLKDNREKIEKILTFRIPYYVGPLARGNSRFAWMTRKSEETITPWNFEEVVDKGASAQSFIERMTNFDKNLPNEKVLPKHSLLYEYFTVYNELTKVKYVTEGMRKPAFLSGEQKKAIVDLLFKTNRKVTVKQLKEDYFKKIECFDSVEISGVEDRFNASLGTYHDLLKIIKDKDFLDNEENEDILEDIVLTLTLFEDREMIEERLKTYAHLFDDKVMKQLKRRRYTGWGRLSRKLINGIRDKQSGKTILDFLKSDGFANRNFMQLIHDDSLTFKEDIQKAQVSGQGDSLHEHIANLAGSPAIKKGILQTVKVVDELVKVMGRHKPENIVIEMARENQTTQKGQKNSRERMKRIEEGIKELGSQILKEHPVENTQLQNEKLYLYYLQNGRDMYVDQELDINRLSDYDVDHIVPQSFLKDDSIDNKVLTRSDKARGKSDNVPSEEVVKKMKNYWRQLLNAKLITQRKFDNLTKAERGGLSELDKAGFIKRQLVETRQITKHVAQILDSRMNTKYDENDKLIREVKVITLKSKLVSDFRKDFQFYKVREINNYHHAHDAYLNAVVGTALIKKYPKLESEFVYGDYKVYDVRKMIAKSEQEIGKATAKYFFYSNIMNFFKTEITLANGEIRKRPLIETNGETGEIVWDKGRDFATVRKVLSMPQVNIVKKTEVQTGGFSKESILPKRNSDKLIARKKDWDPKKYGGFDSPTVAYSVLVVAKVEKGKSKKLKSVKELLGITIMERSSFEKNPIDFLEAKGYKEVKKDLIIKLPKYSLFELENGRKRMLASAGELQKGNELALPSKYVNFLYLASHYEKLKGSPEDNEQKQLFVEQHKHYLDEIIEQISEFSKRVILADANLDKVLSAYNKHRDKPIREQAENIIHLFTLTNLGAPAAFKYFDTTIDRKRYTSTKEVLDATLIHQSITGLYETRIDLSQLGGDGGGGSPAPEAAAKGGGRDIMKDIKVRLMTDSPDDSQDLMIGAIESNLFADQISWKSDQPVWLNQWPLKQEKLQALQQLVTEQLQLGHLEESNSPWNTPVFVIKKKSGKWRLLQDLRAVNATMHDMGALQPGLPSPVAVPKGWEIIIIDLQDCFFNIKLHPEDCKRFAFSVPSPNFKRPYQRFQWKVLPQGMKNSPTLCQKFVDKAILTVRDKYQDSYIVHYMDDILLAHPSRSIVDEILTSMIQALNKHGLVVSTEKIQKYDNLKYLGTHIQGDSVSYQKLQIRTDKLRTLNDFQKLLGNINWIRPFLKLTTGELKPLFEILNGDSNPISTRKLTPEACKALQLMNERLSTARVKRLDLSQPWSLCILKTEYTPTACLWQDGVVEWIHLPHISPKVITPYDIFCTQLIIKGRHRSKELFSKDPDYIVVPYTKVQFDLLLQEKEDWPISLLGFLGEVHFHLPKDPLLTFTLQTAIIFPHMTSTTPLEKGIVIFTDGSANGRSVTYIQGREPIIKENTQNTAQQAEIVAVITAFEEVSQPFNLYTDSKYVTGLFPEIETATLSPRTKIYTELKHLQRLIHKRQEKFYIGHIRGHTGLPGPLAQGNAYADSLTRILTAGKRTADGSEFEKRTADGSEFESPKKKAKVE

SEQ ID NO: 3321 - protein, 2022 aa, synthetic construct; identical to SEQ ID NO: 3215

SEQ ID NO: 3322 - protein, 2024 aa, synthetic construct; identical to SEQ ID NO: 3232

SEQ ID NO: 3323 - protein, 2024 aa, synthetic construct; identical to SEQ ID NO: 3235

SEQ ID NO: 3324 - protein, 2024 aa, synthetic construct; identical to SEQ ID NO: 3236

SEQ ID NO: 3325 - protein, 2024 aa, synthetic construct
MPAAKRVKLDGGDKKYSIGLDIGTNSVGWAVITDEYKVPSKKFKVLGNTDRHSIKKNLIGALLFDSGETAEATRLKRTARRRYTRRKNRICYLQEIFSNEMAKVDDSFFHRLEESFLVEEDKKHERHPIFGNIVDEVAYHEKYPTIYHLRKKLVDSTDKADLRLIYLALAHMIKFRGHFLIEGDLNPDNSDVDKLFIQLVQTYNQLFEENPINASGVDAKAILSARLSKSRRLENLIAQLPGEKKNGLFGNLIALSLGLTPNFKSNFDLAEDAKLQLSKDTYDDDLDNLLAQIGDQYADLFLAAKNLSDAILLSDILRVNTEITKAPLSASMIKRYDEHHQDLTLLKALVRQQLPEKYKEIFFDQSKNGYAGYIDGGASQEEFYKFIKPILEKMDGTEELLVKLNREDLLRKQRTFDNGSIPHQIHLGELHAILRRQEDFYPFLKDNREKIEKILTFRIPYYVGPLARGNSRFAWMTRKSEETITPWNFEEVVDKGASAQSFIERMTNFDKNLPNEKVLPKHSLLYEYFTVYNELTKVKYVTEGMRKPAFLSGEQKKAIVDLLFKTNRKVTVKQLKEDYFKKIECFDSVEISGVEDRFNASLGTYHDLLKIIKDKDFLDNEENEDILEDIVLTLTLFEDREMIEERLKTYAHLFDDKVMKQLKRRRYTGWGRLSRKLINGIRDKQSGKTILDFLKSDGFANRNFMQLIHDDSLTFKEDIQKAQVSGQGDSLHEHIANLAGSPAIKKGILQTVKVVDELVKVMGRHKPENIVIEMARENQTTQKGQKNSRERMKRIEEGIKELGSQILKEHPVENTQLQNEKLYLYYLQNGRDMYVDQELDINRLSDYDVDHIVPQSFLKDDSIDNKVLTRSDKARGKSDNVPSEEVVKKMKNYWRQLLNAKLITQRKFDNLTKAERGGLSELDKAGFIKRQLVETRQITKHVAQILDSRMNTKYDENDKLIREVKVITLKSKLVSDFRKDFQFYKVREINNYHHAHDAYLNAVVGTALIKKYPKLESEFVYGDYKVYDVRKMIAKSEQEIGKATAKYFFYSNIMNFFKTEITLANGEIRKRPLIETNGETGEIVWDKGRDFATVRKVLSMPQVNIVKKTEVQTGGFSKESILPKRNSDKLIARKKDWDPKKYGGFDSPTVAYSVLVVAKVEKGKSKKLKSVKELLGITIMERSSFEKNPIDFLEAKGYKEVKKDLIIKLPKYSLFELENGRKRMLASAGELQKGNELALPSKYVNFLYLASHYEKLKGSPEDNEQKQLFVEQHKHYLDEIIEQISEFSKRVILADANLDKVLSAYNKHRDKPIREQAENIIHLFTLTNLGAPAAFKYFDTTIDRKRYTSTKEVLDATLIHQSITGLYETRIDLSQLGGDGGGGGGGSEAAAKGGGRDIMKDIKVRLMTDSPDDSQDLMIGAIESNLFADQISWKSDQPVWLNQWPLKQEKLQALQQLVTEQLQLGHLEESNSPWNTPVFVIKKKSGKWRLLQDLRAVNATMHDMGALQPGLPSPVAVPKGWEIIIIDLQDCFFNIKLHPEDCKRFAFSVPSPNFKRPYQRFQWKVLPQGMKNSPTLCQKFVDKAILTVRDKYQDSYIVHYMDDILLAHPSRSIVDEILTSMIQALNKHGLVVSTEKIQKYDNLKYLGTHIQGDSVSYQKLQIRTDKLRTLNDFQKLLGNINWIRPFLKLTTGELKPLFEILNGDSNPISTRKLTPEACKALQLMNERLSTARVKRLDLSQPWSLCILKTEYTPTACLWQDGVVEWIHLPHISPKVITPYDIFCTQLIIKGRHRSKELFSKDPDYIVVPYTKVQFDLLLQEKEDWPISLLGFLGEVHFHLPKDPLLTFTLQTAIIFPHMTSTTPLEKGIVIFTDGSANGRSVTYIQGREPIIKENTQNTAQQAEIVAVITAFEEVSQPFNLYTDSKYVTGLFPEIETATLSPRTKIYTELKHLQRLIHKRQEKFYIGHIRGHTGLPGPLAQGNAYADSLTRILTAGKRTADGSEFEKRTADGSEFESPKKKAKVE

SEQ ID NO: 3326 - protein, 2024 aa, synthetic construct
MPAAKRVKLDGGDKKYSIGLDIGTNSVGWAVITDEYKVPSKKFKVLGNTDRHSIKKNLIGALLFDSGETAEATRLKRTARRRYTRRKNRICYLQEIFSNEMAKVDDSFFHRLEESFLVEEDKKHERHPIFGNIVDEVAYHEKYPTIYHLRKKLVDSTDKADLRLIYLALAHMIKFRGHFLIEGDLNPDNSDVDKLFIQLVQTYNQLFEENPINASGVDAKAILSARLSKSRRLENLIAQLPGEKKNGLFGNLIALSLGLTPNFKSNFDLAEDAKLQLSKDTYDDDLDNLLAQIGDQYADLFLAAKNLSDAILLSDILRVNTEITKAPLSASMIKRYDEHHQDLTLLKALVRQQLPEKYKEIFFDQSKNGYAGYIDGGASQEEFYKFIKPILEKMDGTEELLVKLNREDLLRKQRTFDNGSIPHQIHLGELHAILRRQEDFYPFLKDNREKIEKILTFRIPYYVGPLARGNSRFAWMTRKSEETITPWNFEEVVDKGASAQSFIERMTNFDKNLPNEKVLPKHSLLYEYFTVYNELTKVKYVTEGMRKPAFLSGEQKKAIVDLLFKTNRKVTVKQLKEDYFKKIECFDSVEISGVEDRFNASLGTYHDLLKIIKDKDFLDNEENEDILEDIVLTLTLFEDREMIEERLKTYAHLFDDKVMKQLKRRRYTGWGRLSRKLINGIRDKQSGKTILDFLKSDGFANRNFMQLIHDDSLTFKEDIQKAQVSGQGDSLHEHIANLAGSPAIKKGILQTVKVVDELVKVMGRHKPENIVIEMARENQTTQKGQKNSRERMKRIEEGIKELGSQILKEHPVENTQLQNEKLYLYYLQNGRDMYVDQELDINRLSDYDVDHIVPQSFLKDDSIDNKVLTRSDKARGKSDNVPSEEVVKKMKNYWRQLLNAKLITQRKFDNLTKAERGGLSELDKAGFIKRQLVETRQITKHVAQILDSRMNTKYDENDKLIREVKVITLKSKLVSDFRKDFQFYKVREINNYHHAHDAYLNAVVGTALIKKYPKLESEFVYGDYKVYDVRKMIAKSEQEIGKATAKYFFYSNIMNFFKTEITLANGEIRKRPLIETNGETGEIVWDKGRDFATVRKVLSMPQVNIVKKTEVQTGGFSKESILPKRNSDKLIARKKDWDPKKYGGFDSPTVAYSVLVVAKVEKGKSKKLKSVKELLGITIMERSSFEKNPIDFLEAKGYKEVKKDLIIKLPKYSLFELENGRKRMLASAGELQKGNELALPSKYVNFLYLASHYEKLKGSPEDNEQKQLFVEQHKHYLDEIIEQISEFSKRVILADANLDKVLSAYNKHRDKPIREQAENIIHLFTLTNLGAPAAFKYFDTTIDRKRYTSTKEVLDATLIHQSITGLYETRIDLSQLGGDGGGGSEAAAKGSSGGGRDIMKDIKVRLMTDSPDDSQDLMIGAIESNLFADQISWKSDQPVWLNQWPLKQEKLQALQQLVTEQLQLGHLEESNSPWNTPVFVIKKKSGKWRLLQDLRAVNATMHDMGALQPGLPSPVAVPKGWEIIIIDLQDCFFNIKLHPEDCKRFAFSVPSPNFKRPYQRFQWKVLPQGMKNSPTLCQKFVDKAILTVRDKYQDSYIVHYMDDILLAHPSRSIVDEILTSMIQALNKHGLVVSTEKIQKYDNLKYLGTHIQGDSVSYQKLQIRTDKLRTLNDFQKLLGNINWIRPFLKLTTGELKPLFEILNGDSNPISTRKLTPEACKALQLMNERLSTARVKRLDLSQPWSLCILKTEYTPTACLWQDGVVEWIHLPHISPKVITPYDIFCTQLIIKGRHRSKELFSKDPDYIVVPYTKVQFDLLLQEKEDWPISLLGFLGEVHFHLPKDPLLTFTLQTAIIFPHMTSTTPLEKGIVIFTDGSANGRSVTYIQGREPIIKENTQNTAQQAEIVAVITAFEEVSQPFNLYTDSKYVTGLFPEIETATLSPRTKIYTELKHLQRLIHKRQEKFYIGHIRGHTGLPGPLAQGNAYADSLTRILTAGKRTADGSEFEKRTADGSEFESPKKKAKVE

SEQ ID NO: 3327 - protein, 2018 aa, synthetic construct
MPAAKRVKLDGGDKKYSIGLDIGTNSVGWAVITDEYKVPSKKFKVLGNTDRHSIKKNLIGALLFDSGETAEATRLKRTARRRYTRRKNRICYLQEIFSNEMAKVDDSFFHRLEESFLVEEDKKHERHPIFGNIVDEVAYHEKYPTIYHLRKKLVDSTDKADLRLIYLALAHMIKFRGHFLIEGDLNPDNSDVDKLFIQLVQTYNQLFEENPINASGVDAKAILSARLSKSRRLENLIAQLPGEKKNGLFGNLIALSLGLTPNFKSNFDLAEDAKLQLSKDTYDDDLDNLLAQIGDQYADLFLAAKNLSDAILLSDILRVNTEITKAPLSASMIKRYDEHHQDLTLLKALVRQQLPEKYKEIFFDQSKNGYAGYIDGGASQEEFYKFIKPILEKMDGTEELLVKLNREDLLRKQRTFDNGSIPHQIHLGELHAILRRQEDFYPFLKDNREKIEKILTFRIPYYVGPLARGNSRFAWMTRKSEETITPWNFEEVVDKGASAQSFIERMTNFDKNLPNEKVLPKHSLLYEYFTVYNELTKVKYVTEGMRKPAFLSGEQKKAIVDLLFKTNRKVTVKQLKEDYFKKIECFDSVEISGVEDRFNASLGTYHDLLKIIKDKDFLDNEENEDILEDIVLTLTLFEDREMIEERLKTYAHLFDDKVMKQLKRRRYTGWGRLSRKLINGIRDKQSGKTILDFLKSDGFANRNFMQLIHDDSLTFKEDIQKAQVSGQGDSLHEHIANLAGSPAIKKGILQTVKVVDELVKVMGRHKPENIVIEMARENQTTQKGQKNSRERMKRIEEGIKELGSQILKEHPVENTQLQNEKLYLYYLQNGRDMYVDQELDINRLSDYDVDHIVPQSFLKDDSIDNKVLTRSDKARGKSDNVPSEEVVKKMKNYWRQLLNAKLITQRKFDNLTKAERGGLSELDKAGFIKRQLVETRQITKHVAQILDSRMNTKYDENDKLIREVKVITLKSKLVSDFRKDFQFYKVREINNYHHAHDAYLNAVVGTALIKKYPKLESEFVYGDYKVYDVRKMIAKSEQEIGKATAKYFFYSNIMNFFKTEITLANGEIRKRPLIETNGETGEIVWDKGRDFATVRKVLSMPQVNIVKKTEVQTGGFSKESILPKRNSDKLIARKKDWDPKKYGGFDSPTVAYSVLVVAKVEKGKSKKLKSVKELLGITIMERSSFEKNPIDFLEAKGYKEVKKDLIIKLPKYSLFELENGRKRMLASAGELQKGNELALPSKYVNFLYLASHYEKLKGSPEDNEQKQLFVEQHKHYLDEIIEQISEFSKRVILADANLDKVLSAYNKHRDKPIREQAENIIHLFTLTNLGAPAAFKYFDTTIDRKRYTSTKEVLDATLIHQSITGLYETRIDLSQLGGDGGPAPAPGGGRDIMKDIKVRLMTDSPDDSQDLMIGAIESNLFADQISWKSDQPVWLNQWPLKQEKLQALQQLVTEQLQLGHLEESNSPWNTPVFVIKKKSGKWRLLQDLRAVNATMHDMGALQPGLPSPVAVPKGWEIIIIDLQDCFFNIKLHPEDCKRFAFSVPSPNFKRPYQRFQWKVLPQGMKNSPTLCQKFVDKAILTVRDKYQDSYIVHYMDDILLAHPSRSIVDEILTSMIQALNKHGLVVSTEKIQKYDNLKYLGTHIQGDSVSYQKLQIRTDKLRTLNDFQKLLGNINWIRPFLKLTTGELKPLFEILNPDSNPISTRKLTPEACKALQLMNERLSTARVKRLDLSQPWSLCILKTEYTPTACLWQDGVVEWIHLPHISPKVITPYDIFCTQLIIKGRHRSKELFSKDPDYIVVPYTKVQFDLLLQEKEDWPISLLGFLGEVHFHLPKDPLLTFTLQTAIIFPHMTSTTPLEKGIVIFTDGSANGRSVTYIQGREPIIKENTQNTAQQAEIVAVITAFEEVSQPFNLYTDSKYVTGLFPEIETATLSPRTKIYTELKHLQRLIHKRQEKFYIGHIRGHTGLPGPLAQGNAYADSLTRILTAGKRTADGSEFEKRTADGSEFESPKKKAKVE

SEQ ID NO: 3328 - protein, 2028 aa, synthetic construct
MPAAKRVKLDGGDKKYSIGLDIGTNSVGWAVITDEYKVPSKKFKVLGNTDRHSIKKNLIGALLFDSGETAEATRLKRTARRRYTRRKNRICYLQEIFSNEMAKVDDSFFHRLEESFLVEEDKKHERHPIFGNIVDEVAYHEKYPTIYHLRKKLVDSTDKADLRLIYLALAHMIKFRGHFLIEGDLNPDNSDVDKLFIQLVQTYNQLFEENPINASGVDAKAILSARLSKSRRLENLIAQLPGEKKNGLFGNLIALSLGLTPNFKSNFDLAEDAKLQLSKDTYDDDLDNLLAQIGDQYADLFLAAKNLSDAILLSDILRVNTEITKAPLSASMIKRYDEHHQDLTLLKALVRQQLPEKYKEIFFDQSKNGYAGYIDGGASQEEFYKFIKPILEKMDGTEELLVKLNREDLLRKQRTFDNGSIPHQIHLGELHAILRRQEDFYPFLKDNREKIEKILTFRIPYYVGPLARGNSRFAWMTRKSEETITPWNFEEVVDKGASAQSFIERMTNFDKNLPNEKVLPKHSLLYEYFTVYNELTKVKYVTEGMRKPAFLSGEQKKAIVDLLFKTNRKVTVKQLKEDYFKKIECFDSVEISGVEDRFNASLGTYHDLLKIIKDKDFLDNEENEDILEDIVLTLTLFEDREMIEERLKTYAHLFDDKVMKQLKRRRYTGWGRLSRKLINGIRDKQSGKTILDFLKSDGFANRNFMQLIHDDSLTFKEDIQKAQVSGQGDSLHEHIANLAGSPAIKKGILQTVKVVDELVKVMGRHKPENIVIEMARENQTTQKGQKNSRERMKRIEEGIKELGSQILKEHPVENTQLQNEKLYLYYLQNGRDMYVDQELDINRLSDYDVDHIVPQSFLKDDSIDNKVLTRSDKARGKSDNVPSEEVVKKMKNYWRQLLNAKLITQRKFDNLTKAERGGLSELDKAGFIKRQLVETRQITKHVAQILDSRMNTKYDENDKLIREVKVITLKSKLVSDFRKDFQFYKVREINNYHHAHDAYLNAVVGTALIKKYPKLESEFVYGDYKVYDVRKMIAKSEQEIGKATAKYFFYSNIMNFFKTEITLANGEIRKRPLIETNGETGEIVWDKGRDFATVRKVLSMPQVNIVKKTEVQTGGFSKESILPKRNSDKLIARKKDWDPKKYGGFDSPTVAYSVLVVAKVEKGKSKKLKSVKELLGITIMERSSFEKNPIDFLEAKGYKEVKKDLIIKLPKYSLFELENGRKRMLASAGELQKGNELALPSKYVNFLYLASHYEKLKGSPEDNEQKQLFVEQHKHYLDEIIEQISEFSKRVILADANLDKVLSAYNKHRDKPIREQAENIIHLFTLTNLGAPAAFKYFDTTIDRKRYTSTKEVLDATLIHQSITGLYETRIDLSQLGGDGGGGGGSEAAAKGGGGSGGGRDIMKDIKVRLMTDSPDDSQDLMIGAIESNLFADQISWKSDQPVWLNQWPLKQEKLQALQQLVTEQLQLGHLEESNSPWNTPVFVIKKKSGKWRLLQDLRAVNATMHDMGALQPGLPSPVAVPKGWEIIIIDLQDCFFNIKLHPEDCKRFAFSVPSPNFKRPYQRFQWKVLPQGMKNSPTLCQKFVDKAILTVRDKYQDSYIVHYMDDILLAHPSRSIVDEILTSMIQALNKHGLVVSTEKIQKYDNLKYLGTHIQGDSVSYQKLQIRTDKLRTLNDFQKLLGNINWIRPFLKLTTGELKPLFEILNPDSNPISTRKLTPEACKALQLMNERLSTARVKRLDLSQPWSLCILKTEYTPTACLWQDGVVEWIHLPHISPKVITPYDIFCTQLIIKGRHRSKELFSKDPDYIVVPYTKVQFDLLLQEKEDWPISLLGFLGEVHFHLPKDPLLTFTLQTAIIFPHMTSTTPLEKGIVIFTDGSANGRSVTYIQGREPIIKENTQNTAQQAEIVAVITAFEEVSQPFNLYTDSKYVTGLFPEIETATLSPRTKIYTELKHLQRLIHKRQEKFYIGHIRGHTGLPGPLAQGNAYADSLTRILTAGKRTADGSEFEKRTADGSEFESPKKKAKVE

SEQ ID NO: 3329 - protein, 2022 aa, synthetic construct
MPAAKRVKLDGGDKKYSIGLDIGTNSVGWAVITDEYKVPSKKFKVLGNTDRHSIKKNLIGALLFDSGETAEATRLKRTARRRYTRRKNRICYLQEIFSNEMAKVDDSFFHRLEESFLVEEDKKHERHPIFGNIVDEVAYHEKYPTIYHLRKKLVDSTDKADLRLIYLALAHMIKFRGHFLIEGDLNPDNSDVDKLFIQLVQTYNQLFEENPINASGVDAKAILSARLSKSRRLENLIAQLPGEKKNGLFGNLIALSLGLTPNFKSNFDLAEDAKLQLSKDTYDDDLDNLLAQIGDQYADLFLAAKNLSDAILLSDILRVNTEITKAPLSASMIKRYDEHHQDLTLLKALVRQQLPEKYKEIFFDQSKNGYAGYIDGGASQEEFYKFIKPILEKMDGTEELLVKLNREDLLRKQRTFDNGSIPHQIHLGELHAILRRQEDFYPFLKDNREKIEKILTFRIPYYVGPLARGNSRFAWMTRKSEETITPWNFEEVVDKGASAQSFIERMTNFDKNLPNEKVLPKHSLLYEYFTVYNELTKVKYVTEGMRKPAFLSGEQKKAIVDLLFKTNRKVTVKQLKEDYFKKIECFDSVEISGVEDRFNASLGTYHDLLKIIKDKDFLDNEENEDILEDIVLTLTLFEDREMIEERLKTYAHLFDDKVMKQLKRRRYTGWGRLSRKLINGIRDKQSGKTILDFLKSDGFANRNFMQLIHDDSLTFKEDIQKAQVSGQGDSLHEHIANLAGSPAIKKGILQTVKVVDELVKVMGRHKPENIVIEMARENQTTQKGQKNSRERMKRIEEGIKELGSQILKEHPVENTQLQNEKLYLYYLQNGRDMYVDQELDINRLSDYDVDHIVPQSFLKDDSIDNKVLTRSDKARGKSDNVPSEEVVKKMKNYWRQLLNAKLITQRKFDNLTKAERGGLSELDKAGFIKRQLVETRQITKHVAQILDSRMNTKYDENDKLIREVKVITLKSKLVSDFRKDFQFYKVREINNYHHAHDAYLNAVVGTALIKKYPKLESEFVYGDYKVYDVRKMIAKSEQEIGKATAKYFFYSNIMNFFKTEITLANGEIRKRPLIETNGETGEIVWDKGRDFATVRKVLSMPQVNIVKKTEVQTGGFSKESILPKRNSDKLIARKKDWDPKKYGGFDSPTVAYSVLVVAKVEKGKSKKLKSVKELLGITIMERSSFEKNPIDFLEAKGYKEVKKDLIIKLPKYSLFELENGRKRMLASAGELQKGNELALPSKYVNFLYLASHYEKLKGSPEDNEQKQLFVEQHKHYLDEIIEQISEFSKRVILADANLDKVLSAYNKHRDKPIREQAENIIHLFTLTNLGAPAAFKYFDTTIDRKRYTSTKEVLDATLIHQSITGLYETRIDLSQLGGDGGGGSGGGGSSGGGRDIMKDIKVRLMTDSPDDSQDLMIGAIESNLFADQISWKSDQPVWLNQWPLKQEKLQALQQLVTEQLQLGHLEESNSPWNTPVFVIKKKSGKWRLLQDLRAVNATMHDMGALQPGLPSPVAVPKGWEIIIIDLQDCFFNIKLHPEDCKRFAFSVPSPNFKRPYQRFQWKVLPQGMKNSPTLCQKFVDKAILTVRDKYQDSYIVHYMDDILLAHPSRSIVDEILTSMIQALNKHGLVVSTEKIQKYDNLKYLGTHIQGDSVSYQKLQIRTDKLRTLNDFQKLLGNINWIRPFLKLTTGELKPLFEILNPDSNPISTRKLTPEACKALQLMNERLSTARVKRLDLSQPWSLCILKTEYTPTACLWQDGVVEWIHLPHISPKVITPYDIFCTQLIIKGRHRSKELFSKDPDYIVVPYTKVQFDLLLQEKEDWPISLLGFLGEVHFHLPKDPLLTFTLQTAIIFPHMTSTTPLEKGIVIFTDGSANGRSVTYIQGREPIIKENTQNTAQQAEIVAVITAFEEVSQPFNLYTDSKYVTGLFPEIETATLSPRTKIYTELKHLQRLIHKRQEKFYIGHIRGHTGLPGPLAQGNAYADSLTRILTAGKRTADGSEFEKRTADGSEFESPKKKAKVE

SEQ ID NO: 3330 - protein, 2033 aa, synthetic construct
MPAAKRVKLDGGDKKYSIGLDIGTNSVGWAVITDEYKVPSKKFKVLGNTDRHSIKKNLIGALLFDSGETAEATRLKRTARRRYTRRKNRICYLQEIFSNEMAKVDDSFFHRLEESFLVEEDKKHERHPIFGNIVDEVAYHEKYPTIYHLRKKLVDSTDKADLRLIYLALAHMIKFRGHFLIEGDLNPDNSDVDKLFIQLVQTYNQLFEENPINASGVDAKAILSARLSKSRRLENLIAQLPGEKKNGLFGNLIALSLGLTPNFKSNFDLAEDAKLQLSKDTYDDDLDNLLAQIGDQYADLFLAAKNLSDAILLSDILRVNTEITKAPLSASMIKRYDEHHQDLTLLKALVRQQLPEKYKEIFFDQSKNGYAGYIDGGASQEEFYKFIKPILEKMDGTEELLVKLNREDLLRKQRTFDNGSIPHQIHLGELHAILRRQEDFYPFLKDNREKIEKILTFRIPYYVGPLARGNSRFAWMTRKSEETITPWNFEEVVDKGASAQSFIERMTNFDKNLPNEKVLPKHSLLYEYFTVYNELTKVKYVTEGMRKPAFLSGEQKKAIVDLLFKTNRKVTVKQLKEDYFKKIECFDSVEISGVEDRFNASLGTYHDLLKIIKDKDFLDNEENEDILEDIVLTLTLFEDREMIEERLKTYAHLFDDKVMKQLKRRRYTGWGRLSRKLINGIRDKQSGKTILDFLKSDGFANRNFMQLIHDDSLTFKEDIQKAQVSGQGDSLHEHIANLAGSPAIKKGILQTVKVVDELVKVMGRHKPENIVIEMARENQTTQKGQKNSRERMKRIEEGIKELGSQILKEHPVENTQLQNEKLYLYYLQNGRDMYVDQELDINRLSDYDVDHIVPQSFLKDDSIDNKVLTRSDKARGKSDNVPSEEVVKKMKNYWRQLLNAKLITQRKFDNLTKAERGGLSELDKAGFIKRQLVETRQITKHVAQILDSRMNTKYDENDKLIREVKVITLKSKLVSDFRKDFQFYKVREINNYHHAHDAYLNAVVGTALIKKYPKLESEFVYGDYKVYDVRKMIAKSEQEIGKATAKYFFYSNIMNFFKTEITLANGEIRKRPLIETNGETGEIVWDKGRDFATVRKVLSMPQVNIVKKTEVQTGGFSKESILPKRNSDKLIARKKDWDPKKYGGFDSPTVAYSVLVVAKVEKGKSKKLKSVKELLGITIMERSSFEKNPIDFLEAKGYKEVKKDLIIKLPKYSLFELENGRKRMLASAGELQKGNELALPSKYVNFLYLASHYEKLKGSPEDNEQKQLFVEQHKHYLDEIIEQISEFSKRVILADANLDKVLSAYNKHRDKPIREQAENIIHLFTLTNLGAPAAFKYFDTTIDRKRYTSTKEVLDATLIHQSITGLYETRIDLSQLGGDGGEAAAKEAAAKEAAAKEAAAKGGGRDIMKDIKVRLMTDSPDDSQDLMIGAIESNLFADQISWKSDQPVWLNQWPLKQEKLQALQQLVTEQLQLGHLEESNSPWNTPVFVIKKKSGKWRLLQDLRAVNATMHDMGALQPGLPSPVAPPKGWEIIIIDLQDCFFNIKLHPEDCKRFAFSVPSPNFKRPYQRFQWKVLPQGMKNSPTLCQKFVDKAILTVRDKYQDSYIVHYMDDILLAHPSRSIVDEILTSMIQALNKHGLVVSTEKIQKYDNLKYLGTHIQGDSVSYQKLQIRTDKLRTLNDFQKLLGNINWIRPFLKLTTGELKPLFEILNPDSNPISTRKLTPEACKALQLMNERLSTARVKRLDLSQPWSLCILKTEYTPTACLWQDGVVEWIHLPHISPKVITPYDIFCTQLIIKGRHRSKELFSKDPDYIVVPYTKVQFDLLLQEKEDWPISLLGFLGEVHFHLPKDPLLTFTLQTAIIFPHMTSTTPLEKGIVIFTDGSANGRSVTYIQGREPIIKENTQNTAQQAEIVAVITAFEEVSQPFNLYTDSKYVTGLFPEIETATLSPRTKIYTELKHLQRLIHKRQEKFYIGHIRGHTGLPGPLAQGNAYADSLTRILTAGKRTADGSEFEKRTADGSEFESPKKKAKVE

SEQ ID NO: 3331 - protein, 2022 aa, synthetic construct
MPAAKRVKLDGGDKKYSIGLDIGTNSVGWAVITDEYKVPSKKFKVLGNTDRHSIKKNLIGALLFDSGETAEATRLKRTARRRYTRRKNRICYLQEIFSNEMAKVDDSFFHRLEESFLVEEDKKHERHPIFGNIVDEVAYHEKYPTIYHLRKKLVDSTDKADLRLIYLALAHMIKFRGHFLIEGDLNPDNSDVDKLFIQLVQTYNQLFEENPINASGVDAKAILSARLSKSRRLENLIAQLPGEKKNGLFGNLIALSLGLTPNFKSNFDLAEDAKLQLSKDTYDDDLDNLLAQIGDQYADLFLAAKNLSDAILLSDILRVNTEITKAPLSASMIKRYDEHHQDLTLLKALVRQQLPEKYKEIFFDQSKNGYAGYIDGGASQEEFYKFIKPILEKMDGTEELLVKLNREDLLRKQRTFDNGSIPHQIHLGELHAILRRQEDFYPFLKDNREKIEKILTFRIPYYVGPLARGNSRFAWMTRKSEETITPWNFEEVVDKGASAQSFIERMTNFDKNLPNEKVLPKHSLLYEYFTVYNELTKVKYVTEGMRKPAFLSGEQKKAIVDLLFKTNRKVTVKQLKEDYFKKIECFDSVEISGVEDRFNASLGTYHDLLKIIKDKDFLDNEENEDILEDIVLTLTLFEDREMIEERLKTYAHLFDDKVMKQLKRRRYTGWGRLSRKLINGIRDKQSGKTILDFLKSDGFANRNFMQLIHDDSLTFKEDIQKAQVSGQGDSLHEHIANLAGSPAIKKGILQTVKVVDELVKVMGRHKPENIVIEMARENQTTQKGQKNSRERMKRIEEGIKELGSQILKEHPVENTQLQNEKLYLYYLQNGRDMYVDQELDINRLSDYDVDHIVPQSFLKDDSIDNKVLTRSDKARGKSDNVPSEEVVKKMKNYWRQLLNAKLITQRKFDNLTKAERGGLSELDKAGFIKRQLVETRQITKHVAQILDSRMNTKYDENDKLIREVKVITLKSKLVSDFRKDFQFYKVREINNYHHAHDAYLNAVVGTALIKKYPKLESEFVYGDYKVYDVRKMIAKSEQEIGKATAKYFFYSNIMNFFKTEITLANGEIRKRPLIETNGETGEIVWDKGRDFATVRKVLSMPQVNIVKKTEVQTGGFSKESILPKRNSDKLIARKKDWDPKKYGGFDSPTVAYSVLVVAKVEKGKSKKLKSVKELLGITIMERSSFEKNPIDFLEAKGYKEVKKDLIIKLPKYSLFELENGRKRMLASAGELQKGNELALPSKYVNFLYLASHYEKLKGSPEDNEQKQLFVEQHKHYLDEIIEQISEFSKRVILADANLDKVLSAYNKHRDKPIREQAENIIHLFTLTNLGAPAAFKYFDTTIDRKRYTSTKEVLDATLIHQSITGLYETRIDLSQLGGDGGGGGGGSPAPGGGRDIMKDIKVRLMTDSPDDSQDLMIGAIESNLFADQISWKSDQPVWLNQWPLKQEKLQALQQLVTEQLQLGHLEESNSPWNTPVFVIKKKSGKWRLLQDLRAVNATMHDMGALQPGLPSPVAPPKGWEIIIIDLQDCFFNIKLHPEDCKRFAFSVPSPNFKRPYQRFQWKVLPQGMKNSPTLCQKFVDKAILTVRDKYQDSYIVHYMDDILLAHPSRSIVDEILTSMIQALNKHGLVVSTEKIQKYDNLKYLGTHIQGDSVSYQKLQIRTDKLRTLNDFQKLLGNINWIRPFLKLTTGELKPLFEILNPDSNPISTRKLTPEACKALQLMNERLSTARVKRLDLSQPWSLCILKTEYTPTACLWQDGVVEWIHLPHISPKVITPYDIFCTQLIIKGRHRSKELFSKDPDYIVVPYTKVQFDLLLQEKEDWPISLLGFLGEVHFHLPKDPLLTFTLQTAIIFPHMTSTTPLEKGIVIFTDGSANGRSVTYIQGREPIIKENTQNTAQQAEIVAVITAFEEVSQPFNLYTDSKYVTGLFPEIETATLSPRTKIYTELKHLQRLIHKRQEKFYIGHIRGHTGLPGPLAQGNAYADSLTRILTAGKRTADGSEFEKRTADGSEFESPKKKAKVE

SEQ ID NO: 3332 - protein, 2024 aa, synthetic construct
MPAAKRVKLDGGDKKYSIGLDIGTNSVGWAVITDEYKVPSKKFKVLGNTDRHSIKKNLIGALLFDSGETAEATRLKRTARRRYTRRKNRICYLQEIFSNEMAKVDDSFFHRLEESFLVEEDKKHERHPIFGNIVDEVAYHEKYPTIYHLRKKLVDSTDKADLRLIYLALAHMIKFRGHFLIEGDLNPDNSDVDKLFIQLVQTYNQLFEENPINASGVDAKAILSARLSKSRRLENLIAQLPGEKKNGLFGNLIALSLGLTPNFKSNFDLAEDAKLQLSKDTYDDDLDNLLAQIGDQYADLFLAAKNLSDAILLSDILRVNTEITKAPLSASMIKRYDEHHQDLTLLKALVRQQLPEKYKEIFFDQSKNGYAGYIDGGASQEEFYKFIKPILEKMDGTEELLVKLNREDLLRKQRTFDNGSIPHQIHLGELHAILRRQEDFYPFLKDNREKIEKILTFRIPYYVGPLARGNSRFAWMTRKSEETITPWNFEEVVDKGASAQSFIERMTNFDKNLPNEKVLPKHSLLYEYFTVYNELTKVKYVTEGMRKPAFLSGEQKKAIVDLLFKTNRKVTVKQLKEDYFKKIECFDSVEISGVEDRFNASLGTYHDLLKIIKDKDFLDNEENEDILEDIVLTLTLFEDREMIEERLKTYAHLFDDKVMKQLKRRRYTGWGRLSRKLINGIRDKQSGKTILDFLKSDGFANRNFMQLIHDDSLTFKEDIQKAQVSGQGDSLHEHIANLAGSPAIKKGILQTVKVVDELVKVMGRHKPENIVIEMARENQTTQKGQKNSRERMKRIEEGIKELGSQILKEHPVENTQLQNEKLYLYYLQNGRDMYVDQELDINRLSDYDVDHIVPQSFLKDDSIDNKVLTRSDKARGKSDNVPSEEVVKKMKNYWRQLLNAKLITQRKFDNLTKAERGGLSELDKAGFIKRQLVETRQITKHVAQILDSRMNTKYDENDKLIREVKVITLKSKLVSDFRKDFQFYKVREINNYHHAHDAYLNAVVGTALIKKYPKLESEFVYGDYKVYDVRKMIAKSEQEIGKATAKYFFYSNIMNFFKTEITLANGEIRKRPLIETNGETGEIVWDKGRDFATVRKVLSMPQVNIVKKTEVQTGGFSKESILPKRNSDKLIARKKDWDPKKYGGFDSPTVAYSVLVVAKVEKGKSKKLKSVKELLGITIMERSSFEKNPIDFLEAKGYKEVKKDLIIKLPKYSLFELENGRKRMLASAGELQKGNELALPSKYVNFLYLASHYEKLKGSPEDNEQKQLFVEQHKHYLDEIIEQISEFSKRVILADANLDKVLSAYNKHRDKPIREQAENIIHLFTLTNLGAPAAFKYFDTTIDRKRYTSTKEVLDATLIHQSITGLYETRIDLSQLGGDGGGSSEAAAKPAPGGGRDIMKDIKVRLMTDSPDDSQDLMIGAIESNLFADQISWKSDQPVWLNQWPLKQEKLQALQQLVTEQLQLGHLEESNSPWNTPVFVIKKKSGKWRLLQDLRAVNATMHDMGALQPGLPSPVAPPKGWEIIIIDLQDCFFNIKLHPEDCKRFAFSVPSPNFKRPYQRFQWKVLPQGMKNSPTLCQKFVDKAILTVRDKYQDSYIVHYMDDILLAHPSRSIVDEILTSMIQALNKHGLVVSTEKIQKYDNLKYLGTHIQGDSVSYQKLQIRTDKLRTLNDFQKLLGNINWIRPFLKLTTGELKPLFEILNPDSNPISTRKLTPEACKALQLMNERLSTARVKRLDLSQPWSLCILKTEYTPTACLWQDGVVEWIHLPHISPKVITPYDIFCTQLIIKGRHRSKELFSKDPDYIVVPYTKVQFDLLLQEKEDWPISLLGFLGEVHFHLPKDPLLTFTLQTAIIFPHMTSTTPLEKGIVIFTDGSANGRSVTYIQGREPIIKENTQNTAQQAEIVAVITAFEEVSQPFNLYTDSKYVTGLFPEIETATLSPRTKIYTELKHLQRLIHKRQEKFYIGHIRGHTGLPGPLAQGNAYADSLTRILTAGKRTADGSEFEKRTADGSEFESPKKKAKVE

SEQ ID NO: 3333-3999 - skipped (667 entries)

SEQ ID NO: 4000 - protein, 1381 aa, synthetic construct
MPAAKRVKLDGGDKKYSIGLDIGTNSVGWAVITDEYKVPSKKFKVLGNTDRHSIKKNLIGALLFDSGETAEATRLKRTARRRYTRRKNRICYLQEIFSNEMAKVDDSFFHRLEESFLVEEDKKHERHPIFGNIVDEVAYHEKYPTIYHLRKKLVDSTDKADLRLIYLALAHMIKFRGHFLIEGDLNPDNSDVDKLFIQLVQTYNQLFEENPINASGVDAKAILSARLSKSRRLENLIAQLPGEKKNGLFGNLIALSLGLTPNFKSNFDLAEDAKLQLSKDTYDDDLDNLLAQIGDQYADLFLAAKNLSDAILLSDILRVNTEITKAPLSASMIKRYDEHHQDLTLLKALVRQQLPEKYKEIFFDQSKNGYAGYIDGGASQEEFYKFIKPILEKMDGTEELLVKLNREDLLRKQRTFDNGSIPHQIHLGELHAILRRQEDFYPFLKDNREKIEKILTFRIPYYVGPLARGNSRFAWMTRKSEETITPWNFEEVVDKGASAQSFIERMTNFDKNLPNEKVLPKHSLLYEYFTVYNELTKVKYVTEGMRKPAFLSGEQKKAIVDLLFKTNRKVTVKQLKEDYFKKIECFDSVEISGVEDRFNASLGTYHDLLKIIKDKDFLDNEENEDILEDIVLTLTLFEDREMIEERLKTYAHLFDDKVMKQLKRRRYTGWGRLSRKLINGIRDKQSGKTILDFLKSDGFANRNFMQLIHDDSLTFKEDIQKAQVSGQGDSLHEHIANLAGSPAIKKGILQTVKVVDELVKVMGRHKPENIVIEMARENQTTQKGQKNSRERMKRIEEGIKELGSQILKEHPVENTQLQNEKLYLYYLQNGRDMYVDQELDINRLSDYDVDHIVPQSFLKDDSIDNKVLTRSDKARGKSDNVPSEEVVKKMKNYWRQLLNAKLITQRKFDNLTKAERGGLSELDKAGFIKRQLVETRQITKHVAQILDSRMNTKYDENDKLIREVKVITLKSKLVSDFRKDFQFYKVREINNYHHAHDAYLNAVVGTALIKKYPKLESEFVYGDYKVYDVRKMIAKSEQEIGKATAKYFFYSNIMNFFKTEITLANGEIRKRPLIETNGETGEIVWDKGRDFATVRKVLSMPQVNIVKKTEVQTGGFSKESILPKRNSDKLIARKKDWDPKKYGGFDSPTVAYSVLVVAKVEKGKSKKLKSVKELLGITIMERSSFEKNPIDFLEAKGYKEVKKDLIIKLPKYSLFELENGRKRMLASAGELQKGNELALPSKYVNFLYLASHYEKLKGSPEDNEQKQLFVEQHKHYLDEIIEQISEFSKRVILADANLDKVLSAYNKHRDKPIREQAENIIHLFTLTNLGAPAAFKYFDTTIDRKRYTSTKEVLDATLIHQSITGLYETRIDLSQLGGDGG

SEQ ID NO: 4001 - protein, 31 aa, synthetic construct
AGKRTADGSEFEKRTADGSEFESPKKKAKVE

SEQ ID NO: 4002 - protein, 2138 aa, synthetic construct; identical to SEQ ID NO: 2892

SEQ ID NO: 4003-4500 - skipped (498 entries)

SEQ ID NO: 4501 - protein, 2096 aa, synthetic construct
MPAAKRVKLDGGDKKYSIGLDIGTNSVGWAVITDEYKVPSKKFKVLGNTDRHSIKKNLIGALLFDSGETAEATRLKRTARRRYTRRKNRICYLQEIFSNEMAKVDDSFFHRLEESFLVEEDKKHERHPIFGNIVDEVAYHEKYPTIYHLRKKLVDSTDKADLRLIYLALAHMIKFRGHFLIEGDLNPDNSDVDKLFIQLVQTYNQLFEENPINASGVDAKAILSARLSKSRRLENLIAQLPGEKKNGLFGNLIALSLGLTPNFKSNFDLAEDAKLQLSKDTYDDDLDNLLAQIGDQYADLFLAAKNLSDAILLSDILRVNTEITKAPLSASMIKRYDEHHQDLTLLKALVRQQLPEKYKEIFFDQSKNGYAGYIDGGASQEEFYKFIKPILEKMDGTEELLVKLNREDLLRKQRTFDNGSIPHQIHLGELHAILRRQEDFYPFLKDNREKIEKILTFRIPYYVGPLARGNSRFAWMTRKSEETITPWNFEEVVDKGASAQSFIERMTNFDKNLPNEKVLPKHSLLYEYFTVYNELTKVKYVTEGMRKPAFLSGEQKKAIVDLLFKTNRKVTVKQLKEDYFKKIECFDSVEISGVEDRFNASLGTYHDLLKIIKDKDFLDNEENEDILEDIVLTLTLFEDREMIEERLKTYAHLFDDKVMKQLKRRRYTGWGRLSRKLINGIRDKQSGKTILDFLKSDGFANRNFMQLIHDDSLTFKEDIQKAQVSGQGDSLHEHIANLAGSPAIKKGILQTVKVVDELVKVMGRHKPENIVIEMARENQTTQKGQKNSRERMKRIEEGIKELGSQILKEHPVENTQLQNEKLYLYYLQNGRDMYVDQELDINRLSDYDVDHIVPQSFLKDDSIDNKVLTRSDKARGKSDNVPSEEVVKKMKNYWRQLLNAKLITQRKFDNLTKAERGGLSELDKAGFIKRQLVETRQITKHVAQILDSRMNTKYDENDKLIREVKVITLKSKLVSDFRKDFQFYKVREINNYHHAHDAYLNAVVGTALIKKYPKLESEFVYGDYKVYDVRKMIAKSEQEIGKATAKYFFYSNIMNFFKTEITLANGEIRKRPLIETNGETGEIVWDKGRDFATVRKVLSMPQVNIVKKTEVQTGGFSKESILPKRNSDKLIARKKDWDPKKYGGFDSPTVAYSVLVVAKVEKGKSKKLKSVKELLGITIMERSSFEKNPIDFLEAKGYKEVKKDLIIKLPKYSLFELENGRKRMLASAGELQKGNELALPSKYVNFLYLASHYEKLKGSPEDNEQKQLFVEQHKHYLDEIIEQISEFSKRVILADANLDKVLSAYNKHRDKPIREQAENIIHLFTLTNLGAPAAFKYFDTTIDRKRYTSTKEVLDATLIHQSITGLYETRIDLSQLGGDGGGGSGGSGGSGGTAPLEEEYRLFLEAPIQNVTLLEQWKREIPKVWAEINPPGLASTQAPIHVQLLSTALPVRVRQYPITLEAKRSLRETIRKFRAAGILRPVHSPWNTPLLPVRKSGTSEYRMVQDLREVNKRVETIHPTVPNPYTLLSLLPPDRIWYSVLDLKDAFFCIPLAPESQLIFAFEWADAEEGESGQLTWTRLPQGFKNSPTLFNEALNRDLQGFRLDHPSVSLLQYVDDLLIAADTQAACLSATRDLLMTLAELGYRVSGKKAQLCQEEVTYLGFKIHKGSRSLSNSRTQAILQIPVPKTKRQVREFLGKIGYCRLFIPGFAELAQPLYAATRPGNDPLVWGEKEEEAFQSLKLALTQPPALALPSLDKPFQLFVEETSGAAKGVLTQALGPWKRPVAYLSKRLDPVAAGWPRCLRAIAAAALLTREASKLTFGQDIEITSSHNLESLLRSPPDKWLTNARITQYQVLLLDPPRVRFKQTAALNPATLLPETDDTLPIHHCLDTLDSLTSTRPDLTDQPLAQAEATLFTDGSSYIRDGKRYAGAAVVTLDSVIWAEPLPIGTSAQKAELIALTKALEWSKDKSVNIYTDSRYAFATLHVHGMIYRERGWLTAGGKAIKNAPEILALLTAVWLPKRVAVMHCKGHQKDDAPTSTGNRRADEVAREVAIRPLSTQATISAGKRTADGSEFEKRTADGSEFESPKKKAKVE

SEQ ID NO: 4502 - protein, 2098 aa, synthetic construct
MPAAKRVKLDGGDKKYSIGLDIGTNSVGWAVITDEYKVPSKKFKVLGNTDRHSIKKNLIGALLFDSGETAEATRLKRTARRRYTRRKNRICYLQEIFSNEMAKVDDSFFHRLEESFLVEEDKKHERHPIFGNIVDEVAYHEKYPTIYHLRKKLVDSTDKADLRLIYLALAHMIKFRGHFLIEGDLNPDNSDVDKLFIQLVQTYNQLFEENPINASGVDAKAILSARLSKSRRLENLIAQLPGEKKNGLFGNLIALSLGLTPNFKSNFDLAEDAKLQLSKDTYDDDLDNLLAQIGDQYADLFLAAKNLSDAILLSDILRVNTEITKAPLSASMIKRYDEHHQDLTLLKALVRQQLPEKYKEIFFDQSKNGYAGYIDGGASQEEFYKFIKPILEKMDGTEELLVKLNREDLLRKQRTFDNGSIPHQIHLGELHAILRRQEDFYPFLKDNREKIEKILTFRIPYYVGPLARGNSRFAWMTRKSEETITPWNFEEVVDKGASAQSFIERMTNFDKNLPNEKVLPKHSLLYEYFTVYNELTKVKYVTEGMRKPAFLSGEQKKAIVDLLFKTNRKVTVKQLKEDYFKKIECFDSVEISGVEDRFNASLGTYHDLLKIIKDKDFLDNEENEDILEDIVLTLTLFEDREMIEERLKTYAHLFDDKVMKQLKRRRYTGWGRLSRKLINGIRDKQSGKTILDFLKSDGFANRNFMQLIHDDSLTFKEDIQKAQVSGQGDSLHEHIANLAGSPAIKKGILQTVKVVDELVKVMGRHKPENIVIEMARENQTTQKGQKNSRERMKRIEEGIKELGSQILKEHPVENTQLQNEKLYLYYLQNGRDMYVDQELDINRLSDYDVDHIVPQSFLKDDSIDNKVLTRSDKARGKSDNVPSEEVVKKMKNYWRQLLNAKLITQRKFDNLTKAERGGLSELDKAGFIKRQLVETRQITKHVAQILDSRMNTKYDENDKLIREVKVITLKSKLVSDFRKDFQFYKVREINNYHHAHDAYLNAVVGTALIKKYPKLESEFVYGDYKVYDVRKMIAKSEQEIGKATAKYFFYSNIMNFFKTEITLANGEIRKRPLIETNGETGEIVWDKGRDFATVRKVLSMPQVNIVKKTEVQTGGFSKESILPKRNSDKLIARKKDWDPKKYGGFDSPTVAYSVLVVAKVEKGKSKKLKSVKELLGITIMERSSFEKNPIDFLEAKGYKEVKKDLIIKLPKYSLFELENGRKRMLASAGELQKGNELALPSKYVNFLYLASHYEKLKGSPEDNEQKQLFVEQHKHYLDEIIEQISEFSKRVILADANLDKVLSAYNKHRDKPIREQAENIIHLFTLTNLGAPAAFKYFDTTIDRKRYTSTKEVLDATLIHQSITGLYETRIDLSQLGGDGGGGSGGSGGSGGSGGSGGVLNLEEEYRLHEKPVPSSIDPSWLQLFPTVWAERAGMGLANQVPPVVVELRSGASPVAVRQYPMSKEAREGIRPHIQRFLDLGVLVPCQSPWNTPLLPVKKPGTNDYRPVQDLREINKRVQDIHPTVPNPYNLLSSLPPSHTWYSVLDLKDAFFCLKLHPNSQPLFAFEWRDPEKGNTGQLTWTRLPQGFKNSPTLFNEALHRDLAPFRALNPQVVLLQYVDDLLVAAPTYRDCKEGTQKLLQELSKLGYRVSAKKAQLCQKEVTYLGYLLKEGKRWLTPARKATVMKIPPPTTPRQVREFLGTAGFCRLWIPGFASLAAPLYPLTKPSIPFIWTEEHQKAFDRIKEALLSAPALALPDLTKPFTLYVDERAGVARGVLTQTLGPWRRPVAYLSKKLDPVASGWPTCLKAVAAVALLLKDADKLTLGQNVTVIASHSLESIVRQPPDRWMTNARMTHYQSLLLNERVSFAPPAVLNPATLLPVESEATPVHRCSEILAEETGTRRDLKDQPLPGVPAWYTDGSSFIAEGKRRAGAAIVDGKRTVWASSLPEGTSAQKAELVALTQALRLAEGKDINIYTDSRYAFATAHIHGAIYKQRGWLTSAGKDIKNKEEILALLEAIHLPKRVAIIHCPGHQKGNDPVATGNRRADEAAKQAALSTRVLAETTKPAGKRTADGSEFEKRTADGSEFESPKKKAKVE

SEQ ID NO: 4503 - protein, 2103 aa, synthetic construct
MPAAKRVKLDGGDKKYSIGLDIGTNSVGWAVITDEYKVPSKKFKVLGNTDRHSIKKNLIGALLFDSGETAEATRLKRTARRRYTRRKNRICYLQEIFSNEMAKVDDSFFHRLEESFLVEEDKKHERHPIFGNIVDEVAYHEKYPTIYHLRKKLVDSTDKADLRLIYLALAHMIKFRGHFLIEGDLNPDNSDVDKLFIQLVQTYNQLFEENPINASGVDAKAILSARLSKSRRLENLIAQLPGEKKNGLFGNLIALSLGLTPNFKSNFDLAEDAKLQLSKDTYDDDLDNLLAQIGDQYADLFLAAKNLSDAILLSDILRVNTEITKAPLSASMIKRYDEHHQDLTLLKALVRQQLPEKYKEIFFDQSKNGYAGYIDGGASQEEFYKFIKPILEKMDGTEELLVKLNREDLLRKQRTFDNGSIPHQIHLGELHAILRRQEDFYPFLKDNREKIEKILTFRIPYYVGPLARGNSRFAWMTRKSEETITPWNFEEVVDKGASAQSFIERMTNFDKNLPNEKVLPKHSLLYEYFTVYNELTKVKYVTEGMRKPAFLSGEQKKAIVDLLFKTNRKVTVKQLKEDYFKKIECFDSVEISGVEDRFNASLGTYHDLLKIIKDKDFLDNEENEDILEDIVLTLTLFEDREMIEERLKTYAHLFDDKVMKQLKRRRYTGWGRLSRKLINGIRDKQSGKTILDFLKSDGFANRNFMQLIHDDSLTFKEDIQKAQVSGQGDSLHEHIANLAGSPAIKKGILQTVKVVDELVKVMGRHKPENIVIEMARENQTTQKGQKNSRERMKRIEEGIKELGSQILKEHPVENTQLQNEKLYLYYLQNGRDMYVDQELDINRLSDYDVDHIVPQSFLKDDSIDNKVLTRSDKARGKSDNVPSEEVVKKMKNYWRQLLNAKLITQRKFDNLTKAERGGLSELDKAGFIKRQLVETRQITKHVAQILDSRMNTKYDENDKLIREVKVITLKSKLVSDFRKDFQFYKVREINNYHHAHDAYLNAVVGTALIKKYPKLESEFVYGDYKVYDVRKMIAKSEQEIGKATAKYFFYSNIMNFFKTEITLANGEIRKRPLIETNGETGEIVWDKGRDFATVRKVLSMPQVNIVKKTEVQTGGFSKESILPKRNSDKLIARKKDWDPKKYGGFDSPTVAYSVLVVAKVEKGKSKKLKSVKELLGITIMERSSFEKNPIDFLEAKGYKEVKKDLIIKLPKYSLFELENGRKRMLASAGELQKGNELALPSKYVNFLYLASHYEKLKGSPEDNEQKQLFVEQHKHYLDEIIEQISEFSKRVILADANLDKVLSAYNKHRDKPIREQAENIIHLFTLTNLGAPAAFKYFDTTIDRKRYTSTKEVLDATLIHQSITGLYETRIDLSQLGGDGGGGSGGSGGSGGSGGSGGSGGLGIEDEYRLHETSTEPDVSLGSTWLSDFPQAWAETGGMGLAVRQAPLIIPLKATSTPVSIQQYPMSHEARLGIKPHIQRLLDQGILVPCQSPWNTPLLPVKKPGTNDYRPVQDLREVNKRVEDIHPTVPNPYNLLSGLPPSHQWYTVLDLKDAFFCLRLHPTSQPLFAFEWRDPGMGISGQLTWTRLPQGFKNSPTLFNEALHRDLADFRIQHPDLILLQYVDDILLAATSELDCQQGTRALLQTLGDLGYRASAKKAQICQKQVKYLGYLLREGQRWLTEARKETVMGQPVPKTPRQLREFLGKAGFCRLFIPGFAEMAAPLYPLTKPGTLFSWGPDQQKAYQEIKQALLTAPALGLPDLTKPFELFVDEKQGYAKGVLTQKLGPWRRPVAYLSKKLDPVAAGWPPCLRMVAAIAVLTKDAGKLTMGQPLVILAPHAVEALVKQPPDRWLSNARMTHYQAMLLDTDRVQFGPVVALNPATLLPLPEEGAPHDCLEILAETHGTRPDLTDQPIPDADHTWYTDGSSFLQEGQRKAGAAVTTETEVIWAGALPAGTSAQRAELIALTQALKMAEGKRLNVYTDSRYAFATAHIHGEIYRRRGWLTSEGREIKNKSEILALLKALFLPKRLSIIHCLGHQKGDSAEARGNRLADQAAREAAIKTPPDTSTLLIAGKRTADGSEFEKRTADGSEFESPKKKAKVE

SEQ ID NO: 4504 - protein, 2110 aa, synthetic construct
MPAAKRVKLDGGDKKYSIGLDIGTNSVGWAVITDEYKVPSKKFKVLGNTDRHSIKKNLIGALLFDSGETAEATRLKRTARRRYTRRKNRICYLQEIFSNEMAKVDDSFFHRLEESFLVEEDKKHERHPIFGNIVDEVAYHEKYPTIYHLRKKLVDSTDKADLRLIYLALAHMIKFRGHFLIEGDLNPDNSDVDKLFIQLVQTYNQLFEENPINASGVDAKAILSARLSKSRRLENLIAQLPGEKKNGLFGNLIALSLGLTPNFKSNFDLAEDAKLQLSKDTYDDDLDNLLAQIGDQYADLFLAAKNLSDAILLSDILRVNTEITKAPLSASMIKRYDEHHQDLTLLKALVRQQLPEKYKEIFFDQSKNGYAGYIDGGASQEEFYKFIKPILEKMDGTEELLVKLNREDLLRKQRTFDNGSIPHQIHLGELHAILRRQEDFYPFLKDNREKIEKILTFRIPYYVGPLARGNSRFAWMTRKSEETITPWNFEEVVDKGASAQSFIERMTNFDKNLPNEKVLPKHSLLYEYFTVYNELTKVKYVTEGMRKPAFLSGEQKKAIVDLLFKTNRKVTVKQLKEDYFKKIECFDSVEISGVEDRFNASLGTYHDLLKIIKDKDFLDNEENEDILEDIVLTLTLFEDREMIEERLKTYAHLFDDKVMKQLKRRRYTGWGRLSRKLINGIRDKQSGKTILDFLKSDGFANRNFMQLIHDDSLTFKEDIQKAQVSGQGDSLHEHIANLAGSPAIKKGILQTVKVVDELVKVMGRHKPENIVIEMARENQTTQKGQKNSRERMKRIEEGIKELGSQILKEHPVENTQLQNEKLYLYYLQNGRDMYVDQELDINRLSDYDVDHIVPQSFLKDDSIDNKVLTRSDKARGKSDNVPSEEVVKKMKNYWRQLLNAKLITQRKFDNLTKAERGGLSELDKAGFIKRQLVETRQITKHVAQILDSRMNTKYDENDKLIREVKVITLKSKLVSDFRKDFQFYKVREINNYHHAHDAYLNAVVGTALIKKYPKLESEFVYGDYKVYDVRKMIAKSEQEIGKATAKYFFYSNIMNFFKTEITLANGEIRKRPLIETNGETGEIVWDKGRDFATVRKVLSMPQVNIVKKTEVQTGGFSKESILPKRNSDKLIARKKDWDPKKYGGFDSPTVAYSVLVVAKVEKGKSKKLKSVKELLGITIMERSSFEKNPIDFLEAKGYKEVKKDLIIKLPKYSLFELENGRKRMLASAGELQKGNELALPSKYVNFLYLASHYEKLKGSPEDNEQKQLFVEQHKHYLDEIIEQISEFSKRVILADANLDKVLSAYNKHRDKPIREQAENIIHLFTLTNLGAPAAFKYFDTTIDRKRYTSTKEVLDATLIHQSITGLYETRIDLSQLGGDGGGGGGSGGGGSGGGGSGGGGSGGGGSGGTLNIEDEHRLHETSKEPDVSLGSTWLSDFPQAWAETGGMGLAVRQAPLIIPLKATSTPVSIKQYPMSQEARLGIKPHIQRLLDQGILVPCQSPWNTPLLPVKKPGTNDYRPVQDLREVNKRVEDIHPTVPNPYNLLSGLPPSHQWYTVLDLKDAFFCLRLHPTSQPLFAFEWRDPEMGISGQLTWTRLPQGFKNSPTLFNEALHRDLADFRIQHPDLILLQYVDDLLLAATSELDCQQGTRALLQTLGNLGYRASAKKAQICQKQVKYLGYLLKEGQRWLTEARKETVMGQPTPKTPRQLREFLGKAGFCRLFIPGFAEMAAPLYPLTKPGTLFNWGPDQQKAYQEIKQALLTAPALGLPDLTKPFELFVDEKQGYAKGVLTQKLGPWRRPVAYLSKKLDPVAAGWPPCLRMVAAIAVLTKDAGKLTMGQPLVILAPHAVEALVKQPPDRWLSNARMTHYQALLLDTDRVQFGPVVALNPATLLPLPEEGLQHNCLDILAEAHGTRPDLTDQPLPDADHTWYTDGSSLLQEGQRKAGAAVTTETEVIWAKALPAGTSAQRAELIALTQALKMAEGKKLNVYTDSRYAFATAHIHGEIYRRRGWLTSEGKEIKNKDEILALLKALFLPKRLSIIHCPGHQKGHSAEARGNRMADQAARKAAITETPDTSTLLAGKRTADGSEFEKRTADGSEFESPKKKAKVE

SEQ ID NO: 4505 - protein, 2094 aa, synthetic construct
MPAAKRVKLDGGDKKYSIGLDIGTNSVGWAVITDEYKVPSKKFKVLGNTDRHSIKKNLIGALLFDSGETAEATRLKRTARRRYTRRKNRICYLQEIFSNEMAKVDDSFFHRLEESFLVEEDKKHERHPIFGNIVDEVAYHEKYPTIYHLRKKLVDSTDKADLRLIYLALAHMIKFRGHFLIEGDLNPDNSDVDKLFIQLVQTYNQLFEENPINASGVDAKAILSARLSKSRRLENLIAQLPGEKKNGLFGNLIALSLGLTPNFKSNFDLAEDAKLQLSKDTYDDDLDNLLAQIGDQYADLFLAAKNLSDAILLSDILRVNTEITKAPLSASMIKRYDEHHQDLTLLKALVRQQLPEKYKEIFFDQSKNGYAGYIDGGASQEEFYKFIKPILEKMDGTEELLVKLNREDLLRKQRTFDNGSIPHQIHLGELHAILRRQEDFYPFLKDNREKIEKILTFRIPYYVGPLARGNSRFAWMTRKSEETITPWNFEEVVDKGASAQSFIERMTNFDKNLPNEKVLPKHSLLYEYFTVYNELTKVKYVTEGMRKPAFLSGEQKKAIVDLLFKTNRKVTVKQLKEDYFKKIECFDSVEISGVEDRFNASLGTYHDLLKIIKDKDFLDNEENEDILEDIVLTLTLFEDREMIEERLKTYAHLFDDKVMKQLKRRRYTGWGRLSRKLINGIRDKQSGKTILDFLKSDGFANRNFMQLIHDDSLTFKEDIQKAQVSGQGDSLHEHIANLAGSPAIKKGILQTVKVVDELVKVMGRHKPENIVIEMARENQTTQKGQKNSRERMKRIEEGIKELGSQILKEHPVENTQLQNEKLYLYYLQNGRDMYVDQELDINRLSDYDVDHIVPQSFLKDDSIDNKVLTRSDKARGKSDNVPSEEVVKKMKNYWRQLLNAKLITQRKFDNLTKAERGGLSELDKAGFIKRQLVETRQITKHVAQILDSRMNTKYDENDKLIREVKVITLKSKLVSDFRKDFQFYKVREINNYHHAHDAYLNAVVGTALIKKYPKLESEFVYGDYKVYDVRKMIAKSEQEIGKATAKYFFYSNIMNFFKTEITLANGEIRKRPLIETNGETGEIVWDKGRDFATVRKVLSMPQVNIVKKTEVQTGGFSKESILPKRNSDKLIARKKDWDPKKYGGFDSPTVAYSVLVVAKVEKGKSKKLKSVKELLGITIMERSSFEKNPIDFLEAKGYKEVKKDLIIKLPKYSLFELENGRKRMLASAGELQKGNELALPSKYVNFLYLASHYEKLKGSPEDNEQKQLFVEQHKHYLDEIIEQISEFSKRVILADANLDKVLSAYNKHRDKPIREQAENIIHLFTLTNLGAPAAFKYFDTTIDRKRYTSTKEVLDATLIHQSITGLYETRIDLSQLGGDGGGSSGSSGSSGGTLNIEDEHRLHETSKEPDVSLGSTWLSDFPQAWAETGGMGLAVRQAPLIIPLKATSTPVSIKQYPMSQEARLGIKPHIQRLLDQGILVPCQSPWNTPLLPVKKPGTNDYRPVQDLREVNKRVEDIHPTVPNPYNLLSGLPPSHQWYTVLDLKDAFFCLRLHPTSQPLFAFEWRDPEMGISGQLTWTRLPQGFKNSPTLFNEALHRDLADFRIQHPDLILLQYVDDLLLAATSELDCQQGTRALLQTLGNLGYRASAKKAQICQKQVKYLGYLLKEGQRWLTEARKETVMGQPTPKTPRQLREFLGTAGFCRLWIPGFAEMAAPLYPLTKPGTLFNWGPDQQKAYQEIKQALLTAPALGLPDLTKPFELFVDEKQGYAKGVLTQKLGPWRRPVAYLSKKLDPVAAGWPPCLRMVAAIAVLTKDAGKLTMGQPLVILAPHAVEALVKQPPDRWLSNARMTHYQALLLDTDRVQFGPVVALNPATLLPLPEEGLQHNCLDILAEAHGTRPDLTDQPLPDADHTWYTDGSSLLQEGQRKAGAAVTTETEVIWAKALPAGTSAQRAELIALTQALKMAEGKKLNVYTDSRYAFATAHIHGEIYRRRGWLTSEGKEIKNKDEILALLKALFLPKRLSIIHCPGHQKGHSAEARGNRMADQAARKAAITETPDTSTLLAGKRTADGSEFEKRTADGSEFESPKKKAKVE

SEQ ID NO: 4506 - protein, 2100 aa, synthetic construct
MPAAKRVKLDGGDKKYSIGLDIGTNSVGWAVITDEYKVPSKKFKVLGNTDRHSIKKNLIGALLFDSGETAEATRLKRTARRRYTRRKNRICYLQEIFSNEMAKVDDSFFHRLEESFLVEEDKKHERHPIFGNIVDEVAYHEKYPTIYHLRKKLVDSTDKADLRLIYLALAHMIKFRGHFLIEGDLNPDNSDVDKLFIQLVQTYNQLFEENPINASGVDAKAILSARLSKSRRLENLIAQLPGEKKNGLFGNLIALSLGLTPNFKSNFDLAEDAKLQLSKDTYDDDLDNLLAQIGDQYADLFLAAKNLSDAILLSDILRVNTEITKAPLSASMIKRYDEHHQDLTLLKALVRQQLPEKYKEIFFDQSKNGYAGYIDGGASQEEFYKFIKPILEKMDGTEELLVKLNREDLLRKQRTFDNGSIPHQIHLGELHAILRRQEDFYPFLKDNREKIEKILTFRIPYYVGPLARGNSRFAWMTRKSEETITPWNFEEVVDKGASAQSFIERMTNFDKNLPNEKVLPKHSLLYEYFTVYNELTKVKYVTEGMRKPAFLSGEQKKAIVDLLFKTNRKVTVKQLKEDYFKKIECFDSVEISGVEDRFNASLGTYHDLLKIIKDKDFLDNEENEDILEDIVLTLTLFEDREMIEERLKTYAHLFDDKVMKQLKRRRYTGWGRLSRKLINGIRDKQSGKTILDFLKSDGFANRNFMQLIHDDSLTFKEDIQKAQVSGQGDSLHEHIANLAGSPAIKKGILQTVKVVDELVKVMGRHKPENIVIEMARENQTTQKGQKNSRERMKRIEEGIKELGSQILKEHPVENTQLQNEKLYLYYLQNGRDMYVDQELDINRLSDYDVDHIVPQSFLKDDSIDNKVLTRSDKARGKSDNVPSEEVVKKMKNYWRQLLNAKLITQRKFDNLTKAERGGLSELDKAGFIKRQLVETRQITKHVAQILDSRMNTKYDENDKLIREVKVITLKSKLVSDFRKDFQFYKVREINNYHHAHDAYLNAVVGTALIKKYPKLESEFVYGDYKVYDVRKMIAKSEQEIGKATAKYFFYSNIMNFFKTEITLANGEIRKRPLIETNGETGEIVWDKGRDFATVRKVLSMPQVNIVKKTEVQTGGFSKESILPKRNSDKLIARKKDWDPKKYGGFDSPTVAYSVLVVAKVEKGKSKKLKSVKELLGITIMERSSFEKNPIDFLEAKGYKEVKKDLIIKLPKYSLFELENGRKRMLASAGELQKGNELALPSKYVNFLYLASHYEKLKGSPEDNEQKQLFVEQHKHYLDEIIEQISEFSKRVILADANLDKVLSAYNKHRDKPIREQAENIIHLFTLTNLGAPAAFKYFDTTIDRKRYTSTKEVLDATLIHQSITGLYETRIDLSQLGGDGGEAAAKEAAAKEAAAKGGTLNIEDEYRLHETSKEPDVPLGSTWLSDFPQAWAETGGMGLAVRQAPLIIPLKATSTPVSIKQYPMSQEARLGIKPHIQRLLDQGILVPCQSPWNTPLLPVKKPGTNDYRPVQDLREVNKRVEDIHPTVPNPYNLLSGLPPSHQWYTVLDLKDAFFCLRLHPTSQPLFAFEWRDPEMGISGQLTWTRLPQGFKNSPTLFNEALHRDLADFRIQHPDLILLQYVDDLLLAATSEQDCQRGTRALLQTLGNLGYRASAKKAQICQKQVKYLGYLLKEGQRWLTEARKETVMGQPTPKTPRQLREFLGKAGFCRLFIPGFAEMAAPLYPLTKPGTLFNWGPDQQKAYQEIKQALLTAPALGLPDLTKPFELFVDEKQGYAKGVLTQKLGPWRRPVAYLSKKLDPVAAGWPPCLRMVAAIAVLTKDAGKLTMGQPLVILAPHAVEALVKQPPDRWLSNARMTHYQAMLLDTDRVQFGPVVALNPATLLPLPEKEAPHDCLEILAETHGTRPDLTDQPIPDADYTWYTDGSSFLQEGQRRAGAAVTTETEVIWARALPAGTSAQRAELIALTQALKMAEGKKLNVYTDSRYAFATAHVHGEIYRRRGWLTSEGREIKNKNEILALLKALFLPKRLSIIHCPGHQKGNSAEARGNRMADQAAREAAMKAVLETSTLLAGKRTADGSEFEKRTADGSEFESPKKKAKVE

SEQ ID NO: 4507 - protein, 2110 aa, synthetic construct
MPAAKRVKLDGGDKKYSIGLDIGTNSVGWAVITDEYKVPSKKFKVLGNTDRHSIKKNLIGALLFDSGETAEATRLKRTARRRYTRRKNRICYLQEIFSNEMAKVDDSFFHRLEESFLVEEDKKHERHPIFGNIVDEVAYHEKYPTIYHLRKKLVDSTDKADLRLIYLALAHMIKFRGHFLIEGDLNPDNSDVDKLFIQLVQTYNQLFEENPINASGVDAKAILSARLSKSRRLENLIAQLPGEKKNGLFGNLIALSLGLTPNFKSNFDLAEDAKLQLSKDTYDDDLDNLLAQIGDQYADLFLAAKNLSDAILLSDILRVNTEITKAPLSASMIKRYDEHHQDLTLLKALVRQQLPEKYKEIFFDQSKNGYAGYIDGGASQEEFYKFIKPILEKMDGTEELLVKLNREDLLRKQRTFDNGSIPHQIHLGELHAILRRQEDFYPFLKDNREKIEKILTFRIPYYVGPLARGNSRFAWMTRKSEETITPWNFEEVVDKGASAQSFIERMTNFDKNLPNEKVLPKHSLLYEYFTVYNELTKVKYVTEGMRKPAFLSGEQKKAIVDLLFKTNRKVTVKQLKEDYFKKIECFDSVEISGVEDRFNASLGTYHDLLKIIKDKDFLDNEENEDILEDIVLTLTLFEDREMIEERLKTYAHLFDDKVMKQLKRRRYTGWGRLSRKLINGIRDKQSGKTILDFLKSDGFANRNFMQLIHDDSLTFKEDIQKAQVSGQGDSLHEHIANLAGSPAIKKGILQTVKVVDELVKVMGRHKPENIVIEMARENQTTQKGQKNSRERMKRIEEGIKELGSQILKEHPVENTQLQNEKLYLYYLQNGRDMYVDQELDINRLSDYDVDHIVPQSFLKDDSIDNKVLTRSDKARGKSDNVPSEEVVKKMKNYWRQLLNAKLITQRKFDNLTKAERGGLSELDKAGFIKRQLVETRQITKHVAQILDSRMNTKYDENDKLIREVKVITLKSKLVSDFRKDFQFYKVREINNYHHAHDAYLNAVVGTALIKKYPKLESEFVYGDYKVYDVRKMIAKSEQEIGKATAKYFFYSNIMNFFKTEITLANGEIRKRPLIETNGETGEIVWDKGRDFATVRKVLSMPQVNIVKKTEVQTGGFSKESILPKRNSDKLIARKKDWDPKKYGGFDSPTVAYSVLVVAKVEKGKSKKLKSVKELLGITIMERSSFEKNPIDFLEAKGYKEVKKDLIIKLPKYSLFELENGRKRMLASAGELQKGNELALPSKYVNFLYLASHYEKLKGSPEDNEQKQLFVEQHKHYLDEIIEQISEFSKRVILADANLDKVLSAYNKHRDKPIREQAENIIHLFTLTNLGAPAAFKYFDTTIDRKRYTSTKEVLDATLIHQSITGLYETRIDLSQLGGDGGEAAAKEAAAKEAAAKEAAAKEAAAKGGTLNIEDEYRLHETSKEPDVSLGSTWLSDFPQAWAETGGMGLAVRQAPLIIPLKATSTPVSIKQYPMSQEARLGIKPHIQRLLDQGILVPCQSPWNTPLLPVKKPGTNDYRPVQDLREVNKRVEDIHPTVPNPYNLLSGLPPSHQWYTVLDLKDAFFCLRLHPTSQPLFAFEWRDPEMGISGQLTWTRLPQGFKNSPTLFNEALHRDLAGFRIQHPDLILLQYVDDLLLAATSELDCQQGTRALLQTLGDLGYRASAKKAQICQKQVKYLGYLLKEGQRWLTEARKETVMGQPIPKTPRQLREFLGTAGFCRLWIPGFAEMAAPLYPLTKPGTLFNWGPDQQKAFQEIKQALLTAPALGLPDLTKPFELFVDEKQGYAKGVLTQKLGPWRRPVAYLSKKLDPVAAGWPPCLRMVAAIAVLTKDAGKLTMGQPLVILAPHAVEALVKQPPDRWLSNARMTHYQALLLDTDRVQFGPVVALNPATLLPLPEEGLQHDCLDILAEAHGTRSDLMDQPLPDADHTWYTDGSSFLQEGQRKAGAAVTTETEVIWARALPAGTSAQRAELIALTQALKMAEGKKLNVYTDSRYAFATAHIHGEIYRRRGWLTSEGKEIKNKDEILALLKALFLPKRLSIIHCPGHQKGNSAEARGNRMADQAAREVATRETPETSTLLAGKRTADGSEFEKRTADGSEFESPKKKAKVE

SEQ ID NO: 4508 - protein, 2112 aa, synthetic construct
MPAAKRVKLDGGDKKYSIGLDIGTNSVGWAVITDEYKVPSKKFKVLGNTDRHSIKKNLIGALLFDSGETAEATRLKRTARRRYTRRKNRICYLQEIFSNEMAKVDDSFFHRLEESFLVEEDKKHERHPIFGNIVDEVAYHEKYPTIYHLRKKLVDSTDKADLRLIYLALAHMIKFRGHFLIEGDLNPDNSDVDKLFIQLVQTYNQLFEENPINASGVDAKAILSARLSKSRRLENLIAQLPGEKKNGLFGNLIALSLGLTPNFKSNFDLAEDAKLQLSKDTYDDDLDNLLAQIGDQYADLFLAAKNLSDAILLSDILRVNTEITKAPLSASMIKRYDEHHQDLTLLKALVRQQLPEKYKEIFFDQSKNGYAGYIDGGASQEEFYKFIKPILEKMDGTEELLVKLNREDLLRKQRTFDNGSIPHQIHLGELHAILRRQEDFYPFLKDNREKIEKILTFRIPYYVGPLARGNSRFAWMTRKSEETITPWNFEEVVDKGASAQSFIERMTNFDKNLPNEKVLPKHSLLYEYFTVYNELTKVKYVTEGMRKPAFLSGEQKKAIVDLLFKTNRKVTVKQLKEDYFKKIECFDSVEISGVEDRFNASLGTYHDLLKIIKDKDFLDNEENEDILEDIVLTLTLFEDREMIEERLKTYAHLFDDKVMKQLKRRRYTGWGRLSRKLINGIRDKQSGKTILDFLKSDGFANRNFMQLIHDDSLTFKEDIQKAQVSGQGDSLHEHIANLAGSPAIKKGILQTVKVVDELVKVMGRHKPENIVIEMARENQTTQKGQKNSRERMKRIEEGIKELGSQILKEHPVENTQLQNEKLYLYYLQNGRDMYVDQELDINRLSDYDVDHIVPQSFLKDDSIDNKVLTRSDKARGKSDNVPSEEVVKKMKNYWRQLLNAKLITQRKFDNLTKAERGGLSELDKAGFIKRQLVETRQITKHVAQILDSRMNTKYDENDKLIREVKVITLKSKLVSDFRKDFQFYKVREINNYHHAHDAYLNAVVGTALIKKYPKLESEFVYGDYKVYDVRKMIAKSEQEIGKATAKYFFYSNIMNFFKTEITLANGEIRKRPLIETNGETGEIVWDKGRDFATVRKVLSMPQVNIVKKTEVQTGGFSKESILPKRNSDKLIARKKDWDPKKYGGFDSPTVAYSVLVVAKVEKGKSKKLKSVKELLGITIMERSSFEKNPIDFLEAKGYKEVKKDLIIKLPKYSLFELENGRKRMLASAGELQKGNELALPSKYVNFLYLASHYEKLKGSPEDNEQKQLFVEQHKHYLDEIIEQISEFSKRVILADANLDKVLSAYNKHRDKPIREQAENIIHLFTLTNLGAPAAFKYFDTTIDRKRYTSTKEVLDATLIHQSITGLYETRIDLSQLGGDGGPAPAPAPGGTLNIEDEYRLHETSKEPDVSLGSTWLSDFPQAWAETGGMGLAVRQAPLIIPLKATSTPVSIKQYPMSQEARLGIKPHIQRLLDQGILVPCQSPWNTPLLPVKKPGTNDYRPVQDLREVNKRVEDIHPTVPNPYNLLSGLPPSHQWYTVLDLKDAFFCLRLHPTSQPLFAFEWRDPEMGISGQLTWTRLPQGFKNSPTLFNEALHRDLADFRIQHPDLILLQYVDDLLLAATSELDCQQGTRALLQTLGNLGYRASAKKAQICQKQVKYLGYLLKEGQRWLTEARKETVMGQPTPKTPRQLREFLGKAGFCRLFIPGFAEMAAPLYPLTKPGTLFNWGPDQQKAYQEIKQALLTAPALGLPDLTKPFELFVDEKQGYAKGVLTQKLGPWRRPVAYLSKKLDPVAAGWPPCLRMVAAIAVLTKDAGKLTMGQPLVILAPHAVEALVKQPPDRWLSNARMTHYQALLLDTDRVQFGPVVALNPATLLPLPEEGLQHNCLDILAEAHGTRPDLTDQPLPDADHTWYTDGSSLLQEGQRKAGAAVTTETEVIWAKALPAGTSAQRAELIALTQALKMAEGKKLNVYTDSRYAFATAHIHGEIYRRRGWLTSEGKEIKNKDEILALLKALFLPKRLSIIHCPGHQKGHSAEARGNRMADQAARKAAITETPDTSTLLIENSSPSGGSKRTADGSEFEAGKRTADGSEFEKRTADGSEFESPKKKAKVE

SEQ ID NO: 4509 - protein, 2096 aa, synthetic construct
MPAAKRVKLDGGDKKYSIGLDIGTNSVGWAVITDEYKVPSKKFKVLGNTDRHSIKKNLIGALLFDSGETAEATRLKRTARRRYTRRKNRICYLQEIFSNEMAKVDDSFFHRLEESFLVEEDKKHERHPIFGNIVDEVAYHEKYPTIYHLRKKLVDSTDKADLRLIYLALAHMIKFRGHFLIEGDLNPDNSDVDKLFIQLVQTYNQLFEENPINASGVDAKAILSARLSKSRRLENLIAQLPGEKKNGLFGNLIALSLGLTPNFKSNFDLAEDAKLQLSKDTYDDDLDNLLAQIGDQYADLFLAAKNLSDAILLSDILRVNTEITKAPLSASMIKRYDEHHQDLTLLKALVRQQLPEKYKEIFFDQSKNGYAGYIDGGASQEEFYKFIKPILEKMDGTEELLVKLNREDLLRKQRTFDNGSIPHQIHLGELHAILRRQEDFYPFLKDNREKIEKILTFRIPYYVGPLARGNSRFAWMTRKSEETITPWNFEEVVDKGASAQSFIERMTNFDKNLPNEKVLPKHSLLYEYFTVYNELTKVKYVTEGMRKPAFLSGEQKKAIVDLLFKTNRKVTVKQLKEDYFKKIECFDSVEISGVEDRFNASLGTYHDLLKIIKDKDFLDNEENEDILEDIVLTLTLFEDREMIEERLKTYAHLFDDKVMKQLKRRRYTGWGRLSRKLINGIRDKQSGKTILDFLKSDGFANRNFMQLIHDDSLTFKEDIQKAQVSGQGDSLHEHIANLAGSPAIKKGILQTVKVVDELVKVMGRHKPENIVIEMARENQTTQKGQKNSRERMKRIEEGIKELGSQILKEHPVENTQLQNEKLYLYYLQNGRDMYVDQELDINRLSDYDVDHIVPQSFLKDDSIDNKVLTRSDKARGKSDNVPSEEVVKKMKNYWRQLLNAKLITQRKFDNLTKAERGGLSELDKAGFIKRQLVETRQITKHVAQILDSRMNTKYDENDKLIREVKVITLKSKLVSDFRKDFQFYKVREINNYHHAHDAYLNAVVGTALIKKYPKLESEFVYGDYKVYDVRKMIAKSEQEIGKATAKYFFYSNIMNFFKTEITLANGEIRKRPLIETNGETGEIVWDKGRDFATVRKVLSMPQVNIVKKTEVQTGGFSKESILPKRNSDKLIARKKDWDPKKYGGFDSPTVAYSVLVVAKVEKGKSKKLKSVKELLGITIMERSSFEKNPIDFLEAKGYKEVKKDLIIKLPKYSLFELENGRKRMLASAGELQKGNELALPSKYVNFLYLASHYEKLKGSPEDNEQKQLFVEQHKHYLDEIIEQISEFSKRVILADANLDKVLSAYNKHRDKPIREQAENIIHLFTLTNLGAPAAFKYFDTTIDRKRYTSTKEVLDATLIHQSITGLYETRIDLSQLGGDGGPAPAPAPAPAPAPGGVLNLEEEYRLHEKPVPSSIDPSWLQLFPTVWAERAGMGLANQVPPVVVELRSGASPVAVRQYPMSKEAREGIRPHIQRFLDLGVLVPCQSPWNTPLLPVKKPGTNDYRPVQDLREINKRVQDIHPTVPNPYNLLSSLPPSHTWYSVLDLKDAFFCLKLHPNSQPLFAFEWRDPEKGNTGQLTWTRLPQGFKNSPTLFNEALHRDLAPFRALNPQVVLLQYVDDLLVAAPTYRDCKEGTQKLLQELSKLGYRVSAKKAQLCQKEVTYLGYLLKEGKRWLTPARKATVMKIPPPTTPRQVREFLGTAGFCRLWIPGFASLAAPLYPLTKPSIPFIWTEEHQKAFDRIKEALLSAPALALPDLTKPFTLYVDERAGVARGVLTQTLGPWRRPVAYLSKKLDPVASGWPTCLKAVAAVALLLKDADKLTLGQNVTVIASHSLESIVRQPPDRWMTNARMTHYQSLLLNERVSFAPPAVLNPATLLPVESEATPVHRCSEILAEETGTRRDLKDQPLPGVPAWYTDGSSFIAEGKRRAGAAIVDGKRTVWASSLPEGTSAQKAELVALTQALRLAEGKDINIYTDSRYAFATAHIHGAIYKQRGWLTSAGKDIKNKEEILALLEAIHLPKRVAIIHCPGHQKGNDPVATGNRRADEAAKQAALSTRVLAETTKPAGKRTADGSEFEKRTADGSEFESPKKKAKVE

SEQ ID NO: 4510 - protein, 2098 aa, synthetic construct
MPAAKRVKLDGGDKKYSIGLDIGTNSVGWAVITDEYKVPSKKFKVLGNTDRHSIKKNLIGALLFDSGETAEATRLKRTARRRYTRRKNRICYLQEIFSNEMAKVDDSFFHRLEESFLVEEDKKHERHPIFGNIVDEVAYHEKYPTIYHLRKKLVDSTDKADLRLIYLALAHMIKFRGHFLIEGDLNPDNSDVDKLFIQLVQTYNQLFEENPINASGVDAKAILSARLSKSRRLENLIAQLPGEKKNGLFGNLIALSLGLTPNFKSNFDLAEDAKLQLSKDTYDDDLDNLLAQIGDQYADLFLAAKNLSDAILLSDILRVNTEITKAPLSASMIKRYDEHHQDLTLLKALVRQQLPEKYKEIFFDQSKNGYAGYIDGGASQEEFYKFIKPILEKMDGTEELLVKLNREDLLRKQRTFDNGSIPHQIHLGELHAILRRQEDFYPFLKDNREKIEKILTFRIPYYVGPLARGNSRFAWMTRKSEETITPWNFEEVVDKGASAQSFIERMTNFDKNLPNEKVLPKHSLLYEYFTVYNELTKVKYVTEGMRKPAFLSGEQKKAIVDLLFKTNRKVTVKQLKEDYFKKIECFDSVEISGVEDRFNASLGTYHDLLKIIKDKDFLDNEENEDILEDIVLTLTLFEDREMIEERLKTYAHLFDDKVMKQLKRRRYTGWGRLSRKLINGIRDKQSGKTILDFLKSDGFANRNFMQLIHDDSLTFKEDIQKAQVSGQGDSLHEHIANLAGSPAIKKGILQTVKVVDELVKVMGRHKPENIVIEMARENQTTQKGQKNSRERMKRIEEGIKELGSQILKEHPVENTQLQNEKLYLYYLQNGRDMYVDQELDINRLSDYDVDHIVPQSFLKDDSIDNKVLTRSDKARGKSDNVPSEEVVKKMKNYWRQLLNAKLITQRKFDNLTKAERGGLSELDKAGFIKRQLVETRQITKHVAQILDSRMNTKYDENDKLIREVKVITLKSKLVSDFRKDFQFYKVREINNYHHAHDAYLNAVVGTALIKKYPKLESEFVYGDYKVYDVRKMIAKSEQEIGKATAKYFFYSNIMNFFKTEITLANGEIRKRPLIETNGETGEIVWDKGRDFATVRKVLSMPQVNIVKKTEVQTGGFSKESILPKRNSDKLIARKKDWDPKKYGGFDSPTVAYSVLVVAKVEKGKSKKLKSVKELLGITIMERSSFEKNPIDFLEAKGYKEVKKDLIIKLPKYSLFELENGRKRMLASAGELQKGNELALPSKYVNFLYLASHYEKLKGSPEDNEQKQLFVEQHKHYLDEIIEQISEFSKRVILADANLDKVLSAYNKHRDKPIREQAENIIHLFTLTNLGAPAAFKYFDTTIDRKRYTSTKEVLDATLIHQSITGLYETRIDLSQLGGDGGPAPAPAPAPAPAPGGTLNIEDEYRLHETSKEPDVPLGSTWLSDFPQAWAETGGMGLAVRQAPLIIPLKATSTPVSIKQYPMSQEARLGIKPHIQRLLDQGILVPCQSPWNTPLLPVKKPGTNDYRPVQDLREVNKRVEDIHPTVPNPYNLLSGLPPSHQWYTVLDLKDAFFCLRLHPTSQPLFAFEWRDPEMGISGQLTWTRLPQGFKNSPTLFNEALHRDLADFRIQHPDLILLQYVDDLLLAATSEQDCQRGTRALLQTLGNLGYRASAKKAQICQKQVKYLGYLLKEGQRWLTEARKETVMGQPTPKTPRQLREFLGTAGFCRLWIPGFAEMAAPLYPLTKPGTLFNWGPDQQKAYQEIKQALLTAPALGLPDLTKPFELFVDEKQGYAKGVLTQKLGPWRRPVAYLSKKLDPVAAGWPPCLRMVAAIAVLTKDAGKLTMGQPLVILAPHAVEALVKQPPDRWLSNARMTHYQAMLLDTDRVQFGPVVALNPATLLPLPEKEAPHDCLEILAETHGTRPDLTDQPIPDADYTWYTDGSSFLQEGQRRAGAAVTTETEVIWARALPAGTSAQRAELIALTQALKMAEGKKLNVYTDSRYAFATAHVHGEIYRRRGWLTSEGREIKNKNEILALLKALFLPKRLSIIHCPGHQKGNSAEARGNRMADQAAREAAMKAVLETSTLLAGKRTADGSEFEKRTADGSEFESPKKKAKVE

SEQ ID NO: 4511 - protein, 2091 aa, synthetic construct
MPAAKRVKLDGGDKKYSIGLDIGTNSVGWAVITDEYKVPSKKFKVLGNTDRHSIKKNLIGALLFDSGETAEATRLKRTARRRYTRRKNRICYLQEIFSNEMAKVDDSFFHRLEESFLVEEDKKHERHPIFGNIVDEVAYHEKYPTIYHLRKKLVDSTDKADLRLIYLALAHMIKFRGHFLIEGDLNPDNSDVDKLFIQLVQTYNQLFEENPINASGVDAKAILSARLSKSRRLENLIAQLPGEKKNGLFGNLIALSLGLTPNFKSNFDLAEDAKLQLSKDTYDDDLDNLLAQIGDQYADLFLAAKNLSDAILLSDILRVNTEITKAPLSASMIKRYDEHHQDLTLLKALVRQQLPEKYKEIFFDQSKNGYAGYIDGGASQEEFYKFIKPILEKMDGTEELLVKLNREDLLRKQRTFDNGSIPHQIHLGELHAILRRQEDFYPFLKDNREKIEKILTFRIPYYVGPLARGNSRFAWMTRKSEETITPWNFEEVVDKGASAQSFIERMTNFDKNLPNEKVLPKHSLLYEYFTVYNELTKVKYVTEGMRKPAFLSGEQKKAIVDLLFKTNRKVTVKQLKEDYFKKIECFDSVEISGVEDRFNASLGTYHDLLKIIKDKDFLDNEENEDILEDIVLTLTLFEDREMIEERLKTYAHLFDDKVMKQLKRRRYTGWGRLSRKLINGIRDKQSGKTILDFLKSDGFANRNFMQLIHDDSLTFKEDIQKAQVSGQGDSLHEHIANLAGSPAIKKGILQTVKVVDELVKVMGRHKPENIVIEMARENQTTQKGQKNSRERMKRIEEGIKELGSQILKEHPVENTQLQNEKLYLYYLQNGRDMYVDQELDINRLSDYDVDHIVPQSFLKDDSIDNKVLTRSDKARGKSDNVPSEEVVKKMKNYWRQLLNAKLITQRKFDNLTKAERGGLSELDKAGFIKRQLVETRQITKHVAQILDSRMNTKYDENDKLIREVKVITLKSKLVSDFRKDFQFYKVREINNYHHAHDAYLNAVVGTALIKKYPKLESEFVYGDYKVYDVRKMIAKSEQEIGKATAKYFFYSNIMNFFKTEITLANGEIRKRPLIETNGETGEIVWDKGRDFATVRKVLSMPQVNIVKKTEVQTGGFSKESILPKRNSDKLIARKKDWDPKKYGGFDSPTVAYSVLVVAKVEKGKSKKLKSVKELLGITIMERSSFEKNPIDFLEAKGYKEVKKDLIIKLPKYSLFELENGRKRMLASAGELQKGNELALPSKYVNFLYLASHYEKLKGSPEDNEQKQLFVEQHKHYLDEIIEQISEFSKRVILADANLDKVLSAYNKHRDKPIREQAENIIHLFTLTNLGAPAAFKYFDTTIDRKRYTSTKEVLDATLIHQSITGLYETRIDLSQLGGDGGGGGGGSGGLGIEDEYRLHETSTEPDVSLGSTWLSDFPQAWAETGGMGLAVRQAPLIIPLKATSTPVSIQQYPMSHEARLGIKPHIQRLLDQGILVPCQSPWNTPLLPVKKPGTNDYRPVQDLREVNKRVEDIHPTVPNPYNLLSGLPPSHQWYTVLDLKDAFFCLRLHPTSQPLFAFEWRDPGMGISGQLTWTRLPQGFKNSPTLFNEALHRDLADFRIQHPDLILLQYVDDILLAATSELDCQQGTRALLQTLGDLGYRASAKKAQICQKQVKYLGYLLREGQRWLTEARKETVMGQPVPKTPRQLREFLGKAGFCRLFIPGFAEMAAPLYPLTKPGTLFSWGPDQQKAYQEIKQALLTAPALGLPDLTKPFELFVDEKQGYAKGVLTQKLGPWRRPVAYLSKKLDPVAAGWPPCLRMVAAIAVLTKDAGKLTMGQPLVILAPHAVEALVKQPPDRWLSNARMTHYQAMLLDTDRVQFGPVVALNPATLLPLPEEGAPHDCLEILAETHGTRPDLTDQPIPDADHTWYTDGSSFLQEGQRKAGAAVTTETEVIWAGALPAGTSAQRAELIALTQALKMAEGKRLNVYTDSRYAFATAHIHGEIYRRRGWLTSEGREIKNKSEILALLKALFLPKRLSIIHCLGHQKGDSAEARGNRLADQAAREAAIKTPPDTSTLLIAGKRTADGSEFEKRTADGSEFESPKKKAKVE

SEQ ID NO: 4512 - protein, 2093 aa, synthetic construct
MPAAKRVKLDGGDKKYSIGLDIGTNSVGWAVITDEYKVPSKKFKVLGNTDRHSIKKNLIGALLFDSGETAEATRLKRTARRRYTRRKNRICYLQEIFSNEMAKVDDSFFHRLEESFLVEEDKKHERHPIFGNIVDEVAYHEKYPTIYHLRKKLVDSTDKADLRLIYLALAHMIKFRGHFLIEGDLNPDNSDVDKLFIQLVQTYNQLFEENPINASGVDAKAILSARLSKSRRLENLIAQLPGEKKNGLFGNLIALSLGLTPNFKSNFDLAEDAKLQLSKDTYDDDLDNLLAQIGDQYADLFLAAKNLSDAILLSDILRVNTEITKAPLSASMIKRYDEHHQDLTLLKALVRQQLPEKYKEIFFDQSKNGYAGYIDGGASQEEFYKFIKPILEKMDGTEELLVKLNREDLLRKQRTFDNGSIPHQIHLGELHAILRRQEDFYPFLKDNREKIEKILTFRIPYYVGPLARGNSRFAWMTRKSEETITPWNFEEVVDKGASAQSFIERMTNFDKNLPNEKVLPKHSLLYEYFTVYNELTKVKYVTEGMRKPAFLSGEQKKAIVDLLFKTNRKVTVKQLKEDYFKKIECFDSVEISGVEDRFNASLGTYHDLLKIIKDKDFLDNEENEDILEDIVLTLTLFEDREMIEERLKTYAHLFDDKVMKQLKRRRYTGWGRLSRKLINGIRDKQSGKTILDFLKSDGFANRNFMQLIHDDSLTFKEDIQKAQVSGQGDSLHEHIANLAGSPAIKKGILQTVKVVDELVKVMGRHKPENIVIEMARENQTTQKGQKNSRERMKRIEEGIKELGSQILKEHPVENTQLQNEKLYLYYLQNGRDMYVDQELDINRLSDYDVDHIVPQSFLKDDSIDNKVLTRSDKARGKSDNVPSEEVVKKMKNYWRQLLNAKLITQRKFDNLTKAERGGLSELDKAGFIKRQLVETRQITKHVAQILDSRMNTKYDENDKLIREVKVITLKSKLVSDFRKDFQFYKVREINNYHHAHDAYLNAVVGTALIKKYPKLESEFVYGDYKVYDVRKMIAKSEQEIGKATAKYFFYSNIMNFFKTEITLANGEIRKRPLIETNGETGEIVWDKGRDFATVRKVLSMPQVNIVKKTEVQTGGFSKESILPKRNSDKLIARKKDWDPKKYGGFDSPTVAYSVLVVAKVEKGKSKKLKSVKELLGITIMERSSFEKNPIDFLEAKGYKEVKKDLIIKLPKYSLFELENGRKRMLASAGELQKGNELALPSKYVNFLYLASHYEKLKGSPEDNEQKQLFVEQHKHYLDEIIEQISEFSKRVILADANLDKVLSAYNKHRDKPIREQAENIIHLFTLTNLGAPAAFKYFDTTIDRKRYTSTKEVLDATLIHQSITGLYETRIDLSQLGGDGGEAAAKGSSGGLGIEDEYRLHETSTEPDVSLGSTWLSDFPQAWAETGGMGLAVRQAPLIIPLKATSTPVSIQQYPMSHEARLGIKPHIQRLLDQGILVPCQSPWNTPLLPVKKPGTNDYRPVQDLREVNKRVEDIHPTVPNPYNLLSGLPPSHQWYTVLDLKDAFFCLRLHPTSQPLFAFEWRDPGMGISGQLTWTRLPQGFKNSPTLFNEALHRDLADFRIQHPDLILLQYVDDILLAATSELDCQQGTRALLQTLGDLGYRASAKKAQICQKQVKYLGYLLREGQRWLTEARKETVMGQPVPKTPRQLREFLGKAGFCRLFIPGFAEMAAPLYPLTKPGTLFSWGPDQQKAYQEIKQALLTAPALGLPDLTKPFELFVDEKQGYAKGVLTQKLGPWRRPVAYLSKKLDPVAAGWPPCLRMVAAIAVLTKDAGKLTMGQPLVILAPHAVEALVKQPPDRWLSNARMTHYQAMLLDTDRVQFGPVVALNPATLLPLPEEGAPHDCLEILAETHGTRPDLTDQPIPDADHTWYTDGSSFLQEGQRKAGAAVTTETEVIWAGALPAGTSAQRAELIALTQALKMAEGKRLNVYTDSRYAFATAHIHGEIYRRRGWLTSEGREIKNKSEILALLKALFLPKRLSIIHCLGHQKGDSAEARGNRLADQAAREAAIKTPPDTSTLLIAGKRTADGSEFEKRTADGSEFESPKKKAKVE

SEQ ID NO: 4513 - protein, 2091 aa, synthetic construct
MPAAKRVKLDGGDKKYSIGLDIGTNSVGWAVITDEYKVPSKKFKVLGNTDRHSIKKNLIGALLFDSGETAEATRLKRTARRRYTRRKNRICYLQEIFSNEMAKVDDSFFHRLEESFLVEEDKKHERHPIFGNIVDEVAYHEKYPTIYHLRKKLVDSTDKADLRLIYLALAHMIKFRGHFLIEGDLNPDNSDVDKLFIQLVQTYNQLFEENPINASGVDAKAILSARLSKSRRLENLIAQLPGEKKNGLFGNLIALSLGLTPNFKSNFDLAEDAKLQLSKDTYDDDLDNLLAQIGDQYADLFLAAKNLSDAILLSDILRVNTEITKAPLSASMIKRYDEHHQDLTLLKALVRQQLPEKYKEIFFDQSKNGYAGYIDGGASQEEFYKFIKPILEKMDGTEELLVKLNREDLLRKQRTFDNGSIPHQIHLGELHAILRRQEDFYPFLKDNREKIEKILTFRIPYYVGPLARGNSRFAWMTRKSEETITPWNFEEVVDKGASAQSFIERMTNFDKNLPNEKVLPKHSLLYEYFTVYNELTKVKYVTEGMRKPAFLSGEQKKAIVDLLFKTNRKVTVKQLKEDYFKKIECFDSVEISGVEDRFNASLGTYHDLLKIIKDKDFLDNEENEDILEDIVLTLTLFEDREMIEERLKTYAHLFDDKVMKQLKRRRYTGWGRLSRKLINGIRDKQSGKTILDFLKSDGFANRNFMQLIHDDSLTFKEDIQKAQVSGQGDSLHEHIANLAGSPAIKKGILQTVKVVDELVKVMGRHKPENIVIEMARENQTTQKGQKNSRERMKRIEEGIKELGSQILKEHPVENTQLQNEKLYLYYLQNGRDMYVDQELDINRLSDYDVDHIVPQSFLKDDSIDNKVLTRSDKARGKSDNVPSEEVVKKMKNYWRQLLNAKLITQRKFDNLTKAERGGLSELDKAGFIKRQLVETRQITKHVAQILDSRMNTKYDENDKLIREVKVITLKSKLVSDFRKDFQFYKVREINNYHHAHDAYLNAVVGTALIKKYPKLESEFVYGDYKVYDVRKMIAKSEQEIGKATAKYFFYSNIMNFFKTEITLANGEIRKRPLIETNGETGEIVWDKGRDFATVRKVLSMPQVNIVKKTEVQTGGFSKESILPKRNSDKLIARKKDWDPKKYGGFDSPTVAYSVLVVAKVEKGKSKKLKSVKELLGITIMERSSFEKNPIDFLEAKGYKEVKKDLIIKLPKYSLFELENGRKRMLASAGELQKGNELALPSKYVNFLYLASHYEKLKGSPEDNEQKQLFVEQHKHYLDEIIEQISEFSKRVILADANLDKVLSAYNKHRDKPIREQAENIIHLFTLTNLGAPAAFKYFDTTIDRKRYTSTKEVLDATLIHQSITGLYETRIDLSQLGGDGGPAPGSSGGTLNIEDEHRLHETSKEPDVSLGSTWLSDFPQAWAETGGMGLAVRQAPLIIPLKATSTPVSIKQYPMSQEARLGIKPHIQRLLDQGILVPCQSPWNTPLLPVKKPGTNDYRPVQDLREVNKRVEDIHPTVPNPYNLLSGLPPSHQWYTVLDLKDAFFCLRLHPTSQPLFAFEWRDPEMGISGQLTWTRLPQGFKNSPTLFNEALHRDLADFRIQHPDLILLQYVDDLLLAATSELDCQQGTRALLQTLGNLGYRASAKKAQICQKQVKYLGYLLKEGQRWLTEARKETVMGQPTPKTPRQLREFLGKAGFCRLFIPGFAEMAAPLYPLTKPGTLFNWGPDQQKAYQEIKQALLTAPALGLPDLTKPFELFVDEKQGYAKGVLTQKLGPWRRPVAYLSKKLDPVAAGWPPCLRMVAAIAVLTKDAGKLTMGQPLVILAPHAVEALVKQPPDRWLSNARMTHYQALLLDTDRVQFGPVVALNPATLLPLPEEGLQHNCLDILAEAHGTRPDLTDQPLPDADHTWYTDGSSLLQEGQRKAGAAVTTETEVIWAKALPAGTSAQRAELIALTQALKMAEGKKLNVYTDSRYAFATAHIHGEIYRRRGWLTSEGKEIKNKDEILALLKALFLPKRLSIIHCPGHQKGHSAEARGNRMADQAARKAAITETPDTSTLLAGKRTADGSEFEKRTADGSEFESPKKKAKVE

SEQ ID NO: 4514 - protein, 2091 aa, synthetic construct; identical to SEQ ID NO: 4513

SEQ ID NO: 4515 - protein, 2091 aa, synthetic construct
MPAAKRVKLDGGDKKYSIGLDIGTNSVGWAVITDEYKVPSKKFKVLGNTDRHSIKKNLIGALLFDSGETAEATRLKRTARRRYTRRKNRICYLQEIFSNEMAKVDDSFFHRLEESFLVEEDKKHERHPIFGNIVDEVAYHEKYPTIYHLRKKLVDSTDKADLRLIYLALAHMIKFRGHFLIEGDLNPDNSDVDKLFIQLVQTYNQLFEENPINASGVDAKAILSARLSKSRRLENLIAQLPGEKKNGLFGNLIALSLGLTPNFKSNFDLAEDAKLQLSKDTYDDDLDNLLAQIGDQYADLFLAAKNLSDAILLSDILRVNTEITKAPLSASMIKRYDEHHQDLTLLKALVRQQLPEKYKEIFFDQSKNGYAGYIDGGASQEEFYKFIKPILEKMDGTEELLVKLNREDLLRKQRTFDNGSIPHQIHLGELHAILRRQEDFYPFLKDNREKIEKILTFRIPYYVGPLARGNSRFAWMTRKSEETITPWNFEEVVDKGASAQSFIERMTNFDKNLPNEKVLPKHSLLYEYFTVYNELTKVKYVTEGMRKPAFLSGEQKKAIVDLLFKTNRKVTVKQLKEDYFKKIECFDSVEISGVEDRFNASLGTYHDLLKIIKDKDFLDNEENEDILEDIVLTLTLFEDREMIEERLKTYAHLFDDKVMKQLKRRRYTGWGRLSRKLINGIRDKQSGKTILDFLKSDGFANRNFMQLIHDDSLTFKEDIQKAQVSGQGDSLHEHIANLAGSPAIKKGILQTVKVVDELVKVMGRHKPENIVIEMARENQTTQKGQKNSRERMKRIEEGIKELGSQILKEHPVENTQLQNEKLYLYYLQNGRDMYVDQELDINRLSDYDVDHIVPQSFLKDDSIDNKVLTRSDKARGKSDNVPSEEVVKKMKNYWRQLLNAKLITQRKFDNLTKAERGGLSELDKAGFIKRQLVETRQITKHVAQILDSRMNTKYDENDKLIREVKVITLKSKLVSDFRKDFQFYKVREINNYHHAHDAYLNAVVGTALIKKYPKLESEFVYGDYKVYDVRKMIAKSEQEIGKATAKYFFYSNIMNFFKTEITLANGEIRKRPLIETNGETGEIVWDKGRDFATVRKVLSMPQVNIVKKTEVQTGGFSKESILPKRNSDKLIARKKDWDPKKYGGFDSPTVAYSVLVVAKVEKGKSKKLKSVKELLGITIMERSSFEKNPIDFLEAKGYKEVKKDLIIKLPKYSLFELENGRKRMLASAGELQKGNELALPSKYVNFLYLASHYEKLKGSPEDNEQKQLFVEQHKHYLDEIIEQISEFSKRVILADANLDKVLSAYNKHRDKPIREQAENIIHLFTLTNLGAPAAFKYFDTTIDRKRYTSTKEVLDATLIHQSITGLYETRIDLSQLGGDGGEAAAKPAPGGVLNLEEEYRLHEKPVPSSIDPSWLQLFPTVWAERAGMGLANQVPPVVVELRSGASPVAVRQYPMSKEAREGIRPHIQRFLDLGVLVPCQSPWNTPLLPVKKPGTNDYRPVQDLREINKRVQDIHPTVPNPYNLLSSLPPSHTWYSVLDLKDAFFCLKLHPNSQPLFAFEWRDPEKGNTGQLTWTRLPQGFKNSPTLFNEALHRDLAPFRALNPQVVLLQYVDDLLVAAPTYRDCKEGTQKLLQELSKLGYRVSAKKAQLCQKEVTYLGYLLKEGKRWLTPARKATVMKIPPPTTPRQVREFLGKAGFCRLFIPGFASLAAPLYPLTKPSIPFIWTEEHQKAFDRIKEALLSAPALALPDLTKPFTLYVDERAGVARGVLTQTLGPWRRPVAYLSKKLDPVASGWPTCLKAVAAVALLLKDADKLTLGQNVTVIASHSLESIVRQPPDRWMTNARMTHYQSLLLNERVSFAPPAVLNPATLLPVESEATPVHRCSEILAEETGTRRDLKDQPLPGVPAWYTDGSSFIAEGKRRAGAAIVDGKRTVWASSLPEGTSAQKAELVALTQALRLAEGKDINIYTDSRYAFATAHIHGAIYKQRGWLTSAGKDIKNKEEILALLEAIHLPKRVAIIHCPGHQKGNDPVATGNRRADEAAKQAALSTRVLAETTKPAGKRTADGSEFEKRTADGSEFESPKKKAKVE

SEQ ID NO: 4516 - protein, 2093 aa, synthetic construct
MPAAKRVKLDGGDKKYSIGLDIGTNSVGWAVITDEYKVPSKKFKVLGNTDRHSIKKNLIGALLFDSGETAEATRLKRTARRRYTRRKNRICYLQEIFSNEMAKVDDSFFHRLEESFLVEEDKKHERHPIFGNIVDEVAYHEKYPTIYHLRKKLVDSTDKADLRLIYLALAHMIKFRGHFLIEGDLNPDNSDVDKLFIQLVQTYNQLFEENPINASGVDAKAILSARLSKSRRLENLIAQLPGEKKNGLFGNLIALSLGLTPNFKSNFDLAEDAKLQLSKDTYDDDLDNLLAQIGDQYADLFLAAKNLSDAILLSDILRVNTEITKAPLSASMIKRYDEHHQDLTLLKALVRQQLPEKYKEIFFDQSKNGYAGYIDGGASQEEFYKFIKPILEKMDGTEELLVKLNREDLLRKQRTFDNGSIPHQIHLGELHAILRRQEDFYPFLKDNREKIEKILTFRIPYYVGPLARGNSRFAWMTRKSEETITPWNFEEVVDKGASAQSFIERMTNFDKNLPNEKVLPKHSLLYEYFTVYNELTKVKYVTEGMRKPAFLSGEQKKAIVDLLFKTNRKVTVKQLKEDYFKKIECFDSVEISGVEDRFNASLGTYHDLLKIIKDKDFLDNEENEDILEDIVLTLTLFEDREMIEERLKTYAHLFDDKVMKQLKRRRYTGWGRLSRKLINGIRDKQSGKTILDFLKSDGFANRNFMQLIHDDSLTFKEDIQKAQVSGQGDSLHEHIANLAGSPAIKKGILQTVKVVDELVKVMGRHKPENIVIEMARENQTTQKGQKNSRERMKRIEEGIKELGSQILKEHPVENTQLQNEKLYLYYLQNGRDMYVDQELDINRLSDYDVDHIVPQSFLKDDSIDNKVLTRSDKARGKSDNVPSEEVVKKMKNYWRQLLNAKLITQRKFDNLTKAERGGLSELDKAGFIKRQLVETRQITKHVAQILDSRMNTKYDENDKLIREVKVITLKSKLVSDFRKDFQFYKVREINNYHHAHDAYLNAVVGTALIKKYPKLESEFVYGDYKVYDVRKMIAKSEQEIGKATAKYFFYSNIMNFFKTEITLANGEIRKRPLIETNGETGEIVWDKGRDFATVRKVLSMPQVNIVKKTEVQTGGFSKESILPKRNSDKLIARKKDWDPKKYGGFDSPTVAYSVLVVAKVEKGKSKKLKSVKELLGITIMERSSFEKNPIDFLEAKGYKEVKKDLIIKLPKYSLFELENGRKRMLASAGELQKGNELALPSKYVNFLYLASHYEKLKGSPEDNEQKQLFVEQHKHYLDEIIEQISEFSKRVILADANLDKVLSAYNKHRDKPIREQAENIIHLFTLTNLGAPAAFKYFDTTIDRKRYTSTKEVLDATLIHQSITGLYETRIDLSQLGGDGGPAPEAAAKGGLGIEDEYRLHETSTEPDVSLGSTWLSDFPQAWAETGGMGLAVRQAPLIIPLKATSTPVSIQQYPMSHEARLGIKPHIQRLLDQGILVPCQSPWNTPLLPVKKPGTNDYRPVQDLREVNKRVEDIHPTVPNPYNLLSGLPPSHQWYTVLDLKDAFFCLRLHPTSQPLFAFEWRDPGMGISGQLTWTRLPQGFKNSPTLFNEALHRDLADFRIQHPDLILLQYVDDILLAATSELDCQQGTRALLQTLGDLGYRASAKKAQICQKQVKYLGYLLREGQRWLTEARKETVMGQPVPKTPRQLREFLGKAGFCRLFIPGFAEMAAPLYPLTKPGTLFSWGPDQQKAYQEIKQALLTAPALGLPDLTKPFELFVDEKQGYAKGVLTQKLGPWRRPVAYLSKKLDPVAAGWPPCLRMVAAIAVLTKDAGKLTMGQPLVILAPHAVEALVKQPPDRWLSNARMTHYQAMLLDTDRVQFGPVVALNPATLLPLPEEGAPHDCLEILAETHGTRPDLTDQPIPDADHTWYTDGSSFLQEGQRKAGAAVTTETEVIWAGALPAGTSAQRAELIALTQALKMAEGKRLNVYTDSRYAFATAHIHGEIYRRRGWLTSEGREIKNKSEILALLKALFLPKRLSIIHCLGHQKGDSAEARGNRLADQAAREAAIKTPPDTSTLLIAGKRTADGSEFEKRTADGSEFESPKKKAKVE

SEQ ID NO: 4517 - protein, 2094 aa, synthetic construct
MPAAKRVKLDGGDKKYSIGLDIGTNSVGWAVITDEYKVPSKKFKVLGNTDRHSIKKNLIGALLFDSGETAEATRLKRTARRRYTRRKNRICYLQEIFSNEMAKVDDSFFHRLEESFLVEEDKKHERHPIFGNIVDEVAYHEKYPTIYHLRKKLVDSTDKADLRLIYLALAHMIKFRGHFLIEGDLNPDNSDVDKLFIQLVQTYNQLFEENPINASGVDAKAILSARLSKSRRLENLIAQLPGEKKNGLFGNLIALSLGLTPNFKSNFDLAEDAKLQLSKDTYDDDLDNLLAQIGDQYADLFLAAKNLSDAILLSDILRVNTEITKAPLSASMIKRYDEHHQDLTLLKALVRQQLPEKYKEIFFDQSKNGYAGYIDGGASQEEFYKFIKPILEKMDGTEELLVKLNREDLLRKQRTFDNGSIPHQIHLGELHAILRRQEDFYPFLKDNREKIEKILTFRIPYYVGPLARGNSRFAWMTRKSEETITPWNFEEVVDKGASAQSFIERMTNFDKNLPNEKVLPKHSLLYEYFTVYNELTKVKYVTEGMRKPAFLSGEQKKAIVDLLFKTNRKVTVKQLKEDYFKKIECFDSVEISGVEDRFNASLGTYHDLLKIIKDKDFLDNEENEDILEDIVLTLTLFEDREMIEERLKTYAHLFDDKVMKQLKRRRYTGWGRLSRKLINGIRDKQSGKTILDFLKSDGFANRNFMQLIHDDSLTFKEDIQKAQVSGQGDSLHEHIANLAGSPAIKKGILQTVKVVDELVKVMGRHKPENIVIEMARENQTTQKGQKNSRERMKRIEEGIKELGSQILKEHPVENTQLQNEKLYLYYLQNGRDMYVDQELDINRLSDYDVDHIVPQSFLKDDSIDNKVLTRSDKARGKSDNVPSEEVVKKMKNYWRQLLNAKLITQRKFDNLTKAERGGLSELDKAGFIKRQLVETRQITKHVAQILDSRMNTKYDENDKLIREVKVITLKSKLVSDFRKDFQFYKVREINNYHHAHDAYLNAVVGTALIKKYPKLESEFVYGDYKVYDVRKMIAKSEQEIGKATAKYFFYSNIMNFFKTEITLANGEIRKRPLIETNGETGEIVWDKGRDFATVRKVLSMPQVNIVKKTEVQTGGFSKESILPKRNSDKLIARKKDWDPKKYGGFDSPTVAYSVLVVAKVEKGKSKKLKSVKELLGITIMERSSFEKNPIDFLEAKGYKEVKKDLIIKLPKYSLFELENGRKRMLASAGELQKGNELALPSKYVNFLYLASHYEKLKGSPEDNEQKQLFVEQHKHYLDEIIEQISEFSKRVILADANLDKVLSAYNKHRDKPIREQAENIIHLFTLTNLGAPAAFKYFDTTIDRKRYTSTKEVLDATLIHQSITGLYETRIDLSQLGGDGGGSSGGGGGSGGLGIEDEYRLHETSTEPDVSLGSTWLSDFPQAWAETGGMGLAVRQAPLIIPLKATSTPVSIQQYPMSHEARLGIKPHIQRLLDQGILVPCQSPWNTPLLPVKKPGTNDYRPVQDLREVNKRVEDIHPTVPNPYNLLSGLPPSHQWYTVLDLKDAFFCLRLHPTSQPLFAFEWRDPGMGISGQLTWTRLPQGFKNSPTLFNEALHRDLADFRIQHPDLILLQYVDDILLAATSELDCQQGTRALLQTLGDLGYRASAKKAQICQKQVKYLGYLLREGQRWLTEARKETVMGQPVPKTPRQLREFLGKAGFCRLFIPGFAEMAAPLYPLTKPGTLFSWGPDQQKAYQEIKQALLTAPALGLPDLTKPFELFVDEKQGYAKGVLTQKLGPWRRPVAYLSKKLDPVAAGWPPCLRMVAAIAVLTKDAGKLTMGQPLVILAPHAVEALVKQPPDRWLSNARMTHYQAMLLDTDRVQFGPVVALNPATLLPLPEEGAPHDCLEILAETHGTRPDLTDQPIPDADHTWYTDGSSFLQEGQRKAGAAVTTETEVIWAGALPAGTSAQRAELIALTQALKMAEGKRLNVYTDSRYAFATAHIHGEIYRRRGWLTSEGREIKNKSEILALLKALFLPKRLSIIHCLGHQKGDSAEARGNRLADQAAREAAIKTPPDTSTLLIAGKRTADGSEFEKRTADGSEFESPKKKAKVE

SEQ ID NO: 4518 - protein, 2094 aa, synthetic construct
MPAAKRVKLDGGDKKYSIGLDIGTNSVGWAVITDEYKVPSKKFKVLGNTDRHSIKKNLIGALLFDSGETAEATRLKRTARRRYTRRKNRICYLQEIFSNEMAKVDDSFFHRLEESFLVEEDKKHERHPIFGNIVDEVAYHEKYPTIYHLRKKLVDSTDKADLRLIYLALAHMIKFRGHFLIEGDLNPDNSDVDKLFIQLVQTYNQLFEENPINASGVDAKAILSARLSKSRRLENLIAQLPGEKKNGLFGNLIALSLGLTPNFKSNFDLAEDAKLQLSKDTYDDDLDNLLAQIGDQYADLFLAAKNLSDAILLSDILRVNTEITKAPLSASMIKRYDEHHQDLTLLKALVRQQLPEKYKEIFFDQSKNGYAGYIDGGASQEEFYKFIKPILEKMDGTEELLVKLNREDLLRKQRTFDNGSIPHQIHLGELHAILRRQEDFYPFLKDNREKIEKILTFRIPYYVGPLARGNSRFAWMTRKSEETITPWNFEEVVDKGASAQSFIERMTNFDKNLPNEKVLPKHSLLYEYFTVYNELTKVKYVTEGMRKPAFLSGEQKKAIVDLLFKTNRKVTVKQLKEDYFKKIECFDSVEISGVEDRFNASLGTYHDLLKIIKDKDFLDNEENEDILEDIVLTLTLFEDREMIEERLKTYAHLFDDKVMKQLKRRRYTGWGRLSRKLINGIRDKQSGKTILDFLKSDGFANRNFMQLIHDDSLTFKEDIQKAQVSGQGDSLHEHIANLAGSPAIKKGILQTVKVVDELVKVMGRHKPENIVIEMARENQTTQKGQKNSRERMKRIEEGIKELGSQILKEHPVENTQLQNEKLYLYYLQNGRDMYVDQELDINRLSDYDVDHIVPQSFLKDDSIDNKVLTRSDKARGKSDNVPSEEVVKKMKNYWRQLLNAKLITQRKFDNLTKAERGGLSELDKAGFIKRQLVETRQITKHVAQILDSRMNTKYDENDKLIREVKVITLKSKLVSDFRKDFQFYKVREINNYHHAHDAYLNAVVGTALIKKYPKLESEFVYGDYKVYDVRKMIAKSEQEIGKATAKYFFYSNIMNFFKTEITLANGEIRKRPLIETNGETGEIVWDKGRDFATVRKVLSMPQVNIVKKTEVQTGGFSKESILPKRNSDKLIARKKDWDPKKYGGFDSPTVAYSVLVVAKVEKGKSKKLKSVKELLGITIMERSSFEKNPIDFLEAKGYKEVKKDLIIKLPKYSLFELENGRKRMLASAGELQKGNELALPSKYVNFLYLASHYEKLKGSPEDNEQKQLFVEQHKHYLDEIIEQISEFSKRVILADANLDKVLSAYNKHRDKPIREQAENIIHLFTLTNLGAPAAFKYFDTTIDRKRYTSTKEVLDATLIHQSITGLYETRIDLSQLGGDGGGSSGGGGGSGGTLNIEDEYRLHETSKEPDVPLGSTWLSDFPQAWAETGGMGLAVRQAPLIIPLKATSTPVSIKQYPMSQEARLGIKPHIQRLLDQGILVPCQSPWNTPLLPVKKPGTNDYRPVQDLREVNKRVEDIHPTVPNPYNLLSGLPPSHQWYTVLDLKDAFFCLRLHPTSQPLFAFEWRDPEMGISGQLTWTRLPQGFKNSPTLFNEALHRDLADFRIQHPDLILLQYVDDLLLAATSEQDCQRGTRALLQTLGNLGYRASAKKAQICQKQVKYLGYLLKEGQRWLTEARKETVMGQPTPKTPRQLREFLGKAGFCRLFIPGFAEMAAPLYPLTKPGTLFNWGPDQQKAYQEIKQALLTAPALGLPDLTKPFELFVDEKQGYAKGVLTQKLGPWRRPVAYLSKKLDPVAAGWPPCLRMVAAIAVLTKDAGKLTMGQPLVILAPHAVEALVKQPPDRWLSNARMTHYQAMLLDTDRVQFGPVVALNPATLLPLPEKEAPHDCLEILAETHGTRPDLTDQPIPDADYTWYTDGSSFLQEGQRRAGAAVTTETEVIWARALPAGTSAQRAELIALTQALKMAEGKKLNVYTDSRYAFATAHVHGEIYRRRGWLTSEGREIKNKNEILALLKALFLPKRLSIIHCPGHQKGNSAEARGNRMADQAAREAAMKAVLETSTLLAGKRTADGSEFEKRTADGSEFESPKKKAKVE

SEQ ID NO: 4519 - protein, 2096 aa, synthetic construct
MPAAKRVKLDGGDKKYSIGLDIGTNSVGWAVITDEYKVPSKKFKVLGNTDRHSIKKNLIGALLFDSGETAEATRLKRTARRRYTRRKNRICYLQEIFSNEMAKVDDSFFHRLEESFLVEEDKKHERHPIFGNIVDEVAYHEKYPTIYHLRKKLVDSTDKADLRLIYLALAHMIKFRGHFLIEGDLNPDNSDVDKLFIQLVQTYNQLFEENPINASGVDAKAILSARLSKSRRLENLIAQLPGEKKNGLFGNLIALSLGLTPNFKSNFDLAEDAKLQLSKDTYDDDLDNLLAQIGDQYADLFLAAKNLSDAILLSDILRVNTEITKAPLSASMIKRYDEHHQDLTLLKALVRQQLPEKYKEIFFDQSKNGYAGYIDGGASQEEFYKFIKPILEKMDGTEELLVKLNREDLLRKQRTFDNGSIPHQIHLGELHAILRRQEDFYPFLKDNREKIEKILTFRIPYYVGPLARGNSRFAWMTRKSEETITPWNFEEVVDKGASAQSFIERMTNFDKNLPNEKVLPKHSLLYEYFTVYNELTKVKYVTEGMRKPAFLSGEQKKAIVDLLFKTNRKVTVKQLKEDYFKKIECFDSVEISGVEDRFNASLGTYHDLLKIIKDKDFLDNEENEDILEDIVLTLTLFEDREMIEERLKTYAHLFDDKVMKQLKRRRYTGWGRLSRKLINGIRDKQSGKTILDFLKSDGFANRNFMQLIHDDSLTFKEDIQKAQVSGQGDSLHEHIANLAGSPAIKKGILQTVKVVDELVKVMGRHKPENIVIEMARENQTTQKGQKNSRERMKRIEEGIKELGSQILKEHPVENTQLQNEKLYLYYLQNGRDMYVDQELDINRLSDYDVDHIVPQSFLKDDSIDNKVLTRSDKARGKSDNVPSEEVVKKMKNYWRQLLNAKLITQRKFDNLTKAERGGLSELDKAGFIKRQLVETRQITKHVAQILDSRMNTKYDENDKLIREVKVITLKSKLVSDFRKDFQFYKVREINNYHHAHDAYLNAVVGTALIKKYPKLESEFVYGDYKVYDVRKMIAKSEQEIGKATAKYFFYSNIMNFFKTEITLANGEIRKRPLIETNGETGEIVWDKGRDFATVRKVLSMPQVNIVKKTEVQTGGFSKESILPKRNSDKLIARKKDWDPKKYGGFDSPTVAYSVLVVAKVEKGKSKKLKSVKELLGITIMERSSFEKNPIDFLEAKGYKEVKKDLIIKLPKYSLFELENGRKRMLASAGELQKGNELALPSKYVNFLYLASHYEKLKGSPEDNEQKQLFVEQHKHYLDEIIEQISEFSKRVILADANLDKVLSAYNKHRDKPIREQAENIIHLFTLTNLGAPAAFKYFDTTIDRKRYTSTKEVLDATLIHQSITGLYETRIDLSQLGGDGGGGGGGSEAAAKGGTLNIEDEYRLHETSKEPDVPLGSTWLSDFPQAWAETGGMGLAVRQAPLIIPLKATSTPVSIKQYPMSQEARLGIKPHIQRLLDQGILVPCQSPWNTPLLPVKKPGTNDYRPVQDLREVNKRVEDIHPTVPNPYNLLSGLPPSHQWYTVLDLKDAFFCLRLHPTSQPLFAFEWRDPEMGISGQLTWTRLPQGFKNSPTLFNEALHRDLADFRIQHPDLILLQYVDDLLLAATSEQDCQRGTRALLQTLGNLGYRASAKKAQICQKQVKYLGYLLKEGQRWLTEARKETVMGQPTPKTPRQLREFLGKAGFCRLFIPGFAEMAAPLYPLTKPGTLFNWGPDQQKAYQEIKQALLTAPALGLPDLTKPFELFVDEKQGYAKGVLTQKLGPWRRPVAYLSKKLDPVAAGWPPCLRMVAAIAVLTKDAGKLTMGQPLVILAPHAVEALVKQPPDRWLSNARMTHYQAMLLDTDRVQFGPVVALNPATLLPLPEKEAPHDCLEILAETHGTRPDLTDQPIPDADYTWYTDGSSFLQEGQRRAGAAVTTETEVIWARALPAGTSAQRAELIALTQALKMAEGKKLNVYTDSRYAFATAHVHGEIYRRRGWLTSEGREIKNKNEILALLKALFLPKRLSIIHCPGHQKGNSAEARGNRMADQAAREAAMKAVLETSTLLAGKRTADGSEFEKRTADGSEFESPKKKAKVE

SEQ ID NO: 4520 - protein, 2094 aa, synthetic construct
MPAAKRVKLDGGDKKYSIGLDIGTNSVGWAVITDEYKVPSKKFKVLGNTDRHSIKKNLIGALLFDSGETAEATRLKRTARRRYTRRKNRICYLQEIFSNEMAKVDDSFFHRLEESFLVEEDKKHERHPIFGNIVDEVAYHEKYPTIYHLRKKLVDSTDKADLRLIYLALAHMIKFRGHFLIEGDLNPDNSDVDKLFIQLVQTYNQLFEENPINASGVDAKAILSARLSKSRRLENLIAQLPGEKKNGLFGNLIALSLGLTPNFKSNFDLAEDAKLQLSKDTYDDDLDNLLAQIGDQYADLFLAAKNLSDAILLSDILRVNTEITKAPLSASMIKRYDEHHQDLTLLKALVRQQLPEKYKEIFFDQSKNGYAGYIDGGASQEEFYKFIKPILEKMDGTEELLVKLNREDLLRKQRTFDNGSIPHQIHLGELHAILRRQEDFYPFLKDNREKIEKILTFRIPYYVGPLARGNSRFAWMTRKSEETITPWNFEEVVDKGASAQSFIERMTNFDKNLPNEKVLPKHSLLYEYFTVYNELTKVKYVTEGMRKPAFLSGEQKKAIVDLLFKTNRKVTVKQLKEDYFKKIECFDSVEISGVEDRFNASLGTYHDLLKIIKDKDFLDNEENEDILEDIVLTLTLFEDREMIEERLKTYAHLFDDKVMKQLKRRRYTGWGRLSRKLINGIRDKQSGKTILDFLKSDGFANRNFMQLIHDDSLTFKEDIQKAQVSGQGDSLHEHIANLAGSPAIKKGILQTVKVVDELVKVMGRHKPENIVIEMARENQTTQKGQKNSRERMKRIEEGIKELGSQILKEHPVENTQLQNEKLYLYYLQNGRDMYVDQELDINRLSDYDVDHIVPQSFLKDDSIDNKVLTRSDKARGKSDNVPSEEVVKKMKNYWRQLLNAKLITQRKFDNLTKAERGGLSELDKAGFIKRQLVETRQITKHVAQILDSRMNTKYDENDKLIREVKVITLKSKLVSDFRKDFQFYKVREINNYHHAHDAYLNAVVGTALIKKYPKLESEFVYGDYKVYDVRKMIAKSEQEIGKATAKYFFYSNIMNFFKTEITLANGEIRKRPLIETNGETGEIVWDKGRDFATVRKVLSMPQVNIVKKTEVQTGGFSKESILPKRNSDKLIARKKDWDPKKYGGFDSPTVAYSVLVVAKVEKGKSKKLKSVKELLGITIMERSSFEKNPIDFLEAKGYKEVKKDLIIKLPKYSLFELENGRKRMLASAGELQKGNELALPSKYVNFLYLASHYEKLKGSPEDNEQKQLFVEQHKHYLDEIIEQISEFSKRVILADANLDKVLSAYNKHRDKPIREQAENIIHLFTLTNLGAPAAFKYFDTTIDRKRYTSTKEVLDATLIHQSITGLYETRIDLSQLGGDGGGGGGGSPAPGGTLNLEDEYRLYETSAEPEVSPGSTWLSDFPQAWAETGGMGLAVRQAPLIIPLKATSTPVSIKQYPMSQEAKLGIKPHIQRLLDQGILVPCQSPWNTPLLPVKKPGTNDYRPVQDLREVNKRVEDIHPTVPNPYNLLSGLPPSHRWYTVLDLKDAFFCLRLHPTSQPLFAFEWRDPGMGISGQLTWTRLPQGFKNSPTLFNEALHRDLADFRIQHPDLILLQYVDDILLAATSELDCQQGTRALLLTLGNLGYRASAKKAQLCQKQVKYLGYLLKEGQRWLTEARKETVMGQPTPKTPRQLREFLGKAGFCRLFIPGFAEMAAPLYPLTKPGTLFNWGPDQQKAYQEIKQALLTAPALGLPDLTKPFELFVDEKQGYAKGVLTQKLGPWRRPVAYLSKKLDPVAAGWPPCLRMVAAIAVLRKDAGKLTMGQPLVILAPHAVEALVKQPPDRWLSNARMTHYQAMLLDTDRVQFGPVVALNPATLLPLPEEGAPHDCLEILAETHGTRPDLTDQPIPDADHTWYTDGSSFLQEGQRKAGAAVTTETEVIWARALPAGTSAQRAELIALTQALKMAEGKRLNVYTDSRYAFATAHIHGEIYRRRGWLTSEGREIKNKSEILALLKALFLPKRLSIIHCLGHQKGDSAEARGNRLADQAAREAAIKTPPDTSTLLAGKRTADGSEFEKRTADGSEFESPKKKAKVE

SEQ ID NO: 4521 - protein, 2094 aa, synthetic construct
MPAAKRVKLDGGDKKYSIGLDIGTNSVGWAVITDEYKVPSKKFKVLGNTDRHSIKKNLIGALLFDSGETAEATRLKRTARRRYTRRKNRICYLQEIFSNEMAKVDDSFFHRLEESFLVEEDKKHERHPIFGNIVDEVAYHEKYPTIYHLRKKLVDSTDKADLRLIYLALAHMIKFRGHFLIEGDLNPDNSDVDKLFIQLVQTYNQLFEENPINASGVDAKAILSARLSKSRRLENLIAQLPGEKKNGLFGNLIALSLGLTPNFKSNFDLAEDAKLQLSKDTYDDDLDNLLAQIGDQYADLFLAAKNLSDAILLSDILRVNTEITKAPLSASMIKRYDEHHQDLTLLKALVRQQLPEKYKEIFFDQSKNGYAGYIDGGASQEEFYKFIKPILEKMDGTEELLVKLNREDLLRKQRTFDNGSIPHQIHLGELHAILRRQEDFYPFLKDNREKIEKILTFRIPYYVGPLARGNSRFAWMTRKSEETITPWNFEEVVDKGASAQSFIERMTNFDKNLPNEKVLPKHSLLYEYFTVYNELTKVKYVTEGMRKPAFLSGEQKKAIVDLLFKTNRKVTVKQLKEDYFKKIECFDSVEISGVEDRFNASLGTYHDLLKIIKDKDFLDNEENEDILEDIVLTLTLFEDREMIEERLKTYAHLFDDKVMKQLKRRRYTGWGRLSRKLINGIRDKQSGKTILDFLKSDGFANRNFMQLIHDDSLTFKEDIQKAQVSGQGDSLHEHIANLAGSPAIKKGILQTVKVVDELVKVMGRHKPENIVIEMARENQTTQKGQKNSRERMKRIEEGIKELGSQILKEHPVENTQLQNEKLYLYYLQNGRDMYVDQELDINRLSDYDVDHIVPQSFLKDDSIDNKVLTRSDKARGKSDNVPSEEVVKKMKNYWRQLLNAKLITQRKFDNLTKAERGGLSELDKAGFIKRQLVETRQITKHVAQILDSRMNTKYDENDKLIREVKVITLKSKLVSDFRKDFQFYKVREINNYHHAHDAYLNAVVGTALIKKYPKLESEFVYGDYKVYDVRKMIAKSEQEIGKATAKYFFYSNIMNFFKTEITLANGEIRKRPLIETNGETGEIVWDKGRDFATVRKVLSMPQVNIVKKTEVQTGGFSKESILPKRNSDKLIARKKDWDPKKYGGFDSPTVAYSVLVVAKVEKGKSKKLKSVKELLGITIMERSSFEKNPIDFLEAKGYKEVKKDLIIKLPKYSLFELENGRKRMLASAGELQKGNELALPSKYVNFLYLASHYEKLKGSPEDNEQKQLFVEQHKHYLDEIIEQISEFSKRVILADANLDKVLSAYNKHRDKPIREQAENIIHLFTLTNLGAPAAFKYFDTTIDRKRYTSTKEVLDATLIHQSITGLYETRIDLSQLGGDGGPAPGGGGGSGGTLNIEDEHRLHETSKEPDVSLGSTWLSDFPQAWAETGGMGLAVRQAPLIIPLKATSTPVSIKQYPMSQEARLGIKPHIQRLLDQGILVPCQSPWNTPLLPVKKPGTNDYRPVQDLREVNKRVEDIHPTVPNPYNLLSGLPPSHQWYTVLDLKDAFFCLRLHPTSQPLFAFEWRDPEMGISGQLTWTRLPQGFKNSPTLFNEALHRDLADFRIQHPDLILLQYVDDLLLAATSELDCQQGTRALLQTLGNLGYRASAKKAQICQKQVKYLGYLLKEGQRWLTEARKETVMGQPTPKTPRQLREFLGKAGFCRLFIPGFAEMAAPLYPLTKPGTLFNWGPDQQKAYQEIKQALLTAPALGLPDLTKPFELFVDEKQGYAKGVLTQKLGPWRRPVAYLSKKLDPVAAGWPPCLRMVAAIAVLTKDAGKLTMGQPLVILAPHAVEALVKQPPDRWLSNARMTHYQALLLDTDRVQFGPVVALNPATLLPLPEEGLQHNCLDILAEAHGTRPDLTDQPLPDADHTWYTDGSSLLQEGQRKAGAAVTTETEVIWAKALPAGTSAQRAELIALTQALKMAEGKKLNVYTDSRYAFATAHIHGEIYRRRGWLTSEGKEIKNKDEILALLKALFLPKRLSIIHCPGHQKGHSAEARGNRMADQAARKAAITETPDTSTLLAGKRTADGSEFEKRTADGSEFESPKKKAKVE

SEQ ID NO: 4522 - protein, 2096 aa, synthetic construct
MPAAKRVKLDGGDKKYSIGLDIGTNSVGWAVITDEYKVPSKKFKVLGNTDRHSIKKNLIGALLFDSGETAEATRLKRTARRRYTRRKNRICYLQEIFSNEMAKVDDSFFHRLEESFLVEEDKKHERHPIFGNIVDEVAYHEKYPTIYHLRKKLVDSTDKADLRLIYLALAHMIKFRGHFLIEGDLNPDNSDVDKLFIQLVQTYNQLFEENPINASGVDAKAILSARLSKSRRLENLIAQLPGEKKNGLFGNLIALSLGLTPNFKSNFDLAEDAKLQLSKDTYDDDLDNLLAQIGDQYADLFLAAKNLSDAILLSDILRVNTEITKAPLSASMIKRYDEHHQDLTLLKALVRQQLPEKYKEIFFDQSKNGYAGYIDGGASQEEFYKFIKPILEKMDGTEELLVKLNREDLLRKQRTFDNGSIPHQIHLGELHAILRRQEDFYPFLKDNREKIEKILTFRIPYYVGPLARGNSRFAWMTRKSEETITPWNFEEVVDKGASAQSFIERMTNFDKNLPNEKVLPKHSLLYEYFTVYNELTKVKYVTEGMRKPAFLSGEQKKAIVDLLFKTNRKVTVKQLKEDYFKKIECFDSVEISGVEDRFNASLGTYHDLLKIIKDKDFLDNEENEDILEDIVLTLTLFEDREMIEERLKTYAHLFDDKVMKQLKRRRYTGWGRLSRKLINGIRDKQSGKTILDFLKSDGFANRNFMQLIHDDSLTFKEDIQKAQVSGQGDSLHEHIANLAGSPAIKKGILQTVKVVDELVKVMGRHKPENIVIEMARENQTTQKGQKNSRERMKRIEEGIKELGSQILKEHPVENTQLQNEKLYLYYLQNGRDMYVDQELDINRLSDYDVDHIVPQSFLKDDSIDNKVLTRSDKARGKSDNVPSEEVVKKMKNYWRQLLNAKLITQRKFDNLTKAERGGLSELDKAGFIKRQLVETRQITKHVAQILDSRMNTKYDENDKLIREVKVITLKSKLVSDFRKDFQFYKVREINNYHHAHDAYLNAVVGTALIKKYPKLESEFVYGDYKVYDVRKMIAKSEQEIGKATAKYFFYSNIMNFFKTEITLANGEIRKRPLIETNGETGEIVWDKGRDFATVRKVLSMPQVNIVKKTEVQTGGFSKESILPKRNSDKLIARKKDWDPKKYGGFDSPTVAYSVLVVAKVEKGKSKKLKSVKELLGITIMERSSFEKNPIDFLEAKGYKEVKKDLIIKLPKYSLFELENGRKRMLASAGELQKGNELALPSKYVNFLYLASHYEKLKGSPEDNEQKQLFVEQHKHYLDEIIEQISEFSKRVILADANLDKVLSAYNKHRDKPIREQAENIIHLFTLTNLGAPAAFKYFDTTIDRKRYTSTKEVLDATLIHQSITGLYETRIDLSQLGGDGGGGSEAAAKGSSGGTLNIEDEYRLHETSKEPDVPLGSTWLSDFPQAWAETGGMGLAVRQAPLIIPLKATSTPVSIKQYPMSQEARLGIKPHIQRLLDQGILVPCQSPWNTPLLPVKKPGTNDYRPVQDLREVNKRVEDIHPTVPNPYNLLSGLPPSHQWYTVLDLKDAFFCLRLHPTSQPLFAFEWRDPEMGISGQLTWTRLPQGFKNSPTLFNEALHRDLADFRIQHPDLILLQYVDDLLLAATSEQDCQRGTRALLQTLGNLGYRASAKKAQICQKQVKYLGYLLKEGQRWLTEARKETVMGQPTPKTPRQLREFLGKAGFCRLFIPGFAEMAAPLYPLTKPGTLFNWGPDQQKAYQEIKQALLTAPALGLPDLTKPFELFVDEKQGYAKGVLTQKLGPWRRPVAYLSKKLDPVAAGWPPCLRMVAAIAVLTKDAGKLTMGQPLVILAPHAVEALVKQPPDRWLSNARMTHYQAMLLDTDRVQFGPVVALNPATLLPLPEKEAPHDCLEILAETHGTRPDLTDQPIPDADYTWYTDGSSFLQEGQRRAGAAVTTETEVIWARALPAGTSAQRAELIALTQALKMAEGKKLNVYTDSRYAFATAHVHGEIYRRRGWLTSEGREIKNKNEILALLKALFLPKRLSIIHCPGHQKGNSAEARGNRMADQAAREAAMKAVLETSTLLAGKRTADGSEFEKRTADGSEFESPKKKAKVE

SEQ ID NO: 4523 - protein, 2096 aa, synthetic construct
MPAAKRVKLDGGDKKYSIGLDIGTNSVGWAVITDEYKVPSKKFKVLGNTDRHSIKKNLIGALLFDSGETAEATRLKRTARRRYTRRKNRICYLQEIFSNEMAKVDDSFFHRLEESFLVEEDKKHERHPIFGNIVDEVAYHEKYPTIYHLRKKLVDSTDKADLRLIYLALAHMIKFRGHFLIEGDLNPDNSDVDKLFIQLVQTYNQLFEENPINASGVDAKAILSARLSKSRRLENLIAQLPGEKKNGLFGNLIALSLGLTPNFKSNFDLAEDAKLQLSKDTYDDDLDNLLAQIGDQYADLFLAAKNLSDAILLSDILRVNTEITKAPLSASMIKRYDEHHQDLTLLKALVRQQLPEKYKEIFFDQSKNGYAGYIDGGASQEEFYKFIKPILEKMDGTEELLVKLNREDLLRKQRTFDNGSIPHQIHLGELHAILRRQEDFYPFLKDNREKIEKILTFRIPYYVGPLARGNSRFAWMTRKSEETITPWNFEEVVDKGASAQSFIERMTNFDKNLPNEKVLPKHSLLYEYFTVYNELTKVKYVTEGMRKPAFLSGEQKKAIVDLLFKTNRKVTVKQLKEDYFKKIECFDSVEISGVEDRFNASLGTYHDLLKIIKDKDFLDNEENEDILEDIVLTLTLFEDREMIEERLKTYAHLFDDKVMKQLKRRRYTGWGRLSRKLINGIRDKQSGKTILDFLKSDGFANRNFMQLIHDDSLTFKEDIQKAQVSGQGDSLHEHIANLAGSPAIKKGILQTVKVVDELVKVMGRHKPENIVIEMARENQTTQKGQKNSRERMKRIEEGIKELGSQILKEHPVENTQLQNEKLYLYYLQNGRDMYVDQELDINRLSDYDVDHIVPQSFLKDDSIDNKVLTRSDKARGKSDNVPSEEVVKKMKNYWRQLLNAKLITQRKFDNLTKAERGGLSELDKAGFIKRQLVETRQITKHVAQILDSRMNTKYDENDKLIREVKVITLKSKLVSDFRKDFQFYKVREINNYHHAHDAYLNAVVGTALIKKYPKLESEFVYGDYKVYDVRKMIAKSEQEIGKATAKYFFYSNIMNFFKTEITLANGEIRKRPLIETNGETGEIVWDKGRDFATVRKVLSMPQVNIVKKTEVQTGGFSKESILPKRNSDKLIARKKDWDPKKYGGFDSPTVAYSVLVVAKVEKGKSKKLKSVKELLGITIMERSSFEKNPIDFLEAKGYKEVKKDLIIKLPKYSLFELENGRKRMLASAGELQKGNELALPSKYVNFLYLASHYEKLKGSPEDNEQKQLFVEQHKHYLDEIIEQISEFSKRVILADANLDKVLSAYNKHRDKPIREQAENIIHLFTLTNLGAPAAFKYFDTTIDRKRYTSTKEVLDATLIHQSITGLYETRIDLSQLGGDGGEAAAKGGSGSSGGTLNIEDEYRLHETSKEPDVPLGSTWLSDFPQAWAETGGMGLAVRQAPLIIPLKATSTPVSIKQYPMSQEARLGIKPHIQRLLDQGILVPCQSPWNTPLLPVKKPGTNDYRPVQDLREVNKRVEDIHPTVPNPYNLLSGLPPSHQWYTVLDLKDAFFCLRLHPTSQPLFAFEWRDPEMGISGQLTWTRLPQGFKNSPTLFNEALHRDLADFRIQHPDLILLQYVDDLLLAATSEQDCQRGTRALLQTLGNLGYRASAKKAQICQKQVKYLGYLLKEGQRWLTEARKETVMGQPTPKTPRQLREFLGTAGFCRLWIPGFAEMAAPLYPLTKPGTLFNWGPDQQKAYQEIKQALLTAPALGLPDLTKPFELFVDEKQGYAKGVLTQKLGPWRRPVAYLSKKLDPVAAGWPPCLRMVAAIAVLTKDAGKLTMGQPLVILAPHAVEALVKQPPDRWLSNARMTHYQAMLLDTDRVQFGPVVALNPATLLPLPEKEAPHDCLEILAETHGTRPDLTDQPIPDADYTWYTDGSSFLQEGQRRAGAAVTTETEVIWARALPAGTSAQRAELIALTQALKMAEGKKLNVYTDSRYAFATAHVHGEIYRRRGWLTSEGREIKNKNEILALLKALFLPKRLSIIHCPGHQKGNSAEARGNRMADQAAREAAMKAVLETSTLLAGKRTADGSEFEKRTADGSEFESPKKKAKVE

SEQ ID NO: 4524 - protein, 2096 aa, synthetic construct
MPAAKRVKLDGGDKKYSIGLDIGTNSVGWAVITDEYKVPSKKFKVLGNTDRHSIKKNLIGALLFDSGETAEATRLKRTARRRYTRRKNRICYLQEIFSNEMAKVDDSFFHRLEESFLVEEDKKHERHPIFGNIVDEVAYHEKYPTIYHLRKKLVDSTDKADLRLIYLALAHMIKFRGHFLIEGDLNPDNSDVDKLFIQLVQTYNQLFEENPINASGVDAKAILSARLSKSRRLENLIAQLPGEKKNGLFGNLIALSLGLTPNFKSNFDLAEDAKLQLSKDTYDDDLDNLLAQIGDQYADLFLAAKNLSDAILLSDILRVNTEITKAPLSASMIKRYDEHHQDLTLLKALVRQQLPEKYKEIFFDQSKNGYAGYIDGGASQEEFYKFIKPILEKMDGTEELLVKLNREDLLRKQRTFDNGSIPHQIHLGELHAILRRQEDFYPFLKDNREKIEKILTFRIPYYVGPLARGNSRFAWMTRKSEETITPWNFEEVVDKGASAQSFIERMTNFDKNLPNEKVLPKHSLLYEYFTVYNELTKVKYVTEGMRKPAFLSGEQKKAIVDLLFKTNRKVTVKQLKEDYFKKIECFDSVEISGVEDRFNASLGTYHDLLKIIKDKDFLDNEENEDILEDIVLTLTLFEDREMIEERLKTYAHLFDDKVMKQLKRRRYTGWGRLSRKLINGIRDKQSGKTILDFLKSDGFANRNFMQLIHDDSLTFKEDIQKAQVSGQGDSLHEHIANLAGSPAIKKGILQTVKVVDELVKVMGRHKPENIVIEMARENQTTQKGQKNSRERMKRIEEGIKELGSQILKEHPVENTQLQNEKLYLYYLQNGRDMYVDQELDINRLSDYDVDHIVPQSFLKDDSIDNKVLTRSDKARGKSDNVPSEEVVKKMKNYWRQLLNAKLITQRKFDNLTKAERGGLSELDKAGFIKRQLVETRQITKHVAQILDSRMNTKYDENDKLIREVKVITLKSKLVSDFRKDFQFYKVREINNYHHAHDAYLNAVVGTALIKKYPKLESEFVYGDYKVYDVRKMIAKSEQEIGKATAKYFFYSNIMNFFKTEITLANGEIRKRPLIETNGETGEIVWDKGRDFATVRKVLSMPQVNIVKKTEVQTGGFSKESILPKRNSDKLIARKKDWDPKKYGGFDSPTVAYSVLVVAKVEKGKSKKLKSVKELLGITIMERSSFEKNPIDFLEAKGYKEVKKDLIIKLPKYSLFELENGRKRMLASAGELQKGNELALPSKYVNFLYLASHYEKLKGSPEDNEQKQLFVEQHKHYLDEIIEQISEFSKRVILADANLDKVLSAYNKHRDKPIREQAENIIHLFTLTNLGAPAAFKYFDTTIDRKRYTSTKEVLDATLIHQSITGLYETRIDLSQLGGDGGEAAAKGSSGGSGGTLNIEDEYRLHETSKEPDVPLGSTWLSDFPQAWAETGGMGLAVRQAPLIIPLKATSTPVSIKQYPMSQEARLGIKPHIQRLLDQGILVPCQSPWNTPLLPVKKPGTNDYRPVQDLREVNKRVEDIHPTVPNPYNLLSGLPPSHQWYTVLDLKDAFFCLRLHPTSQPLFAFEWRDPEMGISGQLTWTRLPQGFKNSPTLFNEALHRDLADFRIQHPDLILLQYVDDLLLAATSEQDCQRGTRALLQTLGNLGYRASAKKAQICQKQVKYLGYLLKEGQRWLTEARKETVMGQPTPKTPRQLREFLGTAGFCRLWIPGFAEMAAPLYPLTKPGTLFNWGPDQQKAYQEIKQALLTAPALGLPDLTKPFELFVDEKQGYAKGVLTQKLGPWRRPVAYLSKKLDPVAAGWPPCLRMVAAIAVLTKDAGKLTMGQPLVILAPHAVEALVKQPPDRWLSNARMTHYQAMLLDTDRVQFGPVVALNPATLLPLPEKEAPHDCLEILAETHGTRPDLTDQPIPDADYTWYTDGSSFLQEGQRRAGAAVTTETEVIWARALPAGTSAQRAELIALTQALKMAEGKKLNVYTDSRYAFATAHVHGEIYRRRGWLTSEGREIKNKNEILALLKALFLPKRLSIIHCPGHQKGNSAEARGNRMADQAAREAAMKAVLETSTLLAGKRTADGSEFEKRTADGSEFESPKKKAKVE

SEQ ID NO: 4525 - protein, 2094 aa, synthetic construct
MPAAKRVKLDGGDKKYSIGLDIGTNSVGWAVITDEYKVPSKKFKVLGNTDRHSIKKNLIGALLFDSGETAEATRLKRTARRRYTRRKNRICYLQEIFSNEMAKVDDSFFHRLEESFLVEEDKKHERHPIFGNIVDEVAYHEKYPTIYHLRKKLVDSTDKADLRLIYLALAHMIKFRGHFLIEGDLNPDNSDVDKLFIQLVQTYNQLFEENPINASGVDAKAILSARLSKSRRLENLIAQLPGEKKNGLFGNLIALSLGLTPNFKSNFDLAEDAKLQLSKDTYDDDLDNLLAQIGDQYADLFLAAKNLSDAILLSDILRVNTEITKAPLSASMIKRYDEHHQDLTLLKALVRQQLPEKYKEIFFDQSKNGYAGYIDGGASQEEFYKFIKPILEKMDGTEELLVKLNREDLLRKQRTFDNGSIPHQIHLGELHAILRRQEDFYPFLKDNREKIEKILTFRIPYYVGPLARGNSRFAWMTRKSEETITPWNFEEVVDKGASAQSFIERMTNFDKNLPNEKVLPKHSLLYEYFTVYNELTKVKYVTEGMRKPAFLSGEQKKAIVDLLFKTNRKVTVKQLKEDYFKKIECFDSVEISGVEDRFNASLGTYHDLLKIIKDKDFLDNEENEDILEDIVLTLTLFEDREMIEERLKTYAHLFDDKVMKQLKRRRYTGWGRLSRKLINGIRDKQSGKTILDFLKSDGFANRNFMQLIHDDSLTFKEDIQKAQVSGQGDSLHEHIANLAGSPAIKKGILQTVKVVDELVKVMGRHKPENIVIEMARENQTTQKGQKNSRERMKRIEEGIKELGSQILKEHPVENTQLQNEKLYLYYLQNGRDMYVDQELDINRLSDYDVDHIVPQSFLKDDSIDNKVLTRSDKARGKSDNVPSEEVVKKMKNYWRQLLNAKLITQRKFDNLTKAERGGLSELDKAGFIKRQLVETRQITKHVAQILDSRMNTKYDENDKLIREVKVITLKSKLVSDFRKDFQFYKVREINNYHHAHDAYLNAVVGTALIKKYPKLESEFVYGDYKVYDVRKMIAKSEQEIGKATAKYFFYSNIMNFFKTEITLANGEIRKRPLIETNGETGEIVWDKGRDFATVRKVLSMPQVNIVKKTEVQTGGFSKESILPKRNSDKLIARKKDWDPKKYGGFDSPTVAYSVLVVAKVEKGKSKKLKSVKELLGITIMERSSFEKNPIDFLEAKGYKEVKKDLIIKLPKYSLFELENGRKRMLASAGELQKGNELALPSKYVNFLYLASHYEKLKGSPEDNEQKQLFVEQHKHYLDEIIEQISEFSKRVILADANLDKVLSAYNKHRDKPIREQAENIIHLFTLTNLGAPAAFKYFDTTIDRKRYTSTKEVLDATLIHQSITGLYETRIDLSQLGGDGGGGSPAPGSSGGTLNIEDEYRLHETSKEPDVPLGSTWLSDFPQAWAETGGMGLAVRQAPLIIPLKATSTPVSIKQYPMSQEARLGIKPHIQRLLDQGILVPCQSPWNTPLLPVKKPGTNDYRPVQDLREVNKRVEDIHPTVPNPYNLLSGLPPSHQWYTVLDLKDAFFCLRLHPTSQPLFAFEWRDPEMGISGQLTWTRLPQGFKNSPTLFNEALHRDLADFRIQHPDLILLQYVDDLLLAATSEQDCQRGTRALLQTLGNLGYRASAKKAQICQKQVKYLGYLLKEGQRWLTEARKETVMGQPTPKTPRQLREFLGKAGFCRLFIPGFAEMAAPLYPLTKPGTLFNWGPDQQKAYQEIKQALLTAPALGLPDLTKPFELFVDEKQGYAKGVLTQKLGPWRRPVAYLSKKLDPVAAGWPPCLRMVAAIAVLTKDAGKLTMGQPLVILAPHAVEALVKQPPDRWLSNARMTHYQAMLLDTDRVQFGPVVALNPATLLPLPEKEAPHDCLEILAETHGTRPDLTDQPIPDADYTWYTDGSSFLQEGQRRAGAAVTTETEVIWARALPAGTSAQRAELIALTQALKMAEGKKLNVYTDSRYAFATAHVHGEIYRRRGWLTSEGREIKNKNEILALLKALFLPKRLSIIHCPGHQKGNSAEARGNRMADQAAREAAMKAVLETSTLLAGKRTADGSEFEKRTADGSEFESPKKKAKVE

SEQ ID NO: 4526 - protein, 2125 aa, synthetic construct
MPAAKRVKLDGGDKKYSIGLDIGTNSVGWAVITDEYKVPSKKFKVLGNTDRHSIKKNLIGALLFDSGETAEATRLKRTARRRYTRRKNRICYLQEIFSNEMAKVDDSFFHRLEESFLVEEDKKHERHPIFGNIVDEVAYHEKYPTIYHLRKKLVDSTDKADLRLIYLALAHMIKFRGHFLIEGDLNPDNSDVDKLFIQLVQTYNQLFEENPINASGVDAKAILSARLSKSRRLENLIAQLPGEKKNGLFGNLIALSLGLTPNFKSNFDLAEDAKLQLSKDTYDDDLDNLLAQIGDQYADLFLAAKNLSDAILLSDILRVNTEITKAPLSASMIKRYDEHHQDLTLLKALVRQQLPEKYKEIFFDQSKNGYAGYIDGGASQEEFYKFIKPILEKMDGTEELLVKLNREDLLRKQRTFDNGSIPHQIHLGELHAILRRQEDFYPFLKDNREKIEKILTFRIPYYVGPLARGNSRFAWMTRKSEETITPWNFEEVVDKGASAQSFIERMTNFDKNLPNEKVLPKHSLLYEYFTVYNELTKVKYVTEGMRKPAFLSGEQKKAIVDLLFKTNRKVTVKQLKEDYFKKIECFDSVEISGVEDRFNASLGTYHDLLKIIKDKDFLDNEENEDILEDIVLTLTLFEDREMIEERLKTYAHLFDDKVMKQLKRRRYTGWGRLSRKLINGIRDKQSGKTILDFLKSDGFANRNFMQLIHDDSLTFKEDIQKAQVSGQGDSLHEHIANLAGSPAIKKGILQTVKVVDELVKVMGRHKPENIVIEMARENQTTQKGQKNSRERMKRIEEGIKELGSQILKEHPVENTQLQNEKLYLYYLQNGRDMYVDQELDINRLSDYDVDHIVPQSFLKDDSIDNKVLTRSDKARGKSDNVPSEEVVKKMKNYWRQLLNAKLITQRKFDNLTKAERGGLSELDKAGFIKRQLVETRQITKHVAQILDSRMNTKYDENDKLIREVKVITLKSKLVSDFRKDFQFYKVREINNYHHAHDAYLNAVVGTALIKKYPKLESEFVYGDYKVYDVRKMIAKSEQEIGKATAKYFFYSNIMNFFKTEITLANGEIRKRPLIETNGETGEIVWDKGRDFATVRKVLSMPQVNIVKKTEVQTGGFSKESILPKRNSDKLIARKKDWDPKKYGGFDSPTVAYSVLVVAKVEKGKSKKLKSVKELLGITIMERSSFEKNPIDFLEAKGYKEVKKDLIIKLPKYSLFELENGRKRMLASAGELQKGNELALPSKYVNFLYLASHYEKLKGSPEDNEQKQLFVEQHKHYLDEIIEQISEFSKRVILADANLDKVLSAYNKHRDKPIREQAENIIHLFTLTNLGAPAAFKYFDTTIDRKRYTSTKEVLDATLIHQSITGLYETRIDLSQLGGDGGGSSPAPGGSGGLLGRDLLTKLKAQIQFSTEGPQVTWEDRPAMCLVLNLEEEYRLHEKPVPPSIDPSWLQLFPMVWAEKAGMGLANQVPPVVVELKSDASPVAVRQYPMSKEAREGIRPHIQRFLDLGILVPCQSPWNTPLLPVKKPGTNDYRPVQDLREVNKRVQDIHPTVPNPYNLLSSLPPSHTWYSVLDLKDAFFCLKLHPNSQPLFAFEWRDPEKGNTGQLTWTRLPQGFKNSPTLFNEALHRDLASFRALNPQVVMLQYVDDLLVAAPTYRDCKEGTRRLLQELSKLGYRVSAKKAQLCREEVTYLGYLLKGGKRWLTPARKATVMKIPTPTTPRQVREFLGTAGFCRLWIPGFASLAAPLYPLTRPKVPFTWTEAHQEAFGRIKEALLSAPALALPDLTKPFALYVDEKEGVARGVLTQTLGPWRRPVAYLSKKLDPVASGWPTCLKAIAAVALLLKDADKLTLGQNVLVIAPHNLESIVRQPPDRWMTNARMTHYQSLLLNERVSFAPPAILNPATLLPVESDDTPIHICSEILAEETGTRPDLRDQPLPGVPAWYTDGSSFIMDGRRQAGAAIVDNKRTVWASNLPEGTSAQKAELIALTQALRLAEGKSINIYTDSRYAFATAHVHGAIYKQRGWLTSAGKDIKNKEEILALLEAIHLPKRVAIIHCPGHQRGTDPVATGNRKADEAAKQAAQSTRILTETTKNAGKRTADGSEFEKRTADGSEFESPKKKAKVE

SEQ ID NO: 4527 - protein, 2096 aa, synthetic construct
MPAAKRVKLDGGDKKYSIGLDIGTNSVGWAVITDEYKVPSKKFKVLGNTDRHSIKKNLIGALLFDSGETAEATRLKRTARRRYTRRKNRICYLQEIFSNEMAKVDDSFFHRLEESFLVEEDKKHERHPIFGNIVDEVAYHEKYPTIYHLRKKLVDSTDKADLRLIYLALAHMIKFRGHFLIEGDLNPDNSDVDKLFIQLVQTYNQLFEENPINASGVDAKAILSARLSKSRRLENLIAQLPGEKKNGLFGNLIALSLGLTPNFKSNFDLAEDAKLQLSKDTYDDDLDNLLAQIGDQYADLFLAAKNLSDAILLSDILRVNTEITKAPLSASMIKRYDEHHQDLTLLKALVRQQLPEKYKEIFFDQSKNGYAGYIDGGASQEEFYKFIKPILEKMDGTEELLVKLNREDLLRKQRTFDNGSIPHQIHLGELHAILRRQEDFYPFLKDNREKIEKILTFRIPYYVGPLARGNSRFAWMTRKSEETITPWNFEEVVDKGASAQSFIERMTNFDKNLPNEKVLPKHSLLYEYFTVYNELTKVKYVTEGMRKPAFLSGEQKKAIVDLLFKTNRKVTVKQLKEDYFKKIECFDSVEISGVEDRFNASLGTYHDLLKIIKDKDFLDNEENEDILEDIVLTLTLFEDREMIEERLKTYAHLFDDKVMKQLKRRRYTGWGRLSRKLINGIRDKQSGKTILDFLKSDGFANRNFMQLIHDDSLTFKEDIQKAQVSGQGDSLHEHIANLAGSPAIKKGILQTVKVVDELVKVMGRHKPENIVIEMARENQTTQKGQKNSRERMKRIEEGIKELGSQILKEHPVENTQLQNEKLYLYYLQNGRDMYVDQELDINRLSDYDVDHIVPQSFLKDDSIDNKVLTRSDKARGKSDNVPSEEVVKKMKNYWRQLLNAKLITQRKFDNLTKAERGGLSELDKAGFIKRQLVETRQITKHVAQILDSRMNTKYDENDKLIREVKVITLKSKLVSDFRKDFQFYKVREINNYHHAHDAYLNAVVGTALIKKYPKLESEFVYGDYKVYDVRKMIAKSEQEIGKATAKYFFYSNIMNFFKTEITLANGEIRKRPLIETNGETGEIVWDKGRDFATVRKVLSMPQVNIVKKTEVQTGGFSKESILPKRNSDKLIARKKDWDPKKYGGFDSPTVAYSVLVVAKVEKGKSKKLKSVKELLGITIMERSSFEKNPIDFLEAKGYKEVKKDLIIKLPKYSLFELENGRKRMLASAGELQKGNELALPSKYVNFLYLASHYEKLKGSPEDNEQKQLFVEQHKHYLDEIIEQISEFSKRVILADANLDKVLSAYNKHRDKPIREQAENIIHLFTLTNLGAPAAFKYFDTTIDRKRYTSTKEVLDATLIHQSITGLYETRIDLSQLGGDGGEAAAKPAPGGSGGTLNIEDEYRLHETSKEPDVPLGSTWLSDFPQAWAETGGMGLAVRQAPLIIPLKATSTPVSIKQYPMSQEARLGIKPHIQRLLDQGILVPCQSPWNTPLLPVKKPGTNDYRPVQDLREVNKRVEDIHPTVPNPYNLLSGLPPSHQWYTVLDLKDAFFCLRLHPTSQPLFAFEWRDPEMGISGQLTWTRLPQGFKNSPTLFNEALHRDLADFRIQHPDLILLQYVDDLLLAATSEQDCQRGTRALLQTLGNLGYRASAKKAQICQKQVKYLGYLLKEGQRWLTEARKETVMGQPTPKTPRQLREFLGKAGFCRLFIPGFAEMAAPLYPLTKPGTLFNWGPDQQKAYQEIKQALLTAPALGLPDLTKPFELFVDEKQGYAKGVLTQKLGPWRRPVAYLSKKLDPVAAGWPPCLRMVAAIAVLTKDAGKLTMGQPLVILAPHAVEALVKQPPDRWLSNARMTHYQAMLLDTDRVQFGPVVALNPATLLPLPEKEAPHDCLEILAETHGTRPDLTDQPIPDADYTWYTDGSSFLQEGQRRAGAAVTTETEVIWARALPAGTSAQRAELIALTQALKMAEGKKLNVYTDSRYAFATAHVHGEIYRRRGWLTSEGREIKNKNEILALLKALFLPKRLSIIHCPGHQKGNSAEARGNRMADQAAREAAMKAVLETSTLLAGKRTADGSEFEKRTADGSEFESPKKKAKVE

SEQ ID NO: 4528 - protein, 2096 aa, synthetic construct
MPAAKRVKLDGGDKKYSIGLDIGTNSVGWAVITDEYKVPSKKFKVLGNTDRHSIKKNLIGALLFDSGETAEATRLKRTARRRYTRRKNRICYLQEIFSNEMAKVDDSFFHRLEESFLVEEDKKHERHPIFGNIVDEVAYHEKYPTIYHLRKKLVDSTDKADLRLIYLALAHMIKFRGHFLIEGDLNPDNSDVDKLFIQLVQTYNQLFEENPINASGVDAKAILSARLSKSRRLENLIAQLPGEKKNGLFGNLIALSLGLTPNFKSNFDLAEDAKLQLSKDTYDDDLDNLLAQIGDQYADLFLAAKNLSDAILLSDILRVNTEITKAPLSASMIKRYDEHHQDLTLLKALVRQQLPEKYKEIFFDQSKNGYAGYIDGGASQEEFYKFIKPILEKMDGTEELLVKLNREDLLRKQRTFDNGSIPHQIHLGELHAILRRQEDFYPFLKDNREKIEKILTFRIPYYVGPLARGNSRFAWMTRKSEETITPWNFEEVVDKGASAQSFIERMTNFDKNLPNEKVLPKHSLLYEYFTVYNELTKVKYVTEGMRKPAFLSGEQKKAIVDLLFKTNRKVTVKQLKEDYFKKIECFDSVEISGVEDRFNASLGTYHDLLKIIKDKDFLDNEENEDILEDIVLTLTLFEDREMIEERLKTYAHLFDDKVMKQLKRRRYTGWGRLSRKLINGIRDKQSGKTILDFLKSDGFANRNFMQLIHDDSLTFKEDIQKAQVSGQGDSLHEHIANLAGSPAIKKGILQTVKVVDELVKVMGRHKPENIVIEMARENQTTQKGQKNSRERMKRIEEGIKELGSQILKEHPVENTQLQNEKLYLYYLQNGRDMYVDQELDINRLSDYDVDHIVPQSFLKDDSIDNKVLTRSDKARGKSDNVPSEEVVKKMKNYWRQLLNAKLITQRKFDNLTKAERGGLSELDKAGFIKRQLVETRQITKHVAQILDSRMNTKYDENDKLIREVKVITLKSKLVSDFRKDFQFYKVREINNYHHAHDAYLNAVVGTALIKKYPKLESEFVYGDYKVYDVRKMIAKSEQEIGKATAKYFFYSNIMNFFKTEITLANGEIRKRPLIETNGETGEIVWDKGRDFATVRKVLSMPQVNIVKKTEVQTGGFSKESILPKRNSDKLIARKKDWDPKKYGGFDSPTVAYSVLVVAKVEKGKSKKLKSVKELLGITIMERSSFEKNPIDFLEAKGYKEVKKDLIIKLPKYSLFELENGRKRMLASAGELQKGNELALPSKYVNFLYLASHYEKLKGSPEDNEQKQLFVEQHKHYLDEIIEQISEFSKRVILADANLDKVLSAYNKHRDKPIREQAENIIHLFTLTNLGAPAAFKYFDTTIDRKRYTSTKEVLDATLIHQSITGLYETRIDLSQLGGDGGPAPEAAAKGGSGGTLNLEDEYRLYETSAEPEVSPGSTWLSDFPQAWAETGGMGLAVRQAPLIIPLKATSTPVSIKQYPMSQEAKLGIKPHIQRLLDQGILVPCQSPWNTPLLPVKKPGTNDYRPVQDLREVNKRVEDIHPTVPNPYNLLSGLPPSHRWYTVLDLKDAFFCLRLHPTSQPLFAFEWRDPGMGISGQLTWTRLPQGFKNSPTLFNEALHRDLADFRIQHPDLILLQYVDDILLAATSELDCQQGTRALLLTLGNLGYRASAKKAQLCQKQVKYLGYLLKEGQRWLTEARKETVMGQPTPKTPRQLREFLGKAGFCRLFIPGFAEMAAPLYPLTKPGTLFNWGPDQQKAYQEIKQALLTAPALGLPDLTKPFELFVDEKQGYAKGVLTQKLGPWRRPVAYLSKKLDPVAAGWPPCLRMVAAIAVLRKDAGKLTMGQPLVILAPHAVEALVKQPPDRWLSNARMTHYQAMLLDTDRVQFGPVVALNPATLLPLPEEGAPHDCLEILAETHGTRPDLTDQPIPDADHTWYTDGSSFLQEGQRKAGAAVTTETEVIWARALPAGTSAQRAELIALTQALKMAEGKRLNVYTDSRYAFATAHIHGEIYRRRGWLTSEGREIKNKSEILALLKALFLPKRLSIIHCLGHQKGDSAEARGNRLADQAAREAAIKTPPDTSTLLAGKRTADGSEFEKRTADGSEFESPKKKAKVE

SEQ ID NO: 4529 - protein, 2088 aa, synthetic construct
MPAAKRVKLDGGDKKYSIGLDIGTNSVGWAVITDEYKVPSKKFKVLGNTDRHSIKKNLIGALLFDSGETAEATRLKRTARRRYTRRKNRICYLQEIFSNEMAKVDDSFFHRLEESFLVEEDKKHERHPIFGNIVDEVAYHEKYPTIYHLRKKLVDSTDKADLRLIYLALAHMIKFRGHFLIEGDLNPDNSDVDKLFIQLVQTYNQLFEENPINASGVDAKAILSARLSKSRRLENLIAQLPGEKKNGLFGNLIALSLGLTPNFKSNFDLAEDAKLQLSKDTYDDDLDNLLAQIGDQYADLFLAAKNLSDAILLSDILRVNTEITKAPLSASMIKRYDEHHQDLTLLKALVRQQLPEKYKEIFFDQSKNGYAGYIDGGASQEEFYKFIKPILEKMDGTEELLVKLNREDLLRKQRTFDNGSIPHQIHLGELHAILRRQEDFYPFLKDNREKIEKILTFRIPYYVGPLARGNSRFAWMTRKSEETITPWNFEEVVDKGASAQSFIERMTNFDKNLPNEKVLPKHSLLYEYFTVYNELTKVKYVTEGMRKPAFLSGEQKKAIVDLLFKTNRKVTVKQLKEDYFKKIECFDSVEISGVEDRFNASLGTYHDLLKIIKDKDFLDNEENEDILEDIVLTLTLFEDREMIEERLKTYAHLFDDKVMKQLKRRRYTGWGRLSRKLINGIRDKQSGKTILDFLKSDGFANRNFMQLIHDDSLTFKEDIQKAQVSGQGDSLHEHIANLAGSPAIKKGILQTVKVVDELVKVMGRHKPENIVIEMARENQTTQKGQKNSRERMKRIEEGIKELGSQILKEHPVENTQLQNEKLYLYYLQNGRDMYVDQELDINRLSDYDVDHIVPQSFLKDDSIDNKVLTRSDKARGKSDNVPSEEVVKKMKNYWRQLLNAKLITQRKFDNLTKAERGGLSELDKAGFIKRQLVETRQITKHVAQILDSRMNTKYDENDKLIREVKVITLKSKLVSDFRKDFQFYKVREINNYHHAHDAYLNAVVGTALIKKYPKLESEFVYGDYKVYDVRKMIAKSEQEIGKATAKYFFYSNIMNFFKTEITLANGEIRKRPLIETNGETGEIVWDKGRDFATVRKVLSMPQVNIVKKTEVQTGGFSKESILPKRNSDKLIARKKDWDPKKYGGFDSPTVAYSVLVVAKVEKGKSKKLKSVKELLGITIMERSSFEKNPIDFLEAKGYKEVKKDLIIKLPKYSLFELENGRKRMLASAGELQKGNELALPSKYVNFLYLASHYEKLKGSPEDNEQKQLFVEQHKHYLDEIIEQISEFSKRVILADANLDKVLSAYNKHRDKPIREQAENIIHLFTLTNLGAPAAFKYFDTTIDRKRYTSTKEVLDATLIHQSITGLYETRIDLSQLGGDGGPAPEAAAKGGSGGLDDEYRLYSPLVKPDQNIQFWLEQFPQAWAETAGMGLAKQVPPQVIQLKASATPVSVRQYPLSKEAQEGIRPHVQRLIQQGILVPVQSPWNTPLLPVRKPGTNDYRPVQDLREVNKRVQDIHPTVPNPYNLLCALPPQRSWYTVLDLKDAFFCLRLHPTSQPLFAFEWRDPGTGRTGQLTWTRLPQGFKNSPTIFNEALHRDLANFRIQHPQVTLLQYVDDLLLAGATKQDCLEGTKALLLELSDLGYRASAKKAQICRREVTYLGYSLRDGQRWLTEARKKTVVQIPAPTTAKQVREFLGKAGFCRLFIPGFATLAAPLYPLTKPKGEFSWAPEHQKAFDAIKKALLSAPALALPDVTKPFTLYVDERKGVARGVLTQTLGPWRRPVAYLSKKLDPVASGWPVCLKAIAAVAILVKDADKLTLGQNITVIAPHALENIVRQPPDRWMTNARMTHYQSLLLTERVTFAPPAALNPATLLPEETDEPVTHDCHQLLIEETGVRKDLTDIPLTGEVLTWFTDGSSYVVEGKRMAGAAVVDGTRTIWASSLPEGTSAQKAELMALTQALRLAEGKSINIYTDSRYAFATAHVHGAIYKQRGWLTSAGREIKNKEEILSLLEALHLPKRLAIIHCPGHQKAKDPISRGNQMADRVAKQAAQGVNLLPAGKRTADGSEFEKRTADGSEFESPKKKAKVE

SEQ ID NO: 4530 - protein, 2096 aa, synthetic construct
MPAAKRVKLDGGDKKYSIGLDIGTNSVGWAVITDEYKVPSKKFKVLGNTDRHSIKKNLIGALLFDSGETAEATRLKRTARRRYTRRKNRICYLQEIFSNEMAKVDDSFFHRLEESFLVEEDKKHERHPIFGNIVDEVAYHEKYPTIYHLRKKLVDSTDKADLRLIYLALAHMIKFRGHFLIEGDLNPDNSDVDKLFIQLVQTYNQLFEENPINASGVDAKAILSARLSKSRRLENLIAQLPGEKKNGLFGNLIALSLGLTPNFKSNFDLAEDAKLQLSKDTYDDDLDNLLAQIGDQYADLFLAAKNLSDAILLSDILRVNTEITKAPLSASMIKRYDEHHQDLTLLKALVRQQLPEKYKEIFFDQSKNGYAGYIDGGASQEEFYKFIKPILEKMDGTEELLVKLNREDLLRKQRTFDNGSIPHQIHLGELHAILRRQEDFYPFLKDNREKIEKILTFRIPYYVGPLARGNSRFAWMTRKSEETITPWNFEEVVDKGASAQSFIERMTNFDKNLPNEKVLPKHSLLYEYFTVYNELTKVKYVTEGMRKPAFLSGEQKKAIVDLLFKTNRKVTVKQLKEDYFKKIECFDSVEISGVEDRFNASLGTYHDLLKIIKDKDFLDNEENEDILEDIVLTLTLFEDREMIEERLKTYAHLFDDKVMKQLKRRRYTGWGRLSRKLINGIRDKQSGKTILDFLKSDGFANRNFMQLIHDDSLTFKEDIQKAQVSGQGDSLHEHIANLAGSPAIKKGILQTVKVVDELVKVMGRHKPENIVIEMARENQTTQKGQKNSRERMKRIEEGIKELGSQILKEHPVENTQLQNEKLYLYYLQNGRDMYVDQELDINRLSDYDVDHIVPQSFLKDDSIDNKVLTRSDKARGKSDNVPSEEVVKKMKNYWRQLLNAKLITQRKFDNLTKAERGGLSELDKAGFIKRQLVETRQITKHVAQILDSRMNTKYDENDKLIREVKVITLKSKLVSDFRKDFQFYKVREINNYHHAHDAYLNAVVGTALIKKYPKLESEFVYGDYKVYDVRKMIAKSEQEIGKATAKYFFYSNIMNFFKTEITLANGEIRKRPLIETNGETGEIVWDKGRDFATVRKVLSMPQVNIVKKTEVQTGGFSKESILPKRNSDKLIARKKDWDPKKYGGFDSPTVAYSVLVVAKVEKGKSKKLKSVKELLGITIMERSSFEKNPIDFLEAKGYKEVKKDLIIKLPKYSLFELENGRKRMLASAGELQKGNELALPSKYVNFLYLASHYEKLKGSPEDNEQKQLFVEQHKHYLDEIIEQISEFSKRVILADANLDKVLSAYNKHRDKPIREQAENIIHLFTLTNLGAPAAFKYFDTTIDRKRYTSTKEVLDATLIHQSITGLYETRIDLSQLGGDGGGGGEAAAKGSSGGTLNIEDEHRLHETSKEPDVSLGSTWLSDFPQAWAETGGMGLAVRQAPLIIPLKATSTPVSIKQYPMSQEARLGIKPHIQRLLDQGILVPCQSPWNTPLLPVKKPGTNDYRPVQDLREVNKRVEDIHPTVPNPYNLLSGLPPSHQWYTVLDLKDAFFCLRLHPTSQPLFAFEWRDPEMGISGQLTWTRLPQGFKNSPTLFNEALHRDLADFRIQHPDLILLQYVDDLLLAATSELDCQQGTRALLQTLGNLGYRASAKKAQICQKQVKYLGYLLKEGQRWLTEARKETVMGQPTPKTPRQLREFLGTAGFCRLWIPGFAEMAAPLYPLTKPGTLFNWGPDQQKAYQEIKQALLTAPALGLPDLTKPFELFVDEKQGYAKGVLTQKLGPWRRPVAYLSKKLDPVAAGWPPCLRMVAAIAVLTKDAGKLTMGQPLVILAPHAVEALVKQPPDRWLSNARMTHYQALLLDTDRVQFGPVVALNPATLLPLPEEGLQHNCLDILAEAHGTRPDLTDQPLPDADHTWYTDGSSLLQEGQRKAGAAVTTETEVIWAKALPAGTSAQRAELIALTQALKMAEGKKLNVYTDSRYAFATAHIHGEIYRRRGWLTSEGKEIKNKDEILALLKALFLPKRLSIIHCPGHQKGHSAEARGNRMADQAARKAAITETPDTSTLLAGKRTADGSEFEKRTADGSEFESPKKKAKVE

SEQ ID NO: 4531 - protein, 2094 aa, synthetic construct
MPAAKRVKLDGGDKKYSIGLDIGTNSVGWAVITDEYKVPSKKFKVLGNTDRHSIKKNLIGALLFDSGETAEATRLKRTARRRYTRRKNRICYLQEIFSNEMAKVDDSFFHRLEESFLVEEDKKHERHPIFGNIVDEVAYHEKYPTIYHLRKKLVDSTDKADLRLIYLALAHMIKFRGHFLIEGDLNPDNSDVDKLFIQLVQTYNQLFEENPINASGVDAKAILSARLSKSRRLENLIAQLPGEKKNGLFGNLIALSLGLTPNFKSNFDLAEDAKLQLSKDTYDDDLDNLLAQIGDQYADLFLAAKNLSDAILLSDILRVNTEITKAPLSASMIKRYDEHHQDLTLLKALVRQQLPEKYKEIFFDQSKNGYAGYIDGGASQEEFYKFIKPILEKMDGTEELLVKLNREDLLRKQRTFDNGSIPHQIHLGELHAILRRQEDFYPFLKDNREKIEKILTFRIPYYVGPLARGNSRFAWMTRKSEETITPWNFEEVVDKGASAQSFIERMTNFDKNLPNEKVLPKHSLLYEYFTVYNELTKVKYVTEGMRKPAFLSGEQKKAIVDLLFKTNRKVTVKQLKEDYFKKIECFDSVEISGVEDRFNASLGTYHDLLKIIKDKDFLDNEENEDILEDIVLTLTLFEDREMIEERLKTYAHLFDDKVMKQLKRRRYTGWGRLSRKLINGIRDKQSGKTILDFLKSDGFANRNFMQLIHDDSLTFKEDIQKAQVSGQGDSLHEHIANLAGSPAIKKGILQTVKVVDELVKVMGRHKPENIVIEMARENQTTQKGQKNSRERMKRIEEGIKELGSQILKEHPVENTQLQNEKLYLYYLQNGRDMYVDQELDINRLSDYDVDHIVPQSFLKDDSIDNKVLTRSDKARGKSDNVPSEEVVKKMKNYWRQLLNAKLITQRKFDNLTKAERGGLSELDKAGFIKRQLVETRQITKHVAQILDSRMNTKYDENDKLIREVKVITLKSKLVSDFRKDFQFYKVREINNYHHAHDAYLNAVVGTALIKKYPKLESEFVYGDYKVYDVRKMIAKSEQEIGKATAKYFFYSNIMNFFKTEITLANGEIRKRPLIETNGETGEIVWDKGRDFATVRKVLSMPQVNIVKKTEVQTGGFSKESILPKRNSDKLIARKKDWDPKKYGGFDSPTVAYSVLVVAKVEKGKSKKLKSVKELLGITIMERSSFEKNPIDFLEAKGYKEVKKDLIIKLPKYSLFELENGRKRMLASAGELQKGNELALPSKYVNFLYLASHYEKLKGSPEDNEQKQLFVEQHKHYLDEIIEQISEFSKRVILADANLDKVLSAYNKHRDKPIREQAENIIHLFTLTNLGAPAAFKYFDTTIDRKRYTSTKEVLDATLIHQSITGLYETRIDLSQLGGDGGEAAAKGGGGSSGGVLNLEEEYRLHEKPVPSSIDPSWLQLFPTVWAERAGMGLANQVPPVVVELRSGASPVAVRQYPMSKEAREGIRPHIQRFLDLGVLVPCQSPWNTPLLPVKKPGTNDYRPVQDLREINKRVQDIHPTVPNPYNLLSSLPPSHTWYSVLDLKDAFFCLKLHPNSQPLFAFEWRDPEKGNTGQLTWTRLPQGFKNSPTLFNEALHRDLAPFRALNPQVVLLQYVDDLLVAAPTYRDCKEGTQKLLQELSKLGYRVSAKKAQLCQKEVTYLGYLLKEGKRWLTPARKATVMKIPPPTTPRQVREFLGKAGFCRLFIPGFASLAAPLYPLTKPSIPFIWTEEHQKAFDRIKEALLSAPALALPDLTKPFTLYVDERAGVARGVLTQTLGPWRRPVAYLSKKLDPVASGWPTCLKAVAAVALLLKDADKLTLGQNVTVIASHSLESIVRQPPDRWMTNARMTHYQSLLLNERVSFAPPAVLNPATLLPVESEATPVHRCSEILAEETGTRRDLKDQPLPGVPAWYTDGSSFIAEGKRRAGAAIVDGKRTVWASSLPEGTSAQKAELVALTQALRLAEGKDINIYTDSRYAFATAHIHGAIYKQRGWLTSAGKDIKNKEEILALLEAIHLPKRVAIIHCPGHQKGNDPVATGNRRADEAAKQAALSTRVLAETTKPAGKRTADGSEFEKRTADGSEFESPKKKAKVE

SEQ ID NO: 4532 - protein, 2088 aa, synthetic construct
MPAAKRVKLDGGDKKYSIGLDIGTNSVGWAVITDEYKVPSKKFKVLGNTDRHSIKKNLIGALLFDSGETAEATRLKRTARRRYTRRKNRICYLQEIFSNEMAKVDDSFFHRLEESFLVEEDKKHERHPIFGNIVDEVAYHEKYPTIYHLRKKLVDSTDKADLRLIYLALAHMIKFRGHFLIEGDLNPDNSDVDKLFIQLVQTYNQLFEENPINASGVDAKAILSARLSKSRRLENLIAQLPGEKKNGLFGNLIALSLGLTPNFKSNFDLAEDAKLQLSKDTYDDDLDNLLAQIGDQYADLFLAAKNLSDAILLSDILRVNTEITKAPLSASMIKRYDEHHQDLTLLKALVRQQLPEKYKEIFFDQSKNGYAGYIDGGASQEEFYKFIKPILEKMDGTEELLVKLNREDLLRKQRTFDNGSIPHQIHLGELHAILRRQEDFYPFLKDNREKIEKILTFRIPYYVGPLARGNSRFAWMTRKSEETITPWNFEEVVDKGASAQSFIERMTNFDKNLPNEKVLPKHSLLYEYFTVYNELTKVKYVTEGMRKPAFLSGEQKKAIVDLLFKTNRKVTVKQLKEDYFKKIECFDSVEISGVEDRFNASLGTYHDLLKIIKDKDFLDNEENEDILEDIVLTLTLFEDREMIEERLKTYAHLFDDKVMKQLKRRRYTGWGRLSRKLINGIRDKQSGKTILDFLKSDGFANRNFMQLIHDDSLTFKEDIQKAQVSGQGDSLHEHIANLAGSPAIKKGILQTVKVVDELVKVMGRHKPENIVIEMARENQTTQKGQKNSRERMKRIEEGIKELGSQILKEHPVENTQLQNEKLYLYYLQNGRDMYVDQELDINRLSDYDVDHIVPQSFLKDDSIDNKVLTRSDKARGKSDNVPSEEVVKKMKNYWRQLLNAKLITQRKFDNLTKAERGGLSELDKAGFIKRQLVETRQITKHVAQILDSRMNTKYDENDKLIREVKVITLKSKLVSDFRKDFQFYKVREINNYHHAHDAYLNAVVGTALIKKYPKLESEFVYGDYKVYDVRKMIAKSEQEIGKATAKYFFYSNIMNFFKTEITLANGEIRKRPLIETNGETGEIVWDKGRDFATVRKVLSMPQVNIVKKTEVQTGGFSKESILPKRNSDKLIARKKDWDPKKYGGFDSPTVAYSVLVVAKVEKGKSKKLKSVKELLGITIMERSSFEKNPIDFLEAKGYKEVKKDLIIKLPKYSLFELENGRKRMLASAGELQKGNELALPSKYVNFLYLASHYEKLKGSPEDNEQKQLFVEQHKHYLDEIIEQISEFSKRVILADANLDKVLSAYNKHRDKPIREQAENIIHLFTLTNLGAPAAFKYFDTTIDRKRYTSTKEVLDATLIHQSITGLYETRIDLSQLGGDGGGSSGGGPAPGGTLQLDDEYRLYSPLVKPDQNIQFWLEQFPQAWAETAGMGLAKQVPPQVIQLKASATPVSVRQYPLSKEAQEGIRPHVQRLIQQGILVPVQSPWNTPLLPVRKPGTNDYRPVQDLREVNKRVQDIHPTVPNPYNLLCALPPQRSWYTVLDLKDAFFCLRLHPTSQPLFAFEWRDPGTGRTGQLTWTRLPQGFKNSPTIFNEALHRDLANFRIQHPQVTLLQYVDDLLLAGATKQDCLEGTKALLLELSDLGYRASAKKAQICRREVTYLGYSLRDGQRWLTEARKKTVVQIPAPTTAKQVREFLGTAGFCRLWIPGFATLAAPLYPLTKPKGEFSWAPEHQKAFDAIKKALLSAPALALPDVTKPFTLYVDERKGVARGVLTQTLGPWRRPVAYLSKKLDPVASGWPVCLKAIAAVAILVKDADKLTLGQNITVIAPHALENIVRQPPDRWMTNARMTHYQSLLLTERVTFAPPAALNPATLLPEETDEPVTHDCHQLLIEETGVRKDLTDIPLTGEVLTWFTDGSSYVVEGKRMAGAAVVDGTRTIWASSLPEGTSAQKAELMALTQALRLAEGKSINIYTDSRYAFATAHVHGAIYKQRGWLTSAGREIKNKEEILSLLEALHLPKRLAIIHCPGHQKAKDPISRGNQMADRVAKQAAQGVNLLAGKRTADGSEFEKRTADGSEFESPKKKAKVE

SEQ ID NO: 4533 - protein, 2094 aa, synthetic construct
MPAAKRVKLDGGDKKYSIGLDIGTNSVGWAVITDEYKVPSKKFKVLGNTDRHSIKKNLIGALLFDSGETAEATRLKRTARRRYTRRKNRICYLQEIFSNEMAKVDDSFFHRLEESFLVEEDKKHERHPIFGNIVDEVAYHEKYPTIYHLRKKLVDSTDKADLRLIYLALAHMIKFRGHFLIEGDLNPDNSDVDKLFIQLVQTYNQLFEENPINASGVDAKAILSARLSKSRRLENLIAQLPGEKKNGLFGNLIALSLGLTPNFKSNFDLAEDAKLQLSKDTYDDDLDNLLAQIGDQYADLFLAAKNLSDAILLSDILRVNTEITKAPLSASMIKRYDEHHQDLTLLKALVRQQLPEKYKEIFFDQSKNGYAGYIDGGASQEEFYKFIKPILEKMDGTEELLVKLNREDLLRKQRTFDNGSIPHQIHLGELHAILRRQEDFYPFLKDNREKIEKILTFRIPYYVGPLARGNSRFAWMTRKSEETITPWNFEEVVDKGASAQSFIERMTNFDKNLPNEKVLPKHSLLYEYFTVYNELTKVKYVTEGMRKPAFLSGEQKKAIVDLLFKTNRKVTVKQLKEDYFKKIECFDSVEISGVEDRFNASLGTYHDLLKIIKDKDFLDNEENEDILEDIVLTLTLFEDREMIEERLKTYAHLFDDKVMKQLKRRRYTGWGRLSRKLINGIRDKQSGKTILDFLKSDGFANRNFMQLIHDDSLTFKEDIQKAQVSGQGDSLHEHIANLAGSPAIKKGILQTVKVVDELVKVMGRHKPENIVIEMARENQTTQKGQKNSRERMKRIEEGIKELGSQILKEHPVENTQLQNEKLYLYYLQNGRDMYVDQELDINRLSDYDVDHIVPQSFLKDDSIDNKVLTRSDKARGKSDNVPSEEVVKKMKNYWRQLLNAKLITQRKFDNLTKAERGGLSELDKAGFIKRQLVETRQITKHVAQILDSRMNTKYDENDKLIREVKVITLKSKLVSDFRKDFQFYKVREINNYHHAHDAYLNAVVGTALIKKYPKLESEFVYGDYKVYDVRKMIAKSEQEIGKATAKYFFYSNIMNFFKTEITLANGEIRKRPLIETNGETGEIVWDKGRDFATVRKVLSMPQVNIVKKTEVQTGGFSKESILPKRNSDKLIARKKDWDPKKYGGFDSPTVAYSVLVVAKVEKGKSKKLKSVKELLGITIMERSSFEKNPIDFLEAKGYKEVKKDLIIKLPKYSLFELENGRKRMLASAGELQKGNELALPSKYVNFLYLASHYEKLKGSPEDNEQKQLFVEQHKHYLDEIIEQISEFSKRVILADANLDKVLSAYNKHRDKPIREQAENIIHLFTLTNLGAPAAFKYFDTTIDRKRYTSTKEVLDATLIHQSITGLYETRIDLSQLGGDGGPAPGSSGGGGGTLNLEDEYRLYETSAEPEVSPGSTWLSDFPQAWAETGGMGLAVRQAPLIIPLKATSTPVSIKQYPMSQEAKLGIKPHIQRLLDQGILVPCQSPWNTPLLPVKKPGTNDYRPVQDLREVNKRVEDIHPTVPNPYNLLSGLPPSHRWYTVLDLKDAFFCLRLHPTSQPLFAFEWRDPGMGISGQLTWTRLPQGFKNSPTLFNEALHRDLADFRIQHPDLILLQYVDDILLAATSELDCQQGTRALLLTLGNLGYRASAKKAQLCQKQVKYLGYLLKEGQRWLTEARKETVMGQPTPKTPRQLREFLGKAGFCRLFIPGFAEMAAPLYPLTKPGTLFNWGPDQQKAYQEIKQALLTAPALGLPDLTKPFELFVDEKQGYAKGVLTQKLGPWRRPVAYLSKKLDPVAAGWPPCLRMVAAIAVLRKDAGKLTMGQPLVILAPHAVEALVKQPPDRWLSNARMTHYQAMLLDTDRVQFGPVVALNPATLLPLPEEGAPHDCLEILAETHGTRPDLTDQPIPDADHTWYTDGSSFLQEGQRKAGAAVTTETEVIWARALPAGTSAQRAELIALTQALKMAEGKRLNVYTDSRYAFATAHIHGEIYRRRGWLTSEGREIKNKSEILALLKALFLPKRLSIIHCLGHQKGDSAEARGNRLADQAAREAAIKTPPDTSTLLAGKRTADGSEFEKRTADGSEFESPKKKAKVE

SEQ ID NO: 4534 - protein, 2096 aa, synthetic construct
MPAAKRVKLDGGDKKYSIGLDIGTNSVGWAVITDEYKVPSKKFKVLGNTDRHSIKKNLIGALLFDSGETAEATRLKRTARRRYTRRKNRICYLQEIFSNEMAKVDDSFFHRLEESFLVEEDKKHERHPIFGNIVDEVAYHEKYPTIYHLRKKLVDSTDKADLRLIYLALAHMIKFRGHFLIEGDLNPDNSDVDKLFIQLVQTYNQLFEENPINASGVDAKAILSARLSKSRRLENLIAQLPGEKKNGLFGNLIALSLGLTPNFKSNFDLAEDAKLQLSKDTYDDDLDNLLAQIGDQYADLFLAAKNLSDAILLSDILRVNTEITKAPLSASMIKRYDEHHQDLTLLKALVRQQLPEKYKEIFFDQSKNGYAGYIDGGASQEEFYKFIKPILEKMDGTEELLVKLNREDLLRKQRTFDNGSIPHQIHLGELHAILRRQEDFYPFLKDNREKIEKILTFRIPYYVGPLARGNSRFAWMTRKSEETITPWNFEEVVDKGASAQSFIERMTNFDKNLPNEKVLPKHSLLYEYFTVYNELTKVKYVTEGMRKPAFLSGEQKKAIVDLLFKTNRKVTVKQLKEDYFKKIECFDSVEISGVEDRFNASLGTYHDLLKIIKDKDFLDNEENEDILEDIVLTLTLFEDREMIEERLKTYAHLFDDKVMKQLKRRRYTGWGRLSRKLINGIRDKQSGKTILDFLKSDGFANRNFMQLIHDDSLTFKEDIQKAQVSGQGDSLHEHIANLAGSPAIKKGILQTVKVVDELVKVMGRHKPENIVIEMARENQTTQKGQKNSRERMKRIEEGIKELGSQILKEHPVENTQLQNEKLYLYYLQNGRDMYVDQELDINRLSDYDVDHIVPQSFLKDDSIDNKVLTRSDKARGKSDNVPSEEVVKKMKNYWRQLLNAKLITQRKFDNLTKAERGGLSELDKAGFIKRQLVETRQITKHVAQILDSRMNTKYDENDKLIREVKVITLKSKLVSDFRKDFQFYKVREINNYHHAHDAYLNAVVGTALIKKYPKLESEFVYGDYKVYDVRKMIAKSEQEIGKATAKYFFYSNIMNFFKTEITLANGEIRKRPLIETNGETGEIVWDKGRDFATVRKVLSMPQVNIVKKTEVQTGGFSKESILPKRNSDKLIARKKDWDPKKYGGFDSPTVAYSVLVVAKVEKGKSKKLKSVKELLGITIMERSSFEKNPIDFLEAKGYKEVKKDLIIKLPKYSLFELENGRKRMLASAGELQKGNELALPSKYVNFLYLASHYEKLKGSPEDNEQKQLFVEQHKHYLDEIIEQISEFSKRVILADANLDKVLSAYNKHRDKPIREQAENIIHLFTLTNLGAPAAFKYFDTTIDRKRYTSTKEVLDATLIHQSITGLYETRIDLSQLGGDGGGGGPAPEAAAKGGTLNIEDEHRLHETSKEPDVSLGSTWLSDFPQAWAETGGMGLAVRQAPLIIPLKATSTPVSIKQYPMSQEARLGIKPHIQRLLDQGILVPCQSPWNTPLLPVKKPGTNDYRPVQDLREVNKRVEDIHPTVPNPYNLLSGLPPSHQWYTVLDLKDAFFCLRLHPTSQPLFAFEWRDPEMGISGQLTWTRLPQGFKNSPTLFNEALHRDLADFRIQHPDLILLQYVDDLLLAATSELDCQQGTRALLQTLGNLGYRASAKKAQICQKQVKYLGYLLKEGQRWLTEARKETVMGQPTPKTPRQLREFLGTAGFCRLWIPGFAEMAAPLYPLTKPGTLFNWGPDQQKAYQEIKQALLTAPALGLPDLTKPFELFVDEKQGYAKGVLTQKLGPWRRPVAYLSKKLDPVAAGWPPCLRMVAAIAVLTKDAGKLTMGQPLVILAPHAVEALVKQPPDRWLSNARMTHYQALLLDTDRVQFGPVVALNPATLLPLPEEGLQHNCLDILAEAHGTRPDLTDQPLPDADHTWYTDGSSLLQEGQRKAGAAVTTETEVIWAKALPAGTSAQRAELIALTQALKMAEGKKLNVYTDSRYAFATAHIHGEIYRRRGWLTSEGKEIKNKDEILALLKALFLPKRLSIIHCPGHQKGHSAEARGNRMADQAARKAAITETPDTSTLLAGKRTADGSEFEKRTADGSEFESPKKKAKVE

SEQ ID NO: 4535 - protein, 2096 aa, synthetic construct
MPAAKRVKLDGGDKKYSIGLDIGTNSVGWAVITDEYKVPSKKFKVLGNTDRHSIKKNLIGALLFDSGETAEATRLKRTARRRYTRRKNRICYLQEIFSNEMAKVDDSFFHRLEESFLVEEDKKHERHPIFGNIVDEVAYHEKYPTIYHLRKKLVDSTDKADLRLIYLALAHMIKFRGHFLIEGDLNPDNSDVDKLFIQLVQTYNQLFEENPINASGVDAKAILSARLSKSRRLENLIAQLPGEKKNGLFGNLIALSLGLTPNFKSNFDLAEDAKLQLSKDTYDDDLDNLLAQIGDQYADLFLAAKNLSDAILLSDILRVNTEITKAPLSASMIKRYDEHHQDLTLLKALVRQQLPEKYKEIFFDQSKNGYAGYIDGGASQEEFYKFIKPILEKMDGTEELLVKLNREDLLRKQRTFDNGSIPHQIHLGELHAILRRQEDFYPFLKDNREKIEKILTFRIPYYVGPLARGNSRFAWMTRKSEETITPWNFEEVVDKGASAQSFIERMTNFDKNLPNEKVLPKHSLLYEYFTVYNELTKVKYVTEGMRKPAFLSGEQKKAIVDLLFKTNRKVTVKQLKEDYFKKIECFDSVEISGVEDRFNASLGTYHDLLKIIKDKDFLDNEENEDILEDIVLTLTLFEDREMIEERLKTYAHLFDDKVMKQLKRRRYTGWGRLSRKLINGIRDKQSGKTILDFLKSDGFANRNFMQLIHDDSLTFKEDIQKAQVSGQGDSLHEHIANLAGSPAIKKGILQTVKVVDELVKVMGRHKPENIVIEMARENQTTQKGQKNSRERMKRIEEGIKELGSQILKEHPVENTQLQNEKLYLYYLQNGRDMYVDQELDINRLSDYDVDHIVPQSFLKDDSIDNKVLTRSDKARGKSDNVPSEEVVKKMKNYWRQLLNAKLITQRKFDNLTKAERGGLSELDKAGFIKRQLVETRQITKHVAQILDSRMNTKYDENDKLIREVKVITLKSKLVSDFRKDFQFYKVREINNYHHAHDAYLNAVVGTALIKKYPKLESEFVYGDYKVYDVRKMIAKSEQEIGKATAKYFFYSNIMNFFKTEITLANGEIRKRPLIETNGETGEIVWDKGRDFATVRKVLSMPQVNIVKKTEVQTGGFSKESILPKRNSDKLIARKKDWDPKKYGGFDSPTVAYSVLVVAKVEKGKSKKLKSVKELLGITIMERSSFEKNPIDFLEAKGYKEVKKDLIIKLPKYSLFELENGRKRMLASAGELQKGNELALPSKYVNFLYLASHYEKLKGSPEDNEQKQLFVEQHKHYLDEIIEQISEFSKRVILADANLDKVLSAYNKHRDKPIREQAENIIHLFTLTNLGAPAAFKYFDTTIDRKRYTSTKEVLDATLIHQSITGLYETRIDLSQLGGDGGEAAAKGGGPAPGGTLNIEDEHRLHETSKEPDVSLGSTWLSDFPQAWAETGGMGLAVRQAPLIIPLKATSTPVSIKQYPMSQEARLGIKPHIQRLLDQGILVPCQSPWNTPLLPVKKPGTNDYRPVQDLREVNKRVEDIHPTVPNPYNLLSGLPPSHQWYTVLDLKDAFFCLRLHPTSQPLFAFEWRDPEMGISGQLTWTRLPQGFKNSPTLFNEALHRDLADFRIQHPDLILLQYVDDLLLAATSELDCQQGTRALLQTLGNLGYRASAKKAQICQKQVKYLGYLLKEGQRWLTEARKETVMGQPTPKTPRQLREFLGTAGFCRLWIPGFAEMAAPLYPLTKPGTLFNWGPDQQKAYQEIKQALLTAPALGLPDLTKPFELFVDEKQGYAKGVLTQKLGPWRRPVAYLSKKLDPVAAGWPPCLRMVAAIAVLTKDAGKLTMGQPLVILAPHAVEALVKQPPDRWLSNARMTHYQALLLDTDRVQFGPVVALNPATLLPLPEEGLQHNCLDILAEAHGTRPDLTDQPLPDADHTWYTDGSSLLQEGQRKAGAAVTTETEVIWAKALPAGTSAQRAELIALTQALKMAEGKKLNVYTDSRYAFATAHIHGEIYRRRGWLTSEGKEIKNKDEILALLKALFLPKRLSIIHCPGHQKGHSAEARGNRMADQAARKAAITETPDTSTLLAGKRTADGSEFEKRTADGSEFESPKKKAKVE

SEQ ID NO: 4536 - protein, 2096 aa, synthetic construct
MPAAKRVKLDGGDKKYSIGLDIGTNSVGWAVITDEYKVPSKKFKVLGNTDRHSIKKNLIGALLFDSGETAEATRLKRTARRRYTRRKNRICYLQEIFSNEMAKVDDSFFHRLEESFLVEEDKKHERHPIFGNIVDEVAYHEKYPTIYHLRKKLVDSTDKADLRLIYLALAHMIKFRGHFLIEGDLNPDNSDVDKLFIQLVQTYNQLFEENPINASGVDAKAILSARLSKSRRLENLIAQLPGEKKNGLFGNLIALSLGLTPNFKSNFDLAEDAKLQLSKDTYDDDLDNLLAQIGDQYADLFLAAKNLSDAILLSDILRVNTEITKAPLSASMIKRYDEHHQDLTLLKALVRQQLPEKYKEIFFDQSKNGYAGYIDGGASQEEFYKFIKPILEKMDGTEELLVKLNREDLLRKQRTFDNGSIPHQIHLGELHAILRRQEDFYPFLKDNREKIEKILTFRIPYYVGPLARGNSRFAWMTRKSEETITPWNFEEVVDKGASAQSFIERMTNFDKNLPNEKVLPKHSLLYEYFTVYNELTKVKYVTEGMRKPAFLSGEQKKAIVDLLFKTNRKVTVKQLKEDYFKKIECFDSVEISGVEDRFNASLGTYHDLLKIIKDKDFLDNEENEDILEDIVLTLTLFEDREMIEERLKTYAHLFDDKVMKQLKRRRYTGWGRLSRKLINGIRDKQSGKTILDFLKSDGFANRNFMQLIHDDSLTFKEDIQKAQVSGQGDSLHEHIANLAGSPAIKKGILQTVKVVDELVKVMGRHKPENIVIEMARENQTTQKGQKNSRERMKRIEEGIKELGSQILKEHPVENTQLQNEKLYLYYLQNGRDMYVDQELDINRLSDYDVDHIVPQSFLKDDSIDNKVLTRSDKARGKSDNVPSEEVVKKMKNYWRQLLNAKLITQRKFDNLTKAERGGLSELDKAGFIKRQLVETRQITKHVAQILDSRMNTKYDENDKLIREVKVITLKSKLVSDFRKDFQFYKVREINNYHHAHDAYLNAVVGTALIKKYPKLESEFVYGDYKVYDVRKMIAKSEQEIGKATAKYFFYSNIMNFFKTEITLANGEIRKRPLIETNGETGEIVWDKGRDFATVRKVLSMPQVNIVKKTEVQTGGFSKESILPKRNSDKLIARKKDWDPKKYGGFDSPTVAYSVLVVAKVEKGKSKKLKSVKELLGITIMERSSFEKNPIDFLEAKGYKEVKKDLIIKLPKYSLFELENGRKRMLASAGELQKGNELALPSKYVNFLYLASHYEKLKGSPEDNEQKQLFVEQHKHYLDEIIEQISEFSKRVILADANLDKVLSAYNKHRDKPIREQAENIIHLFTLTNLGAPAAFKYFDTTIDRKRYTSTKEVLDATLIHQSITGLYETRIDLSQLGGDGGEAAAKPAPGGGGGTLNIEDEYRLHETSKEPDVSLGSTWLSDFPQAWAETGGMGLAVRQAPLIIPLKATSTPVSIKQYPMSQEARLGIKPHIQRLLDQGILVPCQSPWNTPLLPVKKPGTNDYRPVQDLREVNKRVEDIHPTVPNPYNLLSGLPPSHQWYTVLDLKDAFFCLRLHPTSQPLFAFEWRDPEMGISGQLTWTRLPQGFKNSPTLFNEALHRDLAGFRIQHPDLILLQYVDDLLLAATSELDCQQGTRALLQTLGDLGYRASAKKAQICQKQVKYLGYLLKEGQRWLTEARKETVMGQPIPKTPRQLREFLGKAGFCRLFIPGFAEMAAPLYPLTKPGTLFNWGPDQQKAFQEIKQALLTAPALGLPDLTKPFELFVDEKQGYAKGVLTQKLGPWRRPVAYLSKKLDPVAAGWPPCLRMVAAIAVLTKDAGKLTMGQPLVILAPHAVEALVKQPPDRWLSNARMTHYQALLLDTDRVQFGPVVALNPATLLPLPEEGLQHDCLDILAEAHGTRSDLMDQPLPDADHTWYTDGSSFLQEGQRKAGAAVTTETEVIWARALPAGTSAQRAELIALTQALKMAEGKKLNVYTDSRYAFATAHIHGEIYRRRGWLTSEGKEIKNKDEILALLKALFLPKRLSIIHCPGHQKGNSAEARGNRMADQAAREVATRETPETSTLLAGKRTADGSEFEKRTADGSEFESPKKKAKVE

SEQ ID NO: 4537 - protein, 2127 aa, synthetic construct
MPAAKRVKLDGGDKKYSIGLDIGTNSVGWAVITDEYKVPSKKFKVLGNTDRHSIKKNLIGALLFDSGETAEATRLKRTARRRYTRRKNRICYLQEIFSNEMAKVDDSFFHRLEESFLVEEDKKHERHPIFGNIVDEVAYHEKYPTIYHLRKKLVDSTDKADLRLIYLALAHMIKFRGHFLIEGDLNPDNSDVDKLFIQLVQTYNQLFEENPINASGVDAKAILSARLSKSRRLENLIAQLPGEKKNGLFGNLIALSLGLTPNFKSNFDLAEDAKLQLSKDTYDDDLDNLLAQIGDQYADLFLAAKNLSDAILLSDILRVNTEITKAPLSASMIKRYDEHHQDLTLLKALVRQQLPEKYKEIFFDQSKNGYAGYIDGGASQEEFYKFIKPILEKMDGTEELLVKLNREDLLRKQRTFDNGSIPHQIHLGELHAILRRQEDFYPFLKDNREKIEKILTFRIPYYVGPLARGNSRFAWMTRKSEETITPWNFEEVVDKGASAQSFIERMTNFDKNLPNEKVLPKHSLLYEYFTVYNELTKVKYVTEGMRKPAFLSGEQKKAIVDLLFKTNRKVTVKQLKEDYFKKIECFDSVEISGVEDRFNASLGTYHDLLKIIKDKDFLDNEENEDILEDIVLTLTLFEDREMIEERLKTYAHLFDDKVMKQLKRRRYTGWGRLSRKLINGIRDKQSGKTILDFLKSDGFANRNFMQLIHDDSLTFKEDIQKAQVSGQGDSLHEHIANLAGSPAIKKGILQTVKVVDELVKVMGRHKPENIVIEMARENQTTQKGQKNSRERMKRIEEGIKELGSQILKEHPVENTQLQNEKLYLYYLQNGRDMYVDQELDINRLSDYDVDHIVPQSFLKDDSIDNKVLTRSDKARGKSDNVPSEEVVKKMKNYWRQLLNAKLITQRKFDNLTKAERGGLSELDKAGFIKRQLVETRQITKHVAQILDSRMNTKYDENDKLIREVKVITLKSKLVSDFRKDFQFYKVREINNYHHAHDAYLNAVVGTALIKKYPKLESEFVYGDYKVYDVRKMIAKSEQEIGKATAKYFFYSNIMNFFKTEITLANGEIRKRPLIETNGETGEIVWDKGRDFATVRKVLSMPQVNIVKKTEVQTGGFSKESILPKRNSDKLIARKKDWDPKKYGGFDSPTVAYSVLVVAKVEKGKSKKLKSVKELLGITIMERSSFEKNPIDFLEAKGYKEVKKDLIIKLPKYSLFELENGRKRMLASAGELQKGNELALPSKYVNFLYLASHYEKLKGSPEDNEQKQLFVEQHKHYLDEIIEQISEFSKRVILADANLDKVLSAYNKHRDKPIREQAENIIHLFTLTNLGAPAAFKYFDTTIDRKRYTSTKEVLDATLIHQSITGLYETRIDLSQLGGDGGPAPEAAAKGGGGGLLGRDLLTKLKAQIQFSTEGPQVTWEDRPAMCLVLNLEEEYRLHEKPVPPSIDPSWLQLFPMVWAEKAGMGLANQVPPVVVELKSDASPVAVRQYPMSKEAREGIRPHIQRFLDLGILVPCQSPWNTPLLPVKKPGTNDYRPVQDLREVNKRVQDIHPTVPNPYNLLSSLPPSHTWYSVLDLKDAFFCLKLHPNSQPLFAFEWRDPEKGNTGQLTWTRLPQGFKNSPTLFNEALHRDLASFRALNPQVVMLQYVDDLLVAAPTYRDCKEGTRRLLQELSKLGYRVSAKKAQLCREEVTYLGYLLKGGKRWLTPARKATVMKIPTPTTPRQVREFLGTAGFCRLWIPGFASLAAPLYPLTRPKVPFTWTEAHQEAFGRIKEALLSAPALALPDLTKPFALYVDEKEGVARGVLTQTLGPWRRPVAYLSKKLDPVASGWPTCLKAIAAVALLLKDADKLTLGQNVLVIAPHNLESIVRQPPDRWMTNARMTHYQSLLLNERVSFAPPAILNPATLLPVESDDTPIHICSEILAEETGTRPDLRDQPLPGVPAWYTDGSSFIMDGRRQAGAAIVDNKRTVWASNLPEGTSAQKAELIALTQALRLAEGKSINIYTDSRYAFATAHVHGAIYKQRGWLTSAGKDIKNKEEILALLEAIHLPKRVAIIHCPGHQRGTDPVATGNRKADEAAKQAAQSTRILTETTKNAGKRTADGSEFEKRTADGSEFESPKKKAKVE

SEQ ID NO: 4538 - protein, 2096 aa, synthetic construct
MPAAKRVKLDGGDKKYSIGLDIGTNSVGWAVITDEYKVPSKKFKVLGNTDRHSIKKNLIGALLFDSGETAEATRLKRTARRRYTRRKNRICYLQEIFSNEMAKVDDSFFHRLEESFLVEEDKKHERHPIFGNIVDEVAYHEKYPTIYHLRKKLVDSTDKADLRLIYLALAHMIKFRGHFLIEGDLNPDNSDVDKLFIQLVQTYNQLFEENPINASGVDAKAILSARLSKSRRLENLIAQLPGEKKNGLFGNLIALSLGLTPNFKSNFDLAEDAKLQLSKDTYDDDLDNLLAQIGDQYADLFLAAKNLSDAILLSDILRVNTEITKAPLSASMIKRYDEHHQDLTLLKALVRQQLPEKYKEIFFDQSKNGYAGYIDGGASQEEFYKFIKPILEKMDGTEELLVKLNREDLLRKQRTFDNGSIPHQIHLGELHAILRRQEDFYPFLKDNREKIEKILTFRIPYYVGPLARGNSRFAWMTRKSEETITPWNFEEVVDKGASAQSFIERMTNFDKNLPNEKVLPKHSLLYEYFTVYNELTKVKYVTEGMRKPAFLSGEQKKAIVDLLFKTNRKVTVKQLKEDYFKKIECFDSVEISGVEDRFNASLGTYHDLLKIIKDKDFLDNEENEDILEDIVLTLTLFEDREMIEERLKTYAHLFDDKVMKQLKRRRYTGWGRLSRKLINGIRDKQSGKTILDFLKSDGFANRNFMQLIHDDSLTFKEDIQKAQVSGQGDSLHEHIANLAGSPAIKKGILQTVKVVDELVKVMGRHKPENIVIEMARENQTTQKGQKNSRERMKRIEEGIKELGSQILKEHPVENTQLQNEKLYLYYLQNGRDMYVDQELDINRLSDYDVDHIVPQSFLKDDSIDNKVLTRSDKARGKSDNVPSEEVVKKMKNYWRQLLNAKLITQRKFDNLTKAERGGLSELDKAGFIKRQLVETRQITKHVAQILDSRMNTKYDENDKLIREVKVITLKSKLVSDFRKDFQFYKVREINNYHHAHDAYLNAVVGTALIKKYPKLESEFVYGDYKVYDVRKMIAKSEQEIGKATAKYFFYSNIMNFFKTEITLANGEIRKRPLIETNGETGEIVWDKGRDFATVRKVLSMPQVNIVKKTEVQTGGFSKESILPKRNSDKLIARKKDWDPKKYGGFDSPTVAYSVLVVAKVEKGKSKKLKSVKELLGITIMERSSFEKNPIDFLEAKGYKEVKKDLIIKLPKYSLFELENGRKRMLASAGELQKGNELALPSKYVNFLYLASHYEKLKGSPEDNEQKQLFVEQHKHYLDEIIEQISEFSKRVILADANLDKVLSAYNKHRDKPIREQAENIIHLFTLTNLGAPAAFKYFDTTIDRKRYTSTKEVLDATLIHQSITGLYETRIDLSQLGGDGGGSSEAAAKPAPGGTLNIEDEYRLHETSKEPDVPLGSTWLSDFPQAWAETGGMGLAVRQAPLIIPLKATSTPVSIKQYPMSQEARLGIKPHIQRLLDQGILVPCQSPWNTPLLPVKKPGTNDYRPVQDLREVNKRVEDIHPTVPNPYNLLSGLPPSHQWYTVLDLKDAFFCLRLHPTSQPLFAFEWRDPEMGISGQLTWTRLPQGFKNSPTLFNEALHRDLADFRIQHPDLILLQYVDDLLLAATSEQDCQRGTRALLQTLGNLGYRASAKKAQICQKQVKYLGYLLKEGQRWLTEARKETVMGQPTPKTPRQLREFLGTAGFCRLWIPGFAEMAAPLYPLTKPGTLFNWGPDQQKAYQEIKQALLTAPALGLPDLTKPFELFVDEKQGYAKGVLTQKLGPWRRPVAYLSKKLDPVAAGWPPCLRMVAAIAVLTKDAGKLTMGQPLVILAPHAVEALVKQPPDRWLSNARMTHYQAMLLDTDRVQFGPVVALNPATLLPLPEKEAPHDCLEILAETHGTRPDLTDQPIPDADYTWYTDGSSFLQEGQRRAGAAVTTETEVIWARALPAGTSAQRAELIALTQALKMAEGKKLNVYTDSRYAFATAHVHGEIYRRRGWLTSEGREIKNKNEILALLKALFLPKRLSIIHCPGHQKGNSAEARGNRMADQAAREAAMKAVLETSTLLAGKRTADGSEFEKRTADGSEFESPKKKAKVE

SEQ ID NO: 4539 - protein, 2098 aa, synthetic construct
MPAAKRVKLDGGDKKYSIGLDIGTNSVGWAVITDEYKVPSKKFKVLGNTDRHSIKKNLIGALLFDSGETAEATRLKRTARRRYTRRKNRICYLQEIFSNEMAKVDDSFFHRLEESFLVEEDKKHERHPIFGNIVDEVAYHEKYPTIYHLRKKLVDSTDKADLRLIYLALAHMIKFRGHFLIEGDLNPDNSDVDKLFIQLVQTYNQLFEENPINASGVDAKAILSARLSKSRRLENLIAQLPGEKKNGLFGNLIALSLGLTPNFKSNFDLAEDAKLQLSKDTYDDDLDNLLAQIGDQYADLFLAAKNLSDAILLSDILRVNTEITKAPLSASMIKRYDEHHQDLTLLKALVRQQLPEKYKEIFFDQSKNGYAGYIDGGASQEEFYKFIKPILEKMDGTEELLVKLNREDLLRKQRTFDNGSIPHQIHLGELHAILRRQEDFYPFLKDNREKIEKILTFRIPYYVGPLARGNSRFAWMTRKSEETITPWNFEEVVDKGASAQSFIERMTNFDKNLPNEKVLPKHSLLYEYFTVYNELTKVKYVTEGMRKPAFLSGEQKKAIVDLLFKTNRKVTVKQLKEDYFKKIECFDSVEISGVEDRFNASLGTYHDLLKIIKDKDFLDNEENEDILEDIVLTLTLFEDREMIEERLKTYAHLFDDKVMKQLKRRRYTGWGRLSRKLINGIRDKQSGKTILDFLKSDGFANRNFMQLIHDDSLTFKEDIQKAQVSGQGDSLHEHIANLAGSPAIKKGILQTVKVVDELVKVMGRHKPENIVIEMARENQTTQKGQKNSRERMKRIEEGIKELGSQILKEHPVENTQLQNEKLYLYYLQNGRDMYVDQELDINRLSDYDVDHIVPQSFLKDDSIDNKVLTRSDKARGKSDNVPSEEVVKKMKNYWRQLLNAKLITQRKFDNLTKAERGGLSELDKAGFIKRQLVETRQITKHVAQILDSRMNTKYDENDKLIREVKVITLKSKLVSDFRKDFQFYKVREINNYHHAHDAYLNAVVGTALIKKYPKLESEFVYGDYKVYDVRKMIAKSEQEIGKATAKYFFYSNIMNFFKTEITLANGEIRKRPLIETNGETGEIVWDKGRDFATVRKVLSMPQVNIVKKTEVQTGGFSKESILPKRNSDKLIARKKDWDPKKYGGFDSPTVAYSVLVVAKVEKGKSKKLKSVKELLGITIMERSSFEKNPIDFLEAKGYKEVKKDLIIKLPKYSLFELENGRKRMLASAGELQKGNELALPSKYVNFLYLASHYEKLKGSPEDNEQKQLFVEQHKHYLDEIIEQISEFSKRVILADANLDKVLSAYNKHRDKPIREQAENIIHLFTLTNLGAPAAFKYFDTTIDRKRYTSTKEVLDATLIHQSITGLYETRIDLSQLGGDGGGSSPAPEAAAKGGTAPLEEEYRLFLEAPIQNVTLLEQWKREIPKVWAEINPPGLASTQAPIHVQLLSTALPVRVRQYPITLEAKRSLRETIRKFRAAGILRPVHSPWNTPLLPVRKSGTSEYRMVQDLREVNKRVETIHPTVPNPYTLLSLLPPDRIWYSVLDLKDAFFCIPLAPESQLIFAFEWADAEEGESGQLTWTRLPQGFKNSPTLFNEALNRDLQGFRLDHPSVSLLQYVDDLLIAADTQAACLSATRDLLMTLAELGYRVSGKKAQLCQEEVTYLGFKIHKGSRSLSNSRTQAILQIPVPKTKRQVREFLGKIGYCRLFIPGFAELAQPLYAATRPGNDPLVWGEKEEEAFQSLKLALTQPPALALPSLDKPFQLFVEETSGAAKGVLTQALGPWKRPVAYLSKRLDPVAAGWPRCLRAIAAAALLTREASKLTFGQDIEITSSHNLESLLRSPPDKWLTNARITQYQVLLLDPPRVRFKQTAALNPATLLPETDDTLPIHHCLDTLDSLTSTRPDLTDQPLAQAEATLFTDGSSYIRDGKRYAGAAVVTLDSVIWAEPLPIGTSAQKAELIALTKALEWSKDKSVNIYTDSRYAFATLHVHGMIYRERGWLTAGGKAIKNAPEILALLTAVWLPKRVAVMHCKGHQKDDAPTSTGNRRADEVAREVAIRPLSTQATISAGKRTADGSEFEKRTADGSEFESPKKKAKVE

SEQ ID NO: 4540 - protein, 2131 aa, synthetic construct
MPAAKRVKLDGGDKKYSIGLDIGTNSVGWAVITDEYKVPSKKFKVLGNTDRHSIKKNLIGALLFDSGETAEATRLKRTARRRYTRRKNRICYLQEIFSNEMAKVDDSFFHRLEESFLVEEDKKHERHPIFGNIVDEVAYHEKYPTIYHLRKKLVDSTDKADLRLIYLALAHMIKFRGHFLIEGDLNPDNSDVDKLFIQLVQTYNQLFEENPINASGVDAKAILSARLSKSRRLENLIAQLPGEKKNGLFGNLIALSLGLTPNFKSNFDLAEDAKLQLSKDTYDDDLDNLLAQIGDQYADLFLAAKNLSDAILLSDILRVNTEITKAPLSASMIKRYDEHHQDLTLLKALVRQQLPEKYKEIFFDQSKNGYAGYIDGGASQEEFYKFIKPILEKMDGTEELLVKLNREDLLRKQRTFDNGSIPHQIHLGELHAILRRQEDFYPFLKDNREKIEKILTFRIPYYVGPLARGNSRFAWMTRKSEETITPWNFEEVVDKGASAQSFIERMTNFDKNLPNEKVLPKHSLLYEYFTVYNELTKVKYVTEGMRKPAFLSGEQKKAIVDLLFKTNRKVTVKQLKEDYFKKIECFDSVEISGVEDRFNASLGTYHDLLKIIKDKDFLDNEENEDILEDIVLTLTLFEDREMIEERLKTYAHLFDDKVMKQLKRRRYTGWGRLSRKLINGIRDKQSGKTILDFLKSDGFANRNFMQLIHDDSLTFKEDIQKAQVSGQGDSLHEHIANLAGSPAIKKGILQTVKVVDELVKVMGRHKPENIVIEMARENQTTQKGQKNSRERMKRIEEGIKELGSQILKEHPVENTQLQNEKLYLYYLQNGRDMYVDQELDINRLSDYDVDHIVPQSFLKDDSIDNKVLTRSDKARGKSDNVPSEEVVKKMKNYWRQLLNAKLITQRKFDNLTKAERGGLSELDKAGFIKRQLVETRQITKHVAQILDSRMNTKYDENDKLIREVKVITLKSKLVSDFRKDFQFYKVREINNYHHAHDAYLNAVVGTALIKKYPKLESEFVYGDYKVYDVRKMIAKSEQEIGKATAKYFFYSNIMNFFKTEITLANGEIRKRPLIETNGETGEIVWDKGRDFATVRKVLSMPQVNIVKKTEVQTGGFSKESILPKRNSDKLIARKKDWDPKKYGGFDSPTVAYSVLVVAKVEKGKSKKLKSVKELLGITIMERSSFEKNPIDFLEAKGYKEVKKDLIIKLPKYSLFELENGRKRMLASAGELQKGNELALPSKYVNFLYLASHYEKLKGSPEDNEQKQLFVEQHKHYLDEIIEQISEFSKRVILADANLDKVLSAYNKHRDKPIREQAENIIHLFTLTNLGAPAAFKYFDTTIDRKRYTSTKEVLDATLIHQSITGLYETRIDLSQLGGDGGAEAAAKEAAAKEAAAKEAAAKALEAEAAAKEAAAKEAAAKEAAAKAGGTLNIEDEYRLHETSKGPDVPLGSTWLSDFPQAWAETGGMGLAVRQAPLIIPLKATSTPVSIKQYPMSQEARLGIKPHIQRLLDQGILVPCQSPWNTPLLPVKKPGTNDYRPVQDLREVNKRVEDIHPTVPNPYNLLSGLPPSHQWYTVLDLKDAFFCLRLHPTSQSLFAFEWRDPEMGISGQLTWTRLPQGFKNSPTLFNEALHRDLADFRIQHPDLILLQYVDDLLLAATSELDCQQGTRALLQTLGDLGYRASAKKAQICQKQVKYLGYLLKEGQRWLTEARKETVMGQPTPKTPRQLREFLGTAGFCRLWIPGFAEMAAPLYPLTKPGTLFEWGPDQQKAYQEIKQALLTAPALGLPDLTKPFELFVDEKQGYAKGVLTQKLGPWRRPVAYLSKKLDPVAAGWPPCLRMVAAIAVLTKDAGKLTMGQPLVILAPHAVEALVKQPPDRWLSNARMTHYQALLLDTDRVQFGPIVALNPATLLPLPEEGLQHDCLDILAEAHGTRPDLTDQPLPDADHTWYTDGSSFLQEGQRKAGAAVTTETEVVWAKALPAGTSAQRAELIALTQALKMAEGKKLNVYTDSRYAFATAHIHGEIYRRRGWLTSEGKEIKNKDEILALLKALFLPKRLSIIHCPGHQKGNRAEARGNRMADQAAREVATRETPETSTLLAGKRTADGSEFEKRTADGSEFESPKKKAKVE

SEQ ID NO: 4541 - protein, 2122 aa, synthetic construct
MPAAKRVKLDGGDKKYSIGLDIGTNSVGWAVITDEYKVPSKKFKVLGNTDRHSIKKNLIGALLFDSGETAEATRLKRTARRRYTRRKNRICYLQEIFSNEMAKVDDSFFHRLEESFLVEEDKKHERHPIFGNIVDEVAYHEKYPTIYHLRKKLVDSTDKADLRLIYLALAHMIKFRGHFLIEGDLNPDNSDVDKLFIQLVQTYNQLFEENPINASGVDAKAILSARLSKSRRLENLIAQLPGEKKNGLFGNLIALSLGLTPNFKSNFDLAEDAKLQLSKDTYDDDLDNLLAQIGDQYADLFLAAKNLSDAILLSDILRVNTEITKAPLSASMIKRYDEHHQDLTLLKALVRQQLPEKYKEIFFDQSKNGYAGYIDGGASQEEFYKFIKPILEKMDGTEELLVKLNREDLLRKQRTFDNGSIPHQIHLGELHAILRRQEDFYPFLKDNREKIEKILTFRIPYYVGPLARGNSRFAWMTRKSEETITPWNFEEVVDKGASAQSFIERMTNFDKNLPNEKVLPKHSLLYEYFTVYNELTKVKYVTEGMRKPAFLSGEQKKAIVDLLFKTNRKVTVKQLKEDYFKKIECFDSVEISGVEDRFNASLGTYHDLLKIIKDKDFLDNEENEDILEDIVLTLTLFEDREMIEERLKTYAHLFDDKVMKQLKRRRYTGWGRLSRKLINGIRDKQSGKTILDFLKSDGFANRNFMQLIHDDSLTFKEDIQKAQVSGQGDSLHEHIANLAGSPAIKKGILQTVKVVDELVKVMGRHKPENIVIEMARENQTTQKGQKNSRERMKRIEEGIKELGSQILKEHPVENTQLQNEKLYLYYLQNGRDMYVDQELDINRLSDYDVDHIVPQSFLKDDSIDNKVLTRSDKARGKSDNVPSEEVVKKMKNYWRQLLNAKLITQRKFDNLTKAERGGLSELDKAGFIKRQLVETRQITKHVAQILDSRMNTKYDENDKLIREVKVITLKSKLVSDFRKDFQFYKVREINNYHHAHDAYLNAVVGTALIKKYPKLESEFVYGDYKVYDVRKMIAKSEQEIGKATAKYFFYSNIMNFFKTEITLANGEIRKRPLIETNGETGEIVWDKGRDFATVRKVLSMPQVNIVKKTEVQTGGFSKESILPKRNSDKLIARKKDWDPKKYGGFDSPTVAYSVLVVAKVEKGKSKKLKSVKELLGITIMERSSFEKNPIDFLEAKGYKEVKKDLIIKLPKYSLFELENGRKRMLASAGELQKGNELALPSKYVNFLYLASHYEKLKGSPEDNEQKQLFVEQHKHYLDEIIEQISEFSKRVILADANLDKVLSAYNKHRDKPIREQAENIIHLFTLTNLGAPAAFKYFDTTIDRKRYTSTKEVLDATLIHQSITGLYETRIDLSQLGGDGGAEAAAKEAAAKEAAAKEAAAKALEAEAAAKEAAAKEAAAKEAAAKAGGIPWLMKKPLQLTTLVPLQEYEERLLKQTMLTGSYKEKLQSLFLKYDALWQHWENQVGHRRIKPHHIATGTVNPRPQKQYPINPKAKASIQTVINDLLKQGVLIQQNSIMNTPVYPVPKPDGKWRMVLDYREVNKTIPLIAAQNQHSAGILSSIFRGKYKTTLDLSNGFWAHSITPESYWLTAFTWLGQQYCWTRLPQGFLNSPALFNADVVDLLKEVPNVQVYVDDIYISHDDPREHLEQLEKVFSLLLNAGYVVSLKKSEIAQHEVEFLGFNITKEGRGLTETFKQKLLNITPPRDLKQLQSILGKLNFARNFIPNFSELVKPLYNIIATAPGKYITWTTDNSQQLQNIISMLNSAENLEERNPEVRLIMKVNTSPSAGYIRFYNEFAKRPIMYLNYVYTKAEVKFTNTEKLLTTIHKGLIKALDLGMGQEILVYSPIVSMTKIQKTPLPERKALPIRWITWMSYLEDPRIQFHYDKTLPELQQVPTVTDDIIAKIKHPSEFSMVFYTDGSAIKHPNVNKSHNAGMGIAQVQFKPEFTVINTWSIPLGDHTAQLAEVAAVEFACKKALKIDGPVLIVTDSFYVAESVNKELPYWQSNGFFNNKKKPLKHVSKWKSIADCIQLKPDIIIIHEKGHQPTASTFHTEGNNLADKLATQGSYVVNAGKRTADGSEFEKRTADGSEFESPKKKAKVE

SEQ ID NO: 4542-4600 - skipped (59 entries)

SEQ ID NO: 4601 - DNA, 16 bp, synthetic construct
  source 1..16: mol_type = other DNA
gcgcgctcgctcgctc

SEQ ID NO: 4602-4643 - skipped (42 entries)

SEQ ID NO: 4644 - protein, 9 aa, synthetic construct
PAAKRVKLD

SEQ ID NO: 4645-4648 - skipped (4 entries)

SEQ ID NO: 4649 - protein, 29 aa, synthetic construct
KRTADGSEFEKRTADGSEFESPKKKAKVE

SEQ ID NO: 4650 - protein, 10 aa, synthetic construct
KRTADGSEFE

SEQ ID NO: 4651 - protein, 19 aa, synthetic construct
KRTADGSEFESPKKKAKVE

SEQ ID NO: 4652-5001 - skipped (350 entries)

SEQ ID NO: 5002 - protein, 672 aa, unidentified
TLNIEDEYRLHETSKEPDVSLGSTWLSDFPQAWAETGGMGLAVRQAPLIIPLKATSTPVSIKQYPMSQEARLGIKPHIQRLLDQGILVPCQSPWNTPLLPVKKPGTNDYRPVQDLREVNKRVEDIHPTVPNPYNLLSGLPPSHQWYTVLDLKDAFFCLRLHPTSQPLFAFEWRDPEMGISGQLTWTRLPQGFKNSPTLFDEALHRDLADFRIQHPDLILLQYVDDLLLAATSELDCQQGTRALLQTLGNLGYRASAKKAQICQKQVKYLGYLLKEGQRWLTEARKETVMGQPTPKTPRQLREFLGTAGFCRLWIPGFAEMAAPLYPLTKTGTLFNWGPDQQKAYQEIKQALLTAPALGLPDLTKPFELFVDEKQGYAKGVLTQKLGPWRRPVAYLSKKLDPVAAGWPPCLRMVAAIAVLTKDAGKLTMGQPLVILAPHAVEALVKQPPDRWLSNARMTHYQALLLDTDRVQFGPVVALNPATLLPLPEEGLQHNCLDILAEAHGTRPDLTDQPLPDADHTWYTDGSSLLQEGQRKAGAAVTTETEVIWAKALPAGTSAQRAELIALTQALKMAEGKKLNVYTDSRYAFATAHIHGEIYRRRGLLTSEGKEIKNKDEILALLKALFLPKRLSIIHCPGHQKGHSAEARGNRMADQAARKAAITETPDTSTLLI

SEQ ID NO: 5003 - protein, 671 aa, synthetic construct
TLNIEDEHRLHETSKEPDVSLGSTWLSDFPQAWAETGGMGLAVRQAPLIIPLKATSTPVSIKQYPMSQEARLGIKPHIQRLLDQGILVPCQSPWNTPLLPVKKPGTNDYRPVQDLREVNKRVEDIHPTVPNPYNLLSGLPPSHQWYTVLDLKDAFFCLRLHPTSQPLFAFEWRDPEMGISGQLTWTRLPQGFKNSPTLFDEALHRDLADFRIQHPDLILLQYVDDLLLAATSELDCQQGTRALLQTLGNLGYRASAKKAQICQKQVKYLGYLLKEGQRWLTEARKETVMGQPTPKTPRQLREFLGTAGFCRLWIPGFAEMAAPLYPLTKTGTLFNWGPDQQKAYQEIKQALLTAPALGLPDLTKPFELFVDEKQGYAKGVLTQKLGPWRRPVAYLSKKLDPVAAGWPPCLRMVAAIAVLTKDAGKLTMGQPLVILAPHAVEALVKQPPDRWLSNARMTHYQALLLDTDRVQFGPVVALNPATLLPLPEEGLQHNCLDILAEAHGTRPDLTDQPLPDADHTWYTDGSSLLQEGQRKAGAAVTTETEVIWAKALPAGTSAQRAELIALTQALKMAEGKKLNVYTDSRYAFATAHIHGEIYRRRGLLTSEGKEIKNKDEILALLKALFLPKRLSIIHCPGHQKGHSAEARGNRMADQAARKAAITETPDTSTLL

SEQ ID NO: 5004 - protein, 660 aa, synthetic construct
TLNIEDEHRLHETSKEPDVSLGSTWLSDFPQAWAETGGMGLAVRQAPLIIPLKATSTPVSIKQYPMSQEARLGIKPHIQRLLDQGILVPCQSPWNTPLLPVKKPGTNDYRPVQDLREVNKRVEDIHPTVPNPYNLLSGLPPSHQWYTVLDLKDAFFCLRLHPTSQPLFAFEWRDPEMGISGQLTWTRLPQGFKNSPTLFDEALHRDLADFRIQHPDLILLQYVDDLLLAATSELDCQQGTRALLQTLGNLGYRASAKKAQICQKQVKYLGYLLKEGQRWLTEARKETVMGQPTPKTPRQLREFLGTAGFCRLWIPGFAEMAAPLYPLTKTGTLFNWGPDQQKAYQEIKQALLTAPALGLPDLTKPFELFVDEKQGYAKGVLTQKLGPWRRPVAYLSKKLDPVAAGWPPCLRMVAAIAVLTKDAGKLTMGQPLVILAPHAVEALVKQPPDRWLSNARMTHYQALLLDTDRVQFGPVVALNPATLLPLPEEGLQHNCLDILAEAHGTRPDLTDQPLPDADHTWYTDGSSLLQEGQRKAGAAVTTETEVIWAKALPAGTSAQRAELIALTQALKMAEGKKLNVYTDSRYAFATAHIHGEIYRRRGLLTSEGKEIKNKDEILALLKALFLPKRLSIIHCPGHQKGHSAEARGNRMADQAARKAA

SEQ ID NO: 5005 - protein, 672 aa, synthetic construct
TLNIEDEYRLHETSKEPDVSLGSTWLSDFPQAWAETGGMGLAVRQAPLIIPLKATSTPVSIKQYPMSQEARLGIKPHIQRLLDQGILVPCQSPWNTPLLPVKKPGTNDYRPVQDLREVNKRVEDIHPTVPNPYNLLSGLPPSHQWYTVLDLKDAFFCLRLHPTSQPLFAFEWRDPEMGISGQLTWTRLPQGFKNSPTLFNEALHRDLADFRIQHPDLILLQYVDDLLLAATSELDCQQGTRALLQTLGNLGYRASAKKAQICQKQVKYLGYLLKEGQRWLTEARKETVMGQPTPKTPRQLREFLGKAGFCRLFIPGFAEMAAPLYPLTKPGTLFNWGPDQQKAYQEIKQALLTAPALGLPDLTKPFELFVDEKQGYAKGVLTQKLGPWRRPVAYLSKKLDPVAAGWPPCLRMVAAIAVLTKDAGKLTMGQPLVILAPHAVEALVKQPPDRWLSNARMTHYQALLLDTDRVQFGPVVALNPATLLPLPEEGLQHNCLDILAEAHGTRPDLTDQPLPDADHTWYTDGSSLLQEGQRKAGAAVTTETEVIWAKALPAGTSAQRAELIALTQALKMAEGKKLNVYTDSRYAFATAHIHGEIYRRRGWLTSEGKEIKNKDEILALLKALFLPKRLSIIHCPGHQKGHSAEARGNRMADQAARKAAITETPDTSTLLI

SEQ ID NO: 5006 - protein, 33 aa, synthetic construct
SGGSSGGSSGSETPGTSESATPESSGGSSGGSS

SEQ ID NO: 5007 - protein, 1369 aa, synthetic construct
SMDKKYSIGLAIGTNSVGWAVITDDYKVPSKKFKVLGNTDRHSIKKNLIGALLFDSGETAEATRLKRTARRRYTRRKNRICYLQEIFSNEMAKVDDSFFHRLEESFLVEEDKKHERHPIFGNIVDEVAYHEKYPTIYHLRKKLVDSTDKADLRLIYLALAHMIKFRGHFLIEGDLNPDNSDVDKLFIQLVQTYNQLFEENPINASGVDAKAILSARLSKSRRLENLIAQLPGEKKNGLFGNLIALSLGLTPNFKSNFDLAEDAKLQLSKDTYDDDLDNLLAQIGDQYADLFLAAKNLSDAILLSDILRVNTEITKAPLSASMIKRYDEHHQDLTLLKALVRQQLPEKYKEIFFDQSKNGYAGYIDGGASQEEFYKFIKPILEKMDGTEELLVKLNREDLLRKQRTFDNGSIPHQIHLGELHAILRRQEDFYPFLKDNREKIEKILTFRIPYYVGPLARGNSRFAWMTRKSEETITPWNFEEVVDKGASAQSFIERMTNFDKNLPNEKVLPKHSLLYEYFTVYNELTKVKYVTEGMRKPAFLSGEQKKAIVDLLFKTNRKVTVKQLKEDYFKKIECFDSVEISGVEDRFNASLGTYHDLLKIIKDKDFLDNEENEDILEDIVLTLTLFEDREMIEERLKTYAHLFDDKVMKQLKRRRYTGWGRLSRKLINGIRDKQSGKTILDFLKSDGFANRNFMQLIHDDSLTFKEDIQKAQVSGQGDSLHEHIANLAGSPAIKKGILQTVKVVDELVKVMGRHKPENIVIEMARENQTTQKGQKNSRERMKRIEEGIKELGSQILKEHPVENTQLQNEKLYLYYLQNGRDMYVDQELDINRLSDYDVDAIVPQSFLKDDSIDNKVLTRSDKNRGKSDNVPSEEVVKKMKNYWRQLLNAKLITQRKFDNLTKAERGGLSELDKAGFIKRQLVETRQITKHVAQILDSRMNTKYDENDKLIREVKVITLKSKLVSDFRKDFQFYKVREINNYHHAHDAYLNAVVGTALIKKYPKLESEFVYGDYKVYDVRKMIAKSEQEIGKATAKYFFYSNIMNFFKTEITLANGEIRKRPLIETNGETGEIVWDKGRDFATVRKVLSMPQVNIVKKTEVQTGGFSKESILPKRNSDKLIARKKDWDPKKYGGFDSPTVAYSVLVVAKVEKGKSKKLKSVKELLGITIMERSSFEKNPIDFLEAKGYKEVKKDLIIKLPKYSLFELENGRKRMLASAGELQKGNELALPSKYVNFLYLASHYEKLKGSPEDNEQKQLFVEQHKHYLDEIIEQISEFSKRVILADANLDKVLSAYNKHRDKPIREQAENIIHLFTLTNLGAPAAFKYFDTTIDRKRYTSTKEVLDATLIHQSITGLYETRIDLSQLGGD

SEQ ID NO: 5008 - DNA, 76 bp, synthetic construct
  source 1..76: mol_type = other DNA
gttttagagctagaaatagcaagttaaaataaggctagtccgttatcaacttgaaaaagtgggaccgagtcggtcc

SEQ ID NO: 5009 - protein, 30 aa, synthetic construct
MDSLLMNRRKFLYQFKNVRWAKGRRETYLC

SEQ ID NO: 5010 - protein, 28 aa, synthetic construct
PKKRKVEGADKRTADGSEFESPKKKRKV

SEQ ID NO: 5011 - protein, 22 aa, synthetic construct
RKSGKIAAIWKRPRKPKKKRKV

SEQ ID NO: 5012 - protein, 18 aa, synthetic construct
KRTADGSEFESPKKKRKV

SEQ ID NO: 5013 - protein, 17 aa, synthetic construct
KKTELQTTNAENKTKKL

SEQ ID NO: 5014 - protein, 19 aa, synthetic construct
KRGINDRNFWRGENGRKTR

SEQ ID NO: 5015 - protein, 16 aa, synthetic construct
KRPAATKKAGQAKKKK

SEQ ID NO: 5016 - protein, 29 aa, synthetic construct
PKKKRKVEGADKRTADGSEFESPKKKRKV

SEQ ID NO: 5017 - protein, 25 aa, synthetic construct
KRASSQALGTIPKRRSSSRFIKRKK

SEQ ID NO: 5018 - protein, 7 aa, synthetic construct
RKKRKKK

SEQ ID NO: 5019 - protein, 4 aa, synthetic construct
VRQR

SEQ ID NO: 5020 - protein, 4 aa, synthetic construct
VRER

SEQ ID NO: 5021 - protein, 6 aa, synthetic construct
MQKSER

SEQ ID NO: 5022 - protein, 6 aa, synthetic construct
LRKIQK

SEQ ID NO: 5023 - protein, 6 aa, synthetic construct
LRVSQL

SEQ ID NO: 5024 - skipped

SEQ ID NO: 5025 - protein, 4 aa, synthetic construct
SGGS

SEQ ID NO: 5026 - protein, 4 aa, synthetic construct
GGGS

SEQ ID NO: 5027 - protein, 5 aa, synthetic construct
GGGGS

SEQ ID NO: 5028 - protein, 5 aa, synthetic construct
EAAAK

SEQ ID NO: 5029 - DNA, 306 bp, synthetic construct
  source 1..306: mol_type = other DNA
tgcctgtcatacgaaaccgagatactgacagtagaatatggccttctgccaatcgggaagattgtggagaaacggatagaatgcacagtttactctgtcgataacaatggtaacatttatactcagccagttgcccagtggcacgaccggggagagcaggaagtattcgaatactgtctggaggatggaagtctcattagggccactaaggaccacaaatttatgacagtcgatggccagatgctgcctatagacgaaatctttgagcgagagttggacctcatgcgagttgacaaccttcctaat

SEQ ID NO: 5030 - protein, 102 aa, synthetic construct
CLSYETEILTVEYGLLPIGKIVEKRIECTVYSVDNNGNIYTQPVAQWHDRGEQEVFEYCLEDGSLIRATKDHKFMTVDGQMLPIDEIFERELDLMRVDNLPN

SEQ ID NO: 5031 - DNA, 108 bp, synthetic construct
  source 1..108: mol_type = other DNA
atgatcaagatagctacaaggaagtatcttggcaaacaaaacgtttatgatattggagtcgaaagagatcacaactttgctctgaagaacggattcatagcttctaat

SEQ ID NO: 5032 - protein, 36 aa, synthetic construct
MIKIATRKYLGKQNVYDIGVERDHNFALKNGFIASN

SEQ ID NO: 5033 - DNA, 303 bp, synthetic construct
  source 1..303: mol_type = other DNA
tgcctgtcttatgataccgagatacttaccgttgaatatggcttcttgcctattggaaagattgtcgaagagagaattgaatgcacagtatatactgtagacaagaatggtttcgtttacacacagcccattgctcaatggcacaatcgcggcgaacaagaagtatttgagtactgtctcgaggatggaagcatcatacgagcaactaaagatcataaattcatgaccactgacgggcagatgttgccaatagatgagatattcgagcggggcttggatctcaaacaagtggatggattgcca

SEQ ID NO: 5034 - protein, 101 aa, synthetic construct
CLSYDTEILTVEYGFLPIGKIVEERIECTVYTVDKNGFVYTQPIAQWHNRGEQEVFEYCLEDGSIIRATKDHKFMTTDGQMLPIDEIFERGLDLKQVDGLP

SEQ ID NO: 5035 - DNA, 159 bp, synthetic construct
  source 1..159: mol_type = other DNA
atgaagaggactgccgatggatcagagtttgaatctcccaagaagaagaggaaagtaaagataatatctcgaaaaagtcttggtacccaaaatgtctatgatattggagtggagaaagatcacaacttccttctcaagaacggtctcgtagccagcaac

SEQ ID NO: 5036 - protein, 53 aa, synthetic construct
MKRTADGSEFESPKKKRKVKIISRKSLGTQNVYDIGVEKDHNFLLKNGLVASN

SEQ ID NO: 5037-5101 - skipped (65 entries)

SEQ ID NO: 5102 - protein, 6 aa, synthetic construct
GGSGGS

SEQ ID NO: 5103 - protein, 9 aa, synthetic construct
GGSGGSGGS

SEQ ID NO: 5104 - protein, 12 aa, synthetic construct
GGSGGSGGSGGS

SEQ ID NO: 5105 - protein, 15 aa, synthetic construct
GGSGGSGGSGGSGGS

SEQ ID NO: 5106 - protein, 18 aa, synthetic construct
GGSGGSGGSGGSGGSGGS

SEQ ID NO: 5107 - protein, 5 aa, synthetic construct
GGGGS

SEQ ID NO: 5108 - protein, 10 aa, synthetic construct
GGGGSGGGGS

SEQ ID NO: 5109 - protein, 15 aa, synthetic construct
GGGGSGGGGSGGGGS

SEQ ID NO: 5110 - protein, 20 aa, synthetic construct
GGGGSGGGGSGGGGSGGGGS

SEQ ID NO: 5111 - protein, 25 aa, synthetic construct
GGGGSGGGGSGGGGSGGGGSGGGGS

SEQ ID NO: 5112 - protein, 30 aa, synthetic construct
GGGGSGGGGSGGGGSGGGGSGGGGSGGGGS

SEQ ID NO: 5113 - skipped

SEQ ID NO: 5114 - protein, 4 aa, synthetic construct
GGGG

SEQ ID NO: 5115 - protein, 5 aa, synthetic construct
GGGGG

SEQ ID NO: 5116 - protein, 6 aa, synthetic construct
GGGGGG

SEQ ID NO: 5117 - protein, 7 aa, synthetic construct
GGGGGGG

SEQ ID NO: 5118 - protein, 8 aa, synthetic construct
GGGGGGGG

SEQ ID NO: 5119 - skipped

SEQ ID NO: 5120 - protein, 6 aa, synthetic construct
GSSGSS

SEQ ID NO: 5121 - protein, 9 aa, synthetic construct
GSSGSSGSS

SEQ ID NO: 5122 - protein, 12 aa, synthetic construct
GSSGSSGSSGSS

SEQ ID NO: 5123 - protein, 15 aa, synthetic construct
GSSGSSGSSGSSGSS

SEQ ID NO: 5124 - protein, 18 aa, synthetic construct
GSSGSSGSSGSSGSSGSS

SEQ ID NO: 5125 - protein, 5 aa, synthetic construct
EAAAK

SEQ ID NO: 5126 - protein, 10 aa, synthetic construct
EAAAKEAAAK

SEQ ID NO: 5127 - protein, 15 aa, synthetic construct
EAAAKEAAAKEAAAK

SEQ ID NO: 5128 - protein, 20 aa, synthetic construct
EAAAKEAAAKEAAAKEAAAK

SEQ ID NO: 5129 - protein, 25 aa, synthetic construct
EAAAKEAAAKEAAAKEAAAKEAAAK

SEQ ID NO: 5130 - protein, 30 aa, synthetic construct
EAAAKEAAAKEAAAKEAAAKEAAAKEAAAK

SEQ ID NO: 5131 - skipped

SEQ ID NO: 5132 - protein, 5 aa, synthetic construct
PAPAP

SEQ ID NO: 5133 - protein, 7 aa, synthetic construct
PAPAPAP

SEQ ID NO: 5134 - protein, 9 aa, synthetic construct
PAPAPAPAP

SEQ ID NO: 5135 - protein, 11 aa, synthetic construct
PAPAPAPAPAP

SEQ ID NO: 5136 - protein, 13 aa, synthetic construct
PAPAPAPAPAPAP

SEQ ID NO: 5137 - protein, 6 aa, synthetic construct
GGSGGG

SEQ ID NO: 5138 - protein, 6 aa, synthetic construct
GGGGGS

SEQ ID NO: 5139 - protein, 6 aa, synthetic construct
GGSGSS

SEQ ID NO: 5140 - protein, 6 aa, synthetic construct
GSSGGS

SEQ ID NO: 5141 - protein, 8 aa, synthetic construct
GGSEAAAK

SEQ ID NO: 5142 - protein, 8 aa, synthetic construct
EAAAKGGS

SEQ ID NO: 5143 - protein, 6 aa, synthetic construct
GGSPAP

SEQ ID NO: 5144 - protein, 6 aa, synthetic construct
PAPGGS

SEQ ID NO: 5145 - protein, 6 aa, synthetic construct
GGGGSS

SEQ ID NO: 5146 - protein, 6 aa, synthetic construct
GSSGGG

SEQ ID NO: 5147 - protein, 8 aa, synthetic construct
GGGEAAAK

SEQ ID NO: 5148 - protein, 8 aa, synthetic construct
EAAAKGGG

SEQ ID NO: 5149 - protein, 6 aa, synthetic construct
GGGPAP

SEQ ID NO: 5150 - protein, 6 aa, synthetic construct
PAPGGG

SEQ ID NO: 5151 - protein, 8 aa, synthetic construct
GSSEAAAK

SEQ ID NO: 5152 - protein, 8 aa, synthetic construct
EAAAKGSS

SEQ ID NO: 5153 - protein, 6 aa, synthetic construct
GSSPAP

SEQ ID NO: 5154 - protein, 6 aa, synthetic construct
PAPGSS

SEQ ID NO: 5155 - protein, 8 aa, synthetic construct
EAAAKPAP

SEQ ID NO: 5156 - protein, 8 aa, synthetic construct
PAPEAAAK

SEQ ID NO: 5157 - protein, 9 aa, synthetic construct
GGSGGGGSS

SEQ ID NO: 5158 - protein, 9 aa, synthetic construct
GGSGSSGGG

SEQ ID NO: 5159 - protein, 9 aa, synthetic construct
GGGGGSGSS

SEQ ID NO: 5160 - protein, 9 aa, synthetic construct
GGGGSSGGS

SEQ ID NO: 5161 - protein, 9 aa, synthetic construct
GSSGGSGGG

SEQ ID NO: 5162 - protein, 9 aa, synthetic construct
GSSGGGGGS

SEQ ID NO: 5163 - protein, 11 aa, synthetic construct
GGSGGGEAAAK

SEQ ID NO: 5164 - protein, 11 aa, synthetic construct
GGSEAAAKGGG

SEQ ID NO: 5165 - protein, 11 aa, synthetic construct
GGGGGSEAAAK

SEQ ID NO: 5166 - protein, 11 aa, synthetic construct
GGGEAAAKGGS

SEQ ID NO: 5167 - protein, 11 aa, synthetic construct
EAAAKGGSGGG

SEQ ID NO: 5168 - protein, 11 aa, synthetic construct
EAAAKGGGGGS

SEQ ID NO: 5169 - protein, 9 aa, synthetic construct
GGSGGGPAP

SEQ ID NO: 5170 - protein, 9 aa, synthetic construct
GGSPAPGGG

SEQ ID NO: 5171 - protein, 9 aa, synthetic construct
GGGGGSPAP

SEQ ID NO: 5172 - protein, 9 aa, synthetic construct
GGGPAPGGS

SEQ ID NO: 5173 - protein, 9 aa, synthetic construct
PAPGGSGGG

SEQ ID NO: 5174 - protein, 9 aa, synthetic construct
PAPGGGGGS

SEQ ID NO: 5175 - protein, 11 aa, synthetic construct
GGSGSSEAAAK

SEQ ID NO: 5176 - protein, 11 aa, synthetic construct
GGSEAAAKGSS

SEQ ID NO: 5177 - protein, 11 aa, synthetic construct
GSSGGSEAAAK

SEQ ID NO: 5178 - protein, 11 aa, synthetic construct
GSSEAAAKGGS

SEQ ID NO: 5179 - protein, 11 aa, synthetic construct
EAAAKGGSGSS

SEQ ID NO: 5180 - protein, 11 aa, synthetic construct
EAAAKGSSGGS

SEQ ID NO: 5181 - protein, 9 aa, synthetic construct
GGSGSSPAP

SEQ ID NO: 5182 - protein, 9 aa, synthetic construct
GGSPAPGSS

SEQ ID NO: 5183 - protein, 9 aa, synthetic construct
GSSGGSPAP

SEQ ID NO: 5184 - protein, 9 aa, synthetic construct
GSSPAPGGS

SEQ ID NO: 5185 - protein, 9 aa, synthetic construct
PAPGGSGSS

SEQ ID NO: 5186 - protein, 9 aa, synthetic construct
PAPGSSGGS

SEQ ID NO: 5187 - protein, 11 aa, synthetic construct
GGSEAAAKPAP

SEQ ID NO: 5188 - protein, 11 aa, synthetic construct
GGSPAPEAAAK

SEQ ID NO: 5189 - protein, 11 aa, synthetic construct
EAAAKGGSPAP

SEQ ID NO: 5190 - protein, 11 aa, synthetic construct
EAAAKPAPGGS

SEQ ID NO: 5191 - protein, 11 aa, synthetic construct
PAPGGSEAAAK

SEQ ID NO: 5192 - protein, 11 aa, synthetic construct
PAPEAAAKGGS

SEQ ID NO: 5193 - protein, 11 aa, synthetic construct
GGGGSSEAAAK

SEQ ID NO: 5194 - protein, 11 aa, synthetic construct
GGGEAAAKGSS

SEQ ID NO: 5195 - protein, 11 aa, synthetic construct
GSSGGGEAAAK

SEQ ID NO: 5196 - protein, 11 aa, synthetic construct
GSSEAAAKGGG

SEQ ID NO: 5197 - protein, 11 aa, synthetic construct
EAAAKGGGGSS

SEQ ID NO: 5198 - protein, 11 aa, synthetic construct
EAAAKGSSGGG

SEQ ID NO: 5199 - protein, 9 aa, synthetic construct
GGGGSSPAP

SEQ ID NO: 5200 - protein, 9 aa, synthetic construct
GGGPAPGSS

SEQ ID NO: 5201 - protein, 9 aa, synthetic construct
GSSGGGPAP

SEQ ID NO: 5202 - protein, 9 aa, synthetic construct
GSSPAPGGG

SEQ ID NO: 5203 - protein, 9 aa, synthetic construct
PAPGGGGSS

SEQ ID NO: 5204 - protein, 9 aa, synthetic construct
PAPGSSGGG

SEQ ID NO: 5205 - protein, 11 aa, synthetic construct
GGGEAAAKPAP

SEQ ID NO: 5206 - protein, 11 aa, synthetic construct
GGGPAPEAAAK

SEQ ID NO: 5207 - protein, 11 aa, synthetic construct
EAAAKGGGPAP

SEQ ID NO: 5208 - protein, 11 aa, synthetic construct
EAAAKPAPGGG

SEQ ID NO: 5209 - protein, 11 aa, synthetic construct
PAPGGGEAAAK

SEQ ID NO: 5210 - protein, 11 aa, synthetic construct
PAPEAAAKGGG

SEQ ID NO: 5211 - protein, 11 aa, synthetic construct
GSSEAAAKPAP

SEQ ID NO: 5212 - protein, 11 aa, synthetic construct
GSSPAPEAAAK

SEQ ID NO: 5213 - protein, 11 aa, synthetic construct
EAAAKGSSPAP

SEQ ID NO: 5214 - protein, 11 aa, synthetic construct
EAAAKPAPGSS

SEQ ID NO: 5215 - protein, 11 aa, synthetic construct
PAPGSSEAAAK

SEQ ID NO: 5216 - protein, 11 aa, synthetic construct
PAPEAAAKGSS

SEQ ID NO: 5217 - protein, 46 aa, synthetic construct
AEAAAKEAAAKEAAAKEAAAKALEAEAAAKEAAAKEAAAKEAAAKA

SEQ ID NO: 5218 - protein, 15 aa, synthetic construct
GGGGSEAAAKGGGGS

SEQ ID NO: 5219 - protein, 15 aa, synthetic construct
EAAAKGGGGSEAAAK

SEQ ID NO: 5220 - protein, 16 aa, synthetic construct
SGSETPGTSESATPES

SEQ ID NO: 5221 - protein, 12 aa, synthetic construct
GSAGSAAGSGEF

SEQ ID NO: 5222 - protein, 33 aa, synthetic construct; identical to SEQ ID NO: 5006

SEQ ID NO: 5223 - protein, 30 aa, synthetic construct
AHFKISGEKRPSTDPGKKAKNPKKKKKKDP

SEQ ID NO: 5224 - protein, 12 aa, synthetic construct
AHRAKKMSKTHA

SEQ ID NO: 5225 - protein, 14 aa, synthetic construct
ASPEYVNLPINGNG

SEQ ID NO: 5226 - protein, 7 aa, synthetic construct
CTKRPRW

SEQ ID NO: 5227 - protein, 16 aa, synthetic construct
DKAKRVSRNKSEKKRR

SEQ ID NO: 5228 - protein, 15 aa, synthetic construct
EELRLKEELLKGIYA

SEQ ID NO: 5229 - protein, 16 aa, synthetic construct
EEQLRRRKNSRLNNTG

SEQ ID NO: 5230 - protein, 24 aa, synthetic construct
EVLKVIRTGKRKKKAWKRMVTKVC

SEQ ID NO: 5231 - protein, 15 aa, synthetic construct
HHHHHHHHHHHHQPH

SEQ ID NO: 5232 - protein, 17 aa, synthetic construct
HKKKHPDASVNFSEFSK

SEQ ID NO: 5233 - protein, 6 aa, synthetic construct
HKRTKK

SEQ ID NO: 5234 - protein, 29 aa, synthetic construct
IINGRKLKLKKSRRRSSQTSNNSFTSRRS

SEQ ID NO: 5235 - protein, 8 aa, synthetic construct
KAEQERRK

SEQ ID NO: 5236 - protein, 18 aa, synthetic construct
KEKRKRREELFIEQKKRK

SEQ ID NO: 5237 - protein, 14 aa, synthetic construct
KKGKDEWFSRGKKP

SEQ ID NO: 5238 - protein, 12 aa, synthetic construct
KKGPSVQKRKKT

SEQ ID NO: 5239 - protein, 16 aa, synthetic construct
KKKTVINDLLHYKKEK

SEQ ID NO: 5240 - protein, 17 aa, synthetic construct
KKNGGKGKNKPSAKIKK

SEQ ID NO: 5241 - protein, 13 aa, synthetic construct
KKPKWDDFKKKKK

SEQ ID NO: 5242 - protein, 6 aa, synthetic construct
KKRKKD

SEQ ID NO: 5243 - protein, 9 aa, synthetic construct
KKRRKRRRK

SEQ ID NO: 5244 - protein, 9 aa, synthetic construct
KKRRRRARK

SEQ ID NO: 5245 - protein, 7 aa, synthetic construct
KKSKRGR

SEQ ID NO: 5246 - protein, 8 aa, synthetic construct
KKSRKRGS

SEQ ID NO: 5247 - protein, 17 aa, synthetic construct
KKSTALSRELGKIMRRR

SEQ ID NO: 5248 - protein, 17 aa, synthetic construct
KKSYQDPEIIAHSRPRK

SEQ ID NO: 5249 - protein, 17 aa, synthetic construct
KKTGKNRKLKSKRVKTR

SEQ ID NO: 5250 - protein, 17 aa, synthetic construct
KKVSIAGQSGKLWRWKR

SEQ ID NO: 5251 - protein, 20 aa, synthetic construct
KKYENVVIKRSPRKRGRPRK

SEQ ID NO: 5252 - protein, 6 aa, synthetic construct
KNKKRK

SEQ ID NO: 5253 - protein, 6 aa, synthetic construct
KPKKKR

SEQ ID NO: 5254 - protein, 19 aa, synthetic construct
KRAMKDDSHGNSTSPKRRK

SEQ ID NO: 5255 - protein, 17 aa, synthetic construct
KRANSNLVAAYEKAKKK

SEQ ID NO: 5256 - protein, 22 aa, synthetic construct
KRASEDTTSGSPPKKSSAGPKR

SEQ ID NO: 5257 - protein, 16 aa, synthetic construct
KRFKRRWMVRKMKTKK

SEQ ID NO: 5258 - protein, 16 aa, synthetic construct
KRGLNSSFETSPKKVK

SEQ ID NO: 5259 - protein, 20 aa, synthetic construct
KRGNSSIGPNDLSKRKQRKK

SEQ ID NO: 5260 - protein, 23 aa, synthetic construct
KRIHSVSLSQSQIDPSKKVKRAK

SEQ ID NO: 5261 - protein, 15 aa, synthetic construct
KRKGKLKNKGSKRKK

SEQ ID NO: 5262 - protein, 13 aa, synthetic construct
KRRRRRRREKRKR

SEQ ID NO: 5263 - protein, 18 aa, synthetic construct
KRSNDRTYSPEEEKQRRA

SEQ ID NO: 5264 - protein, 21 aa, synthetic construct
KRTVATNGDASGAHRAKKMSK

SEQ ID NO: 5265 - protein, 20 aa, synthetic construct
KRVYNKGEDEQEHLPKGKKR

SEQ ID NO: 5266 - protein, 18 aa, synthetic construct
KSGKAPRRRAVSMDNSNK

SEQ ID NO: 5267 - protein, 19 aa, synthetic construct
KVNFLDMSLDDIIIYKELE

SEQ ID NO: 5268 - protein, 15 aa, synthetic construct
KVQHRIAKKTTRRRR

SEQ ID NO: 5269 - protein, 8 aa, synthetic construct
LSPSLSPL

SEQ ID NO: 5270 - protein, 30 aa, synthetic construct; identical to SEQ ID NO: 5009

SEQ ID NO: 5271 - protein, 52 aa, synthetic construct
MPQNEYIELHRKRYGYRLDYHEKKRKKESREAHERSKKAKKMIGLKAKLYHK

SEQ ID NO: 5272 - protein, 10 aa, synthetic construct
MVQLRPRASR

SEQ ID NO: 5273 - protein, 24 aa, synthetic construct
NNKLLAKRRKGGASPKDDPMDDIK

SEQ ID NO: 5274 - protein, 20 aa, synthetic construct
NYKRPMDGTYGPPAKRHEGE

SEQ ID NO: 5275 - protein, 19 aa, synthetic construct
PDTKRAKLDSSETTMVKKK

SEQ ID NO: 5276 - protein, 7 aa, synthetic construct
PEKRTKI

SEQ ID NO: 5277 - protein, 8 aa, synthetic construct
PGGRGKKK

SEQ ID NO: 5278 - protein, 18 aa, synthetic construct
PGKMDKGEHRQERRDRPY

SEQ ID NO: 5279 - protein, 11 aa, synthetic construct
PKKGDKYDKTD

SEQ ID NO: 5280 - protein, 7 aa, synthetic construct
PKKKSRK

SEQ ID NO: 5281 - protein, 7 aa, synthetic construct
PKKNKPE

SEQ ID NO: 5282 - protein, 7 aa, synthetic construct
PKKRAKV

SEQ ID NO: 5283 - protein, 9 aa, synthetic construct
PKPKKLKVE

SEQ ID NO: 5284 - protein, 7 aa, synthetic construct
PKRGRGR

SEQ ID NO: 5285 - protein, 9 aa, synthetic construct
PKRRLVDDA

SEQ ID NO: 5286 - protein, 7 aa, synthetic construct
PKRRRTY

SEQ ID NO: 5287 - protein, 6 aa, synthetic construct
PLFKRR

SEQ ID NO: 5288 - protein, 7 aa, synthetic construct
PLRKAKR

SEQ ID NO: 5289 - protein, 9 aa, synthetic construct
PPAKRKCIF

SEQ ID NO: 5290 - protein, 8 aa, synthetic construct
PPARRRRL

SEQ ID NO: 5291 - protein, 8 aa, synthetic construct
PPKKKRKV

SEQ ID NO: 5292 - protein, 10 aa, synthetic construct
PPNKRMKVKH

SEQ ID NO: 5293 - protein, 13 aa, synthetic construct
PPRIYPQLPSAPT

SEQ ID NO: 5294 - protein, 13 aa, synthetic construct
PQRSPFPKSSVKR

SEQ ID NO: 5295 - protein, 8 aa, synthetic construct
PRPRKVPR

SEQ ID NO: 5296 - protein, 9 aa, synthetic construct
PRRRVQRKR

SEQ ID NO: 5297 - protein, 7 aa, synthetic construct
PRRVRLK

SEQ ID NO: 5298 - protein, 7 aa, synthetic construct
PSRKRPR

SEQ ID NO: 5299 - protein, 8 aa, synthetic construct
PSSKKRKV

SEQ ID NO: 5300 - protein, 7 aa, synthetic construct
PTKKRVK

SEQ ID NO: 5301 - protein, 9 aa, synthetic construct
QRPGPYDRP

SEQ ID NO: 5302 - protein, 18 aa, synthetic construct
RGKGGKGLGKGGAKRHRK

SEQ ID NO: 5303 - protein, 24 aa, synthetic construct
RKAGKGGGGHKTTKKRSAKDEKVP

SEQ ID NO: 5304 - protein, 9 aa, synthetic construct
RKIKLKRAK

SEQ ID NO: 5305 - protein, 9 aa, synthetic construct
RKIKRKRAK

SEQ ID NO: 5306 - protein, 17 aa, synthetic construct
RKKEAPGPREELRSRGR

SEQ ID NO: 5307 - protein, 7 aa, synthetic construct
RKKRKGK

SEQ ID NO: 5308 - protein, 9 aa, synthetic construct
RKKRRQRRR

SEQ ID NO: 5309 - protein, 25 aa, synthetic construct
RKKSIPLSIKNLKRKHKRKKNKITR

SEQ ID NO: 5310 - protein, 20 aa, synthetic construct
RKLVKPKNTKMKTKLRTNPY

SEQ ID NO: 5311 - protein, 16 aa, synthetic construct
RKRLILSDKGQLDWKK

SEQ ID NO: 5312 - protein, 7 aa, synthetic construct
RKRLKSK

SEQ ID NO: 5313 - protein, 9 aa, synthetic construct
RKRRVRDNM

SEQ ID NO: 5314 - protein, 22 aa, synthetic construct
RKRSPKDKKEKDLDGAGKRRKT

SEQ ID NO: 5315 - protein, 22 aa, synthetic construct
RKRTPRVDGQTGENDMNKRRRK

SEQ ID NO: 5316 - protein, 10 aa, synthetic construct
RLPVRRRRRR

SEQ ID NO: 5317 - protein, 10 aa, synthetic construct
RLRFRKPKSK

SEQ ID NO: 5318 - protein, 6 aa, synthetic construct
RQQRKR

SEQ ID NO: 5319 - protein, 16 aa, synthetic construct
RRDLNSSFETSPKKVK

SEQ ID NO: 5320 - protein, 8 aa, synthetic construct
RRDRAKLR

SEQ ID NO: 5321 - protein, 8 aa, synthetic construct
RRGDGRRR

SEQ ID NO: 5322 - protein, 11 aa, synthetic construct
RRGRKRKAEKQ

SEQ ID NO: 5323 - protein, 6 aa, synthetic construct
RRKKRR

SEQ ID NO: 5324 - protein, 19 aa, synthetic construct
RRKRSKSEDMDSVESKRRR

SEQ ID NO: 5325 - protein, 6 aa, synthetic construct
RRKRSR

SEQ ID NO: 5326 - protein, 14 aa, synthetic construct
RRPKGKTLQKRKPK

SEQ ID NO: 5327 - protein, 18 aa, synthetic construct
RRRGFERFGPDNMGRKRK

SEQ ID NO: 5328 - protein, 15 aa, synthetic construct
RRRGKNKVAAQNCRK

SEQ ID NO: 5329 - protein, 6 aa, synthetic construct
RRRKRR

SEQ ID NO: 5330 - protein, 14 aa, synthetic construct
RRRQKQKGGASRRR

SEQ ID NO: 5331 - protein, 13 aa, synthetic construct
RRRREGPRARRRR

SEQ ID NO: 5332 - protein, 61 aa, synthetic construct
RRTIRLKLVYDKCDRSCKIQKKNRNKCQYCRFHKCLSVGMSHNAIRFGRMPRSEKAKLKAE

SEQ ID NO: 5333 - protein, 17 aa, synthetic construct
RRVPQRKEVSRCRKCRK

SEQ ID NO: 5334 - protein, 32 aa, synthetic construct
RVGGRRQAVECIEDLLNEPGQPLDLSCKRPRP

SEQ ID NO: 5335 - protein, 9 aa, synthetic construct
RVVKLRIAP

SEQ ID NO: 5336 - protein, 6 aa, synthetic construct
RVVRRR

SEQ ID NO: 5337 - protein, 12 aa, synthetic construct
SKRKTKISRKTR

SEQ ID NO: 5338 - protein, 16 aa, synthetic construct
SYVKTVPNRTRTYIKL

SEQ ID NO: 5339 - protein, 12 aa, synthetic construct
TGKNEAKKRKIA

SEQ ID NO: 5340 - protein, 30 aa, synthetic construct
TLSPASSPSSVSCPVIPASTDESPGSALNI

SEQ ID NO: 5341 - protein, 12 aa, synthetic construct
VSKKQRTGKKIH

SEQ ID NO: 5342 - protein, 9 aa, synthetic construct
SPKKKRKVE

SEQ ID NO: 5343 - protein, 19 aa, synthetic construct
KRTADGSEFESPKKKRKVE

SEQ ID NO: 5344 - protein, 9 aa, synthetic construct
PAAKRVKLD

SEQ ID NO: 5345 - protein, 7 aa, synthetic construct
PKKKRKV

SEQ ID NO: 5346 - protein, 30 aa, synthetic construct; identical to SEQ ID NO: 5009

SEQ ID NO: 5347 - protein, 11 aa, synthetic construct
SPKKKRKVEAS

SEQ ID NO: 5348 - protein, 16 aa, synthetic construct
MAPKKKRKVGIHRGVP

SEQ ID NO: 5349 - protein, 29 aa, synthetic construct
KRTADGSEFEKRTADGSEFESPKKKAKVE

SEQ ID NO: 5350 - protein, 10 aa, synthetic construct
KRTADGSEFE

SEQ ID NO: 5351 - protein, 19 aa, synthetic construct
KRTADGSEFESPKKKAKVE

SEQ ID NO: 5352-6000 - skipped (649 entries)

SEQ ID NO: 6001 - protein, 2090 aa, synthetic construct
MPAAKRVKLDGGDKKYSIGLDIGTNSVGWAVITDEYKVPSKKFKVLGNTDRHSIKKNLIGALLFDSGETAEATRLKRTARRRYTRRKNRICYLQEIFSNEMAKVDDSFFHRLEESFLVEEDKKHERHPIFGNIVDEVAYHEKYPTIYHLRKKLVDSTDKADLRLIYLALAHMIKFRGHFLIEGDLNPDNSDVDKLFIQLVQTYNQLFEENPINASGVDAKAILSARLSKSRRLENLIAQLPGEKKNGLFGNLIALSLGLTPNFKSNFDLAEDAKLQLSKDTYDDDLDNLLAQIGDQYADLFLAAKNLSDAILLSDILRVNTEITKAPLSASMIKRYDEHHQDLTLLKALVRQQLPEKYKEIFFDQSKNGYAGYIDGGASQEEFYKFIKPILEKMDGTEELLVKLNREDLLRKQRTFDNGSIPHQIHLGELHAILRRQEDFYPFLKDNREKIEKILTFRIPYYVGPLARGNSRFAWMTRKSEETITPWNFEEVVDKGASAQSFIERMTNFDKNLPNEKVLPKHSLLYEYFTVYNELTKVKYVTEGMRKPAFLSGEQKKAIVDLLFKTNRKVTVKQLKEDYFKKIECFDSVEISGVEDRFNASLGTYHDLLKIIKDKDFLDNEENEDILEDIVLTLTLFEDREMIEERLKTYAHLFDDKVMKQLKRRRYTGWGRLSRKLINGIRDKQSGKTILDFLKSDGFANRNFMQLIHDDSLTFKEDIQKAQVSGQGDSLHEHIANLAGSPAIKKGILQTVKVVDELVKVMGRHKPENIVIEMARENQTTQKGQKNSRERMKRIEEGIKELGSQILKEHPVENTQLQNEKLYLYYLQNGRDMYVDQELDINRLSDYDVDHIVPQSFLKDDSIDNKVLTRSDKARGKSDNVPSEEVVKKMKNYWRQLLNAKLITQRKFDNLTKAERGGLSELDKAGFIKRQLVETRQITKHVAQILDSRMNTKYDENDKLIREVKVITLKSKLVSDFRKDFQFYKVREINNYHHAHDAYLNAVVGTALIKKYPKLESEFVYGDYKVYDVRKMIAKSEQEIGKATAKYFFYSNIMNFFKTEITLANGEIRKRPLIETNGETGEIVWDKGRDFATVRKVLSMPQVNIVKKTEVQTGGFSKESILPKRNSDKLIARKKDWDPKKYGGFDSPTVAYSVLVVAKVEKGKSKKLKSVKELLGITIMERSSFEKNPIDFLEAKGYKEVKKDLIIKLPKYSLFELENGRKRMLASAGELQKGNELALPSKYVNFLYLASHYEKLKGSPEDNEQKQLFVEQHKHYLDEIIEQISEFSKRVILADANLDKVLSAYNKHRDKPIREQAENIIHLFTLTNLGAPAAFKYFDTTIDRKRYTSTKEVLDATLIHQSITGLYETRIDLSQLGGDGGGGSGGTAPLEEEYRLFLEAPIQNVTLLEQWKREIPKVWAEINPPGLASTQAPIHVQLLSTALPVRVRQYPITLEAKRSLRETIRKFRAAGILRPVHSPWNTPLLPVRKSGTSEYRMVQDLREVNKRVETIHPTVPNPYTLLSLLPPDRIWYSVLDLKDAFFCIPLAPESQLIFAFEWADAEEGESGQLTWTRLPQGFKNSPTLFNEALNRDLQGFRLDHPSVSLLQYVDDLLIAADTQAACLSATRDLLMTLAELGYRVSGKKAQLCQEEVTYLGFKIHKGSRSLSNSRTQAILQIPVPKTKRQVREFLGKIGYCRLFIPGFAELAQPLYAATRPGNDPLVWGEKEEEAFQSLKLALTQPPALALPSLDKPFQLFVEETSGAAKGVLTQALGPWKRPVAYLSKRLDPVAAGWPRCLRAIAAAALLTREASKLTFGQDIEITSSHNLESLLRSPPDKWLTNARITQYQVLLLDPPRVRFKQTAALNPATLLPETDDTLPIHHCLDTLDSLTSTRPDLTDQPLAQAEATLFTDGSSYIRDGKRYAGAAVVTLDSVIWAEPLPIGTSAQKAELIALTKALEWSKDKSVNIYTDSRYAFATLHVHGMIYRERGWLTAGGKAIKNAPEILALLTAVWLPKRVAVMHCKGHQKDDAPTSTGNRRADEVAREVAIRPLSTQATISAGKRTADGSEFEKRTADGSEFESPKKKAKVE

SEQ ID NO: 6002 - protein, 2094 aa, synthetic construct
MPAAKRVKLDGGDKKYSIGLDIGTNSVGWAVITDEYKVPSKKFKVLGNTDRHSIKKNLIGALLFDSGETAEATRLKRTARRRYTRRKNRICYLQEIFSNEMAKVDDSFFHRLEESFLVEEDKKHERHPIFGNIVDEVAYHEKYPTIYHLRKKLVDSTDKADLRLIYLALAHMIKFRGHFLIEGDLNPDNSDVDKLFIQLVQTYNQLFEENPINASGVDAKAILSARLSKSRRLENLIAQLPGEKKNGLFGNLIALSLGLTPNFKSNFDLAEDAKLQLSKDTYDDDLDNLLAQIGDQYADLFLAAKNLSDAILLSDILRVNTEITKAPLSASMIKRYDEHHQDLTLLKALVRQQLPEKYKEIFFDQSKNGYAGYIDGGASQEEFYKFIKPILEKMDGTEELLVKLNREDLLRKQRTFDNGSIPHQIHLGELHAILRRQEDFYPFLKDNREKIEKILTFRIPYYVGPLARGNSRFAWMTRKSEETITPWNFEEVVDKGASAQSFIERMTNFDKNLPNEKVLPKHSLLYEYFTVYNELTKVKYVTEGMRKPAFLSGEQKKAIVDLLFKTNRKVTVKQLKEDYFKKIECFDSVEISGVEDRFNASLGTYHDLLKIIKDKDFLDNEENEDILEDIVLTLTLFEDREMIEERLKTYAHLFDDKVMKQLKRRRYTGWGRLSRKLINGIRDKQSGKTILDFLKSDGFANRNFMQLIHDDSLTFKEDIQKAQVSGQGDSLHEHIANLAGSPAIKKGILQTVKVVDELVKVMGRHKPENIVIEMARENQTTQKGQKNSRERMKRIEEGIKELGSQILKEHPVENTQLQNEKLYLYYLQNGRDMYVDQELDINRLSDYDVDHIVPQSFLKDDSIDNKVLTRSDKARGKSDNVPSEEVVKKMKNYWRQLLNAKLITQRKFDNLTKAERGGLSELDKAGFIKRQLVETRQITKHVAQILDSRMNTKYDENDKLIREVKVITLKSKLVSDFRKDFQFYKVREINNYHHAHDAYLNAVVGTALIKKYPKLESEFVYGDYKVYDVRKMIAKSEQEIGKATAKYFFYSNIMNFFKTEITLANGEIRKRPLIETNGETGEIVWDKGRDFATVRKVLSMPQVNIVKKTEVQTGGFSKESILPKRNSDKLIARKKDWDPKKYGGFDSPTVAYSVLVVAKVEKGKSKKLKSVKELLGITIMERSSFEKNPIDFLEAKGYKEVKKDLIIKLPKYSLFELENGRKRMLASAGELQKGNELALPSKYVNFLYLASHYEKLKGSPEDNEQKQLFVEQHKHYLDEIIEQISEFSKRVILADANLDKVLSAYNKHRDKPIREQAENIIHLFTLTNLGAPAAFKYFDTTIDRKRYTSTKEVLDATLIHQSITGLYETRIDLSQLGGDGGGGSGGTVSLQDEHRLFDIPVTTSLPDVWLQDFPQAWAETGGLGRAKCQAPIIIDLKPTAVPVSIKQYPMSLEAHMGIRQHIIKFLELGVLRPCRSPWNTPLLPVKKPGTQDYRPVQDLREINKRTVDIHPTVPNPYNLLSTLKPDYSWYTVLDLKDAFFCLPLAPQSQELFAFEWKDPERGISGQLTWTRLPQGFKNSPTLFDEALHRDLTDFRTQHPEVTLLQYVDDLLLAAPTKKACTQGTRHLLQELGEKGYRASAKKAQICQTKVTYLGYILSEGKRWLTPGRIETVARIPPPRNPREVREFLGTAGFCRLWIPGFAELAAPLYALTKESTPFTWQTEHQLAFEALKKALLSAPALGLPDTSKPFTLFLDERQGIAKGVLTQKLGPWKRPVAYLSKKLDPVAAGWPPCLRIMAATAMLVKDSAKLTLGQPLTVITPHTLEAIVRQPPDRWITNARLTHYQALLLDTDRVQFGPPVTLNPATLLPVPENQPSPHDCRQVLAETHGTREDLKDQELPDADHTWYTDGSSYLDSGTRRAGAAVVDGHNTIWAQSLPPGTSAQKAELIALTKALELSKGKKANIYTDSRYAFATAHTHGSIYERRGLLTSEGKEIKNKAEIIALLKALFLPQEVAIIHCPGHQKGQDPVAVGNRQADRVARQAAMAEVLTLATEPDNTSHITAGKRTADGSEFEKRTADGSEFESPKKKAKVE

SEQ ID NO: 6003 - protein, 2079 aa, synthetic construct
MPAAKRVKLDGGDKKYSIGLDIGTNSVGWAVITDEYKVPSKKFKVLGNTDRHSIKKNLIGALLFDSGETAEATRLKRTARRRYTRRKNRICYLQEIFSNEMAKVDDSFFHRLEESFLVEEDKKHERHPIFGNIVDEVAYHEKYPTIYHLRKKLVDSTDKADLRLIYLALAHMIKFRGHFLIEGDLNPDNSDVDKLFIQLVQTYNQLFEENPINASGVDAKAILSARLSKSRRLENLIAQLPGEKKNGLFGNLIALSLGLTPNFKSNFDLAEDAKLQLSKDTYDDDLDNLLAQIGDQYADLFLAAKNLSDAILLSDILRVNTEITKAPLSASMIKRYDEHHQDLTLLKALVRQQLPEKYKEIFFDQSKNGYAGYIDGGASQEEFYKFIKPILEKMDGTEELLVKLNREDLLRKQRTFDNGSIPHQIHLGELHAILRRQEDFYPFLKDNREKIEKILTFRIPYYVGPLARGNSRFAWMTRKSEETITPWNFEEVVDKGASAQSFIERMTNFDKNLPNEKVLPKHSLLYEYFTVYNELTKVKYVTEGMRKPAFLSGEQKKAIVDLLFKTNRKVTVKQLKEDYFKKIECFDSVEISGVEDRFNASLGTYHDLLKIIKDKDFLDNEENEDILEDIVLTLTLFEDREMIEERLKTYAHLFDDKVMKQLKRRRYTGWGRLSRKLINGIRDKQSGKTILDFLKSDGFANRNFMQLIHDDSLTFKEDIQKAQVSGQGDSLHEHIANLAGSPAIKKGILQTVKVVDELVKVMGRHKPENIVIEMARENQTTQKGQKNSRERMKRIEEGIKELGSQILKEHPVENTQLQNEKLYLYYLQNGRDMYVDQELDINRLSDYDVDHIVPQSFLKDDSIDNKVLTRSDKARGKSDNVPSEEVVKKMKNYWRQLLNAKLITQRKFDNLTKAERGGLSELDKAGFIKRQLVETRQITKHVAQILDSRMNTKYDENDKLIREVKVITLKSKLVSDFRKDFQFYKVREINNYHHAHDAYLNAVVGTALIKKYPKLESEFVYGDYKVYDVRKMIAKSEQEIGKATAKYFFYSNIMNFFKTEITLANGEIRKRPLIETNGETGEIVWDKGRDFATVRKVLSMPQVNIVKKTEVQTGGFSKESILPKRNSDKLIARKKDWDPKKYGGFDSPTVAYSVLVVAKVEKGKSKKLKSVKELLGITIMERSSFEKNPIDFLEAKGYKEVKKDLIIKLPKYSLFELENGRKRMLASAGELQKGNELALPSKYVNFLYLASHYEKLKGSPEDNEQKQLFVEQHKHYLDEIIEQISEFSKRVILADANLDKVLSAYNKHRDKPIREQAENIIHLFTLTNLGAPAAFKYFDTTIDRKRYTSTKEVLDATLIHQSITGLYETRIDLSQLGGDGGGGSGGVPWILKKPLELTIKLDLEEQQGTLLNNSILSKKGKEELKQLFEKYSALWQSWENQVGHRRIRPHKIATGTVKPTPQKQYHINPKAKPDIQIVINDLLKQGVLIQKESTMNTPVYPVPKPNGRWRMVLDYRAVNKVTPLIAVQNQHSYGILGSLFKGRYKTTIDLSNGFWAHPIVPEDYWITAFTWQGKQYCWTVLPQGFLNSPGLFTGDVVDLLQGIPNVEVYVDDVYISHDSEKEHLEYLDILFNRLKEAGYIISLKKSNIANSIVDFLGFQITNEGRGLTDTFKEKLENITAPTTLKQLQSILGLLNFARNFIPDFTELIAPLYALIPKSTKNYVPWQIEHSTTLETLITKLNGAEYLQGRKGDKTLIMKVNASYTTGYIRYYNEGEKKPISYVSIVFSKTELKFTELEKLLTTVHKGLLKALDLSMGQNIHVYSPIVSMQNIQKTPQTAKKALASRWLSWLSYLEDPRIRFFYDPQMPALKDLPAVDTGKDNKKHPSNFQHIFYTDGSAITSPTKEGHLNAGMGIVYFINKDGNLQKQQEWSISLGNHTAQFAEIAAFEFALKKCLPLGGNILVVTDSNYVAKAYNEELDVWASNGFVNNRKKPLKHISKWKSVADLKRLRPDVVVTHEPGHQKLDSSPHAYGNNLADQLATQASFKVHAGKRTADGSEFEKRTADGSEFESPKKKAKVE

SEQ ID NO: 6004 - protein, 2087 aa, synthetic construct
MPAAKRVKLDGGDKKYSIGLDIGTNSVGWAVITDEYKVPSKKFKVLGNTDRHSIKKNLIGALLFDSGETAEATRLKRTARRRYTRRKNRICYLQEIFSNEMAKVDDSFFHRLEESFLVEEDKKHERHPIFGNIVDEVAYHEKYPTIYHLRKKLVDSTDKADLRLIYLALAHMIKFRGHFLIEGDLNPDNSDVDKLFIQLVQTYNQLFEENPINASGVDAKAILSARLSKSRRLENLIAQLPGEKKNGLFGNLIALSLGLTPNFKSNFDLAEDAKLQLSKDTYDDDLDNLLAQIGDQYADLFLAAKNLSDAILLSDILRVNTEITKAPLSASMIKRYDEHHQDLTLLKALVRQQLPEKYKEIFFDQSKNGYAGYIDGGASQEEFYKFIKPILEKMDGTEELLVKLNREDLLRKQRTFDNGSIPHQIHLGELHAILRRQEDFYPFLKDNREKIEKILTFRIPYYVGPLARGNSRFAWMTRKSEETITPWNFEEVVDKGASAQSFIERMTNFDKNLPNEKVLPKHSLLYEYFTVYNELTKVKYVTEGMRKPAFLSGEQKKAIVDLLFKTNRKVTVKQLKEDYFKKIECFDSVEISGVEDRFNASLGTYHDLLKIIKDKDFLDNEENEDILEDIVLTLTLFEDREMIEERLKTYAHLFDDKVMKQLKRRRYTGWGRLSRKLINGIRDKQSGKTILDFLKSDGFANRNFMQLIHDDSLTFKEDIQKAQVSGQGDSLHEHIANLAGSPAIKKGILQTVKVVDELVKVMGRHKPENIVIEMARENQTTQKGQKNSRERMKRIEEGIKELGSQILKEHPVENTQLQNEKLYLYYLQNGRDMYVDQELDINRLSDYDVDHIVPQSFLKDDSIDNKVLTRSDKARGKSDNVPSEEVVKKMKNYWRQLLNAKLITQRKFDNLTKAERGGLSELDKAGFIKRQLVETRQITKHVAQILDSRMNTKYDENDKLIREVKVITLKSKLVSDFRKDFQFYKVREINNYHHAHDAYLNAVVGTALIKKYPKLESEFVYGDYKVYDVRKMIAKSEQEIGKATAKYFFYSNIMNFFKTEITLANGEIRKRPLIETNGETGEIVWDKGRDFATVRKVLSMPQVNIVKKTEVQTGGFSKESILPKRNSDKLIARKKDWDPKKYGGFDSPTVAYSVLVVAKVEKGKSKKLKSVKELLGITIMERSSFEKNPIDFLEAKGYKEVKKDLIIKLPKYSLFELENGRKRMLASAGELQKGNELALPSKYVNFLYLASHYEKLKGSPEDNEQKQLFVEQHKHYLDEIIEQISEFSKRVILADANLDKVLSAYNKHRDKPIREQAENIIHLFTLTNLGAPAAFKYFDTTIDRKRYTSTKEVLDATLIHQSITGLYETRIDLSQLGGDGGGGSGGTLQLEEEYRLFEPESTQKQEMDIWLKNFPQAWAETGGMGTAHCQAPVLIQLKATATPISIRQYPMPHEAYQGIKPHIRRMLDQGILKPCQSPWNTPLLPVKKPGTEDYRPVQDLREVNKRVEDIHPTVPNPYNLLSTLPPSHPWYTVLDLKDAFFCLRLHSESQLLFAFEWRDPEIGLSGQLTWTRLPQGFKNSPTLFNEALHSDLADFRVRYPALVLLQYVDDLLLAAATRTECLEGTKALLETLGNKGYRASAKKAQICLQEVTYLGYSLKDGQRWLTKARKEAILSIPVPKNSRQVREFLGKAGYCRLFIPGFAELAAPLYPLTRPGTLFQWGTEQQLAFEDIKKALLSSPALGLPDITKPFELFIDENSGFAKGVLVQKLGPWKRPVAYLSKKLDTVASGWPPCLRMVAAIAILVKDAGKLTLGQPLTILTSHPVEALVRQPPNKWLSNARMTHYQAMLLDAERVHFGPTVSLNPATLLPLPSGGNHHDCLQILAETHGTRPDLTDQPLPDADLTWYTDGSSFIRNGEREAGAAVTTESEVIWAAPLPPGTSAQRAELIALTQALKMAEGKKLTVYTDSRYAFATTHVHGEIYRRRGWLTSEGKEIKNKNEILALLEALFLPKRLSIIHCPGHQKGDSPQAKGNRLADDTAKKAATETHSSLTVLPAGKRTADGSEFEKRTADGSEFESPKKKAKVE

SEQ ID NO: 6005 - protein, 2079 aa, synthetic construct
MPAAKRVKLDGGDKKYSIGLDIGTNSVGWAVITDEYKVPSKKFKVLGNTDRHSIKKNLIGALLFDSGETAEATRLKRTARRRYTRRKNRICYLQEIFSNEMAKVDDSFFHRLEESFLVEEDKKHERHPIFGNIVDEVAYHEKYPTIYHLRKKLVDSTDKADLRLIYLALAHMIKFRGHFLIEGDLNPDNSDVDKLFIQLVQTYNQLFEENPINASGVDAKAILSARLSKSRRLENLIAQLPGEKKNGLFGNLIALSLGLTPNFKSNFDLAEDAKLQLSKDTYDDDLDNLLAQIGDQYADLFLAAKNLSDAILLSDILRVNTEITKAPLSASMIKRYDEHHQDLTLLKALVRQQLPEKYKEIFFDQSKNGYAGYIDGGASQEEFYKFIKPILEKMDGTEELLVKLNREDLLRKQRTFDNGSIPHQIHLGELHAILRRQEDFYPFLKDNREKIEKILTFRIPYYVGPLARGNSRFAWMTRKSEETITPWNFEEVVDKGASAQSFIERMTNFDKNLPNEKVLPKHSLLYEYFTVYNELTKVKYVTEGMRKPAFLSGEQKKAIVDLLFKTNRKVTVKQLKEDYFKKIECFDSVEISGVEDRFNASLGTYHDLLKIIKDKDFLDNEENEDILEDIVLTLTLFEDREMIEERLKTYAHLFDDKVMKQLKRRRYTGWGRLSRKLINGIRDKQSGKTILDFLKSDGFANRNFMQLIHDDSLTFKEDIQKAQVSGQGDSLHEHIANLAGSPAIKKGILQTVKVVDELVKVMGRHKPENIVIEMARENQTTQKGQKNSRERMKRIEEGIKELGSQILKEHPVENTQLQNEKLYLYYLQNGRDMYVDQELDINRLSDYDVDHIVPQSFLKDDSIDNKVLTRSDKARGKSDNVPSEEVVKKMKNYWRQLLNAKLITQRKFDNLTKAERGGLSELDKAGFIKRQLVETRQITKHVAQILDSRMNTKYDENDKLIREVKVITLKSKLVSDFRKDFQFYKVREINNYHHAHDAYLNAVVGTALIKKYPKLESEFVYGDYKVYDVRKMIAKSEQEIGKATAKYFFYSNIMNFFKTEITLANGEIRKRPLIETNGETGEIVWDKGRDFATVRKVLSMPQVNIVKKTEVQTGGFSKESILPKRNSDKLIARKKDWDPKKYGGFDSPTVAYSVLVVAKVEKGKSKKLKSVKELLGITIMERSSFEKNPIDFLEAKGYKEVKKDLIIKLPKYSLFELENGRKRMLASAGELQKGNELALPSKYVNFLYLASHYEKLKGSPEDNEQKQLFVEQHKHYLDEIIEQISEFSKRVILADANLDKVLSAYNKHRDKPIREQAENIIHLFTLTNLGAPAAFKYFDTTIDRKRYTSTKEVLDATLIHQSITGLYETRIDLSQLGGDGGGGSGGVPWLTQQPLQLTILVPLQEYQEKILSKTALPEDQKQQLKTLFVKYDNLWQHWENQVGHRKIRPHNIATGDYPPRPQKQYPINPKAKPSIQIVIDDLLKQGVLTPQNSTMNTPVYPVPKPDGRWRMVLDYREVNKTIPLTAAQNQHSAGILATIVRQKYKTTLDLANGFWAHPITPESYWLTAFTWQGKQYCWTRLPQGFLNSPALFNADVVDLLKEIPNVQVYVDDIYLSHDDPKEHVQQLEKVFQILLQAGYVVSLKKSEIGQKTVEFLGFNITKEGRGLTDTFKTKLLNITPPKDLKQLQSILGKLNFARNFIPNFAELVQPLYNLIAPAKGKYIEWSEENTKQLNMVIEALNTASNLEERLPEQRLVIKVNTSPSAGYVRYYNETGKKPIMYLNYVFSKAELKFSMLEKLLTTMHKALIKAMDLAMGQEILVYSPIVSMTKIQKTPLPERKALPIRWITWMTYLEDPRIQFHYDKTLPELKHIPDVYTSSQSPVKHPSQYEGVFYTDGSAIKSPDPTKSNNAGMGIVHATYKPEYQVLNQWSIPLGNHTAQMAEIAAVEFACKKALKIPGPVLVITDSFYVAESANKELPYWKSNGFVNNKKKPLKHISKWKSIAECLSMKPDITIQHEKGISLQIPVFILKGNALADKLATQGSYVVNAGKRTADGSEFEKRTADGSEFESPKKKAKVE

SEQ ID NO: 6006 - protein, 2210 aa, synthetic construct
MPAAKRVKLDGGDKKYSIGLDIGTNSVGWAVITDEYKVPSKKFKVLGNTDRHSIKKNLIGALLFDSGETAEATRLKRTARRRYTRRKNRICYLQEIFSNEMAKVDDSFFHRLEESFLVEEDKKHERHPIFGNIVDEVAYHEKYPTIYHLRKKLVDSTDKADLRLIYLALAHMIKFRGHFLIEGDLNPDNSDVDKLFIQLVQTYNQLFEENPINASGVDAKAILSARLSKSRRLENLIAQLPGEKKNGLFGNLIALSLGLTPNFKSNFDLAEDAKLQLSKDTYDDDLDNLLAQIGDQYADLFLAAKNLSDAILLSDILRVNTEITKAPLSASMIKRYDEHHQDLTLLKALVRQQLPEKYKEIFFDQSKNGYAGYIDGGASQEEFYKFIKPILEKMDGTEELLVKLNREDLLRKQRTFDNGSIPHQIHLGELHAILRRQEDFYPFLKDNREKIEKILTFRIPYYVGPLARGNSRFAWMTRKSEETITPWNFEEVVDKGASAQSFIERMTNFDKNLPNEKVLPKHSLLYEYFTVYNELTKVKYVTEGMRKPAFLSGEQKKAIVDLLFKTNRKVTVKQLKEDYFKKIECFDSVEISGVEDRFNASLGTYHDLLKIIKDKDFLDNEENEDILEDIVLTLTLFEDREMIEERLKTYAHLFDDKVMKQLKRRRYTGWGRLSRKLINGIRDKQSGKTILDFLKSDGFANRNFMQLIHDDSLTFKEDIQKAQVSGQGDSLHEHIANLAGSPAIKKGILQTVKVVDELVKVMGRHKPENIVIEMARENQTTQKGQKNSRERMKRIEEGIKELGSQILKEHPVENTQLQNEKLYLYYLQNGRDMYVDQELDINRLSDYDVDHIVPQSFLKDDSIDNKVLTRSDKARGKSDNVPSEEVVKKMKNYWRQLLNAKLITQRKFDNLTKAERGGLSELDKAGFIKRQLVETRQITKHVAQILDSRMNTKYDENDKLIREVKVITLKSKLVSDFRKDFQFYKVREINNYHHAHDAYLNAVVGTALIKKYPKLESEFVYGDYKVYDVRKMIAKSEQEIGKATAKYFFYSNIMNFFKTEITLANGEIRKRPLIETNGETGEIVWDKGRDFATVRKVLSMPQVNIVKKTEVQTGGFSKESILPKRNSDKLIARKKDWDPKKYGGFDSPTVAYSVLVVAKVEKGKSKKLKSVKELLGITIMERSSFEKNPIDFLEAKGYKEVKKDLIIKLPKYSLFELENGRKRMLASAGELQKGNELALPSKYVNFLYLASHYEKLKGSPEDNEQKQLFVEQHKHYLDEIIEQISEFSKRVILADANLDKVLSAYNKHRDKPIREQAENIIHLFTLTNLGAPAAFKYFDTTIDRKRYTSTKEVLDATLIHQSITGLYETRIDLSQLGGDGGGGSGGTLGDQGSRGSDPLPEPRVTLTVEGIPTEFLVNTGAEHSVLTKPMGKMGSKRTVVAGATGSKVYPWTTKRLLKIGQKQVTHSFLVIPECPAPLLGRDLLTKLKAQIQFSTEGPQVTWEDRPAMCLVLNLEEEYRLHEKPVPPSIDPSWLQLFPMVWAEKAGMGLANQVPPVVVELKSDASPVAVRQYPMSKEAREGIRPHIQRFLDLGILVPCQSPWNTPLLPVKKPGTNDYRPVQDLREVNKRVQDIHPTVPNPYNLLSSLPPSHTWYSVLDLKDAFFCLKLHPNSQPLFAFEWRDPEKGNTGQLTWTRLPQGFKNSPTLFDEALHRDLASFRALNPQVVMLQYVDDLLVAAPTYRDCKEGTRRLLQELSKLGYRVSAKKAQLCREEVTYLGYLLKGGKRWLTPARKATVMKIPTPTTPRQVREFLGTAGFCRLWIPGFASLAAPLYPLTREKVPFTWTEAHQEAFGRIKEALLSAPALALPDLTKPFALYVDEKEGVARGVLTQTLGPWRRPVAYLSKKLDPVASGWPTCLKAIAAVALLLKDADKLTLGQNVLVIAPHNLESIVRQPPDRWMTNARMTHYQSLLLNERVSFAPPAILNPATLLPVESDDTPIHICSEILAEETGTRPDLRDQPLPGVPAWYTDGSSFIMDGRRQAGAAIVDNKRTVWASNLPEGTSAQKAELIALTQALRLAEGKSINIYTDSRYAFATAHVHGAIYKQRGLLTSAGKDIKNKEEILALLEAIHLPKRVAIIHCPGHQRGTDPVATGNRKADEAAKQAAQSTRILTETTKNAGKRTADGSEFEKRTADGSEFESPKKKAKVE

SEQ ID NO: 6007 - protein, 2210 aa, synthetic construct
MPAAKRVKLDGGDKKYSIGLDIGTNSVGWAVITDEYKVPSKKFKVLGNTDRHSIKKNLIGALLFDSGETAEATRLKRTARRRYTRRKNRICYLQEIFSNEMAKVDDSFFHRLEESFLVEEDKKHERHPIFGNIVDEVAYHEKYPTIYHLRKKLVDSTDKADLRLIYLALAHMIKFRGHFLIEGDLNPDNSDVDKLFIQLVQTYNQLFEENPINASGVDAKAILSARLSKSRRLENLIAQLPGEKKNGLFGNLIALSLGLTPNFKSNFDLAEDAKLQLSKDTYDDDLDNLLAQIGDQYADLFLAAKNLSDAILLSDILRVNTEITKAPLSASMIKRYDEHHQDLTLLKALVRQQLPEKYKEIFFDQSKNGYAGYIDGGASQEEFYKFIKPILEKMDGTEELLVKLNREDLLRKQRTFDNGSIPHQIHLGELHAILRRQEDFYPFLKDNREKIEKILTFRIPYYVGPLARGNSRFAWMTRKSEETITPWNFEEVVDKGASAQSFIERMTNFDKNLPNEKVLPKHSLLYEYFTVYNELTKVKYVTEGMRKPAFLSGEQKKAIVDLLFKTNRKVTVKQLKEDYFKKIECFDSVEISGVEDRFNASLGTYHDLLKIIKDKDFLDNEENEDILEDIVLTLTLFEDREMIEERLKTYAHLFDDKVMKQLKRRRYTGWGRLSRKLINGIRDKQSGKTILDFLKSDGFANRNFMQLIHDDSLTFKEDIQKAQVSGQGDSLHEHIANLAGSPAIKKGILQTVKVVDELVKVMGRHKPENIVIEMARENQTTQKGQKNSRERMKRIEEGIKELGSQILKEHPVENTQLQNEKLYLYYLQNGRDMYVDQELDINRLSDYDVDHIVPQSFLKDDSIDNKVLTRSDKARGKSDNVPSEEVVKKMKNYWRQLLNAKLITQRKFDNLTKAERGGLSELDKAGFIKRQLVETRQITKHVAQILDSRMNTKYDENDKLIREVKVITLKSKLVSDFRKDFQFYKVREINNYHHAHDAYLNAVVGTALIKKYPKLESEFVYGDYKVYDVRKMIAKSEQEIGKATAKYFFYSNIMNFFKTEITLANGEIRKRPLIETNGETGEIVWDKGRDFATVRKVLSMPQVNIVKKTEVQTGGFSKESILPKRNSDKLIARKKDWDPKKYGGFDSPTVAYSVLVVAKVEKGKSKKLKSVKELLGITIMERSSFEKNPIDFLEAKGYKEVKKDLIIKLPKYSLFELENGRKRMLASAGELQKGNELALPSKYVNFLYLASHYEKLKGSPEDNEQKQLFVEQHKHYLDEIIEQISEFSKRVILADANLDKVLSAYNKHRDKPIREQAENIIHLFTLTNLGAPAAFKYFDTTIDRKRYTSTKEVLDATLIHQSITGLYETRIDLSQLGGDGGGGSGGTLGDQGSRGSDPLPEPRVTLTVEGIPTEFLVNTGAEHSVLTKPMGKMGSKRTVVAGATGSKVYPWTTKRLLKIGQKQVTHSFLVIPECPAPLLGRDLLTKLKAQIQFSTEGPQVTWEDRPAMCLVLNLEEEYRLHEKPVPPSIDPSWLQLFPMVWAEKAGMGLANQVPPVVVELKSDASPVAVRQYPMSKEAREGIRPHIQRFLDLGILVPCQSPWNTPLLPVKKPGTNDYRPVQDLREVNKRVQDIHPTVPNPYNLLSSLPPSHTWYSVLDLKDAFFCLKLHPNSQPLFAFEWRDPEKGNTGQLTWTRLPQGFKNSPTLFNEALHRDLASFRALNPQVVMLQYVDDLLVAAPTYRDCKEGTRRLLQELSKLGYRVSAKKAQLCREEVTYLGYLLKGGKRWLTPARKATVMKIPTPTTPRQVREFLGTAGFCRLWIPGFASLAAPLYPLTRPKVPFTWTEAHQEAFGRIKEALLSAPALALPDLTKPFALYVDEKEGVARGVLTQTLGPWRRPVAYLSKKLDPVASGWPTCLKAIAAVALLLKDADKLTLGQNVLVIAPHNLESIVRQPPDRWMTNARMTHYQSLLLNERVSFAPPAILNPATLLPVESDDTPIHICSEILAEETGTRPDLRDQPLPGVPAWYTDGSSFIMDGRRQAGAAIVDNKRTVWASNLPEGTSAQKAELIALTQALRLAEGKSINIYTDSRYAFATAHVHGAIYKQRGWLTSAGKDIKNKEEILALLEAIHLPKRVAIIHCPGHQRGTDPVATGNRKADEAAKQAAQSTRILTETTKNAGKRTADGSEFEKRTADGSEFESPKKKAKVE

SEQ ID NO: 6008 - protein, 2088 aa, synthetic construct
MPAAKRVKLDGGDKKYSIGLDIGTNSVGWAVITDEYKVPSKKFKVLGNTDRHSIKKNLIGALLFDSGETAEATRLKRTARRRYTRRKNRICYLQEIFSNEMAKVDDSFFHRLEESFLVEEDKKHERHPIFGNIVDEVAYHEKYPTIYHLRKKLVDSTDKADLRLIYLALAHMIKFRGHFLIEGDLNPDNSDVDKLFIQLVQTYNQLFEENPINASGVDAKAILSARLSKSRRLENLIAQLPGEKKNGLFGNLIALSLGLTPNFKSNFDLAEDAKLQLSKDTYDDDLDNLLAQIGDQYADLFLAAKNLSDAILLSDILRVNTEITKAPLSASMIKRYDEHHQDLTLLKALVRQQLPEKYKEIFFDQSKNGYAGYIDGGASQEEFYKFIKPILEKMDGTEELLVKLNREDLLRKQRTFDNGSIPHQIHLGELHAILRRQEDFYPFLKDNREKIEKILTFRIPYYVGPLARGNSRFAWMTRKSEETITPWNFEEVVDKGASAQSFIERMTNFDKNLPNEKVLPKHSLLYEYFTVYNELTKVKYVTEGMRKPAFLSGEQKKAIVDLLFKTNRKVTVKQLKEDYFKKIECFDSVEISGVEDRFNASLGTYHDLLKIIKDKDFLDNEENEDILEDIVLTLTLFEDREMIEERLKTYAHLFDDKVMKQLKRRRYTGWGRLSRKLINGIRDKQSGKTILDFLKSDGFANRNFMQLIHDDSLTFKEDIQKAQVSGQGDSLHEHIANLAGSPAIKKGILQTVKVVDELVKVMGRHKPENIVIEMARENQTTQKGQKNSRERMKRIEEGIKELGSQILKEHPVENTQLQNEKLYLYYLQNGRDMYVDQELDINRLSDYDVDHIVPQSFLKDDSIDNKVLTRSDKARGKSDNVPSEEVVKKMKNYWRQLLNAKLITQRKFDNLTKAERGGLSELDKAGFIKRQLVETRQITKHVAQILDSRMNTKYDENDKLIREVKVITLKSKLVSDFRKDFQFYKVREINNYHHAHDAYLNAVVGTALIKKYPKLESEFVYGDYKVYDVRKMIAKSEQEIGKATAKYFFYSNIMNFFKTEITLANGEIRKRPLIETNGETGEIVWDKGRDFATVRKVLSMPQVNIVKKTEVQTGGFSKESILPKRNSDKLIARKKDWDPKKYGGFDSPTVAYSVLVVAKVEKGKSKKLKSVKELLGITIMERSSFEKNPIDFLEAKGYKEVKKDLIIKLPKYSLFELENGRKRMLASAGELQKGNELALPSKYVNFLYLASHYEKLKGSPEDNEQKQLFVEQHKHYLDEIIEQISEFSKRVILADANLDKVLSAYNKHRDKPIREQAENIIHLFTLTNLGAPAAFKYFDTTIDRKRYTSTKEVLDATLIHQSITGLYETRIDLSQLGGDGGGGSGGTLNLEDEYRLYETSAEPEVSPGSTWLSDFPQAWAETGGMGLAVRQAPLIIPLKATSTPVSIKQYPMSQEAKLGIKPHIQRLLDQGILVPCQSPWNTPLLPVKKPGTNDYRPVQDLREVNKRVEDIHPTVPNPYNLLSGLPPSHRWYTVLDLKDAFFCLRLHPTSQPLFAFEWRDPGMGISGQLTWTRLPQGFKNSPTLFNEALHRDLADFRIQHPDLILLQYVDDILLAATSELDCQQGTRALLLTLGNLGYRASAKKAQLCQKQVKYLGYLLKEGQRWLTEARKETVMGQPTPKTPRQLREFLGKAGFCRLFIPGFAEMAAPLYPLTKPGTLFNWGPDQQKAYQEIKQALLTAPALGLPDLTKPFELFVDEKQGYAKGVLTQKLGPWRRPVAYLSKKLDPVAAGWPPCLRMVAAIAVLRKDAGKLTMGQPLVILAPHAVEALVKQPPDRWLSNARMTHYQAMLLDTDRVQFGPVVALNPATLLPLPEEGAPHDCLEILAETHGTRPDLTDQPIPDADHTWYTDGSSFLQEGQRKAGAAVTTETEVIWARALPAGTSAQRAELIALTQALKMAEGKRLNVYTDSRYAFATAHIHGEIYRRRGWLTSEGREIKNKSEILALLKALFLPKRLSIIHCLGHQKGDSAEARGNRLADQAAREAAIKTPPDTSTLLAGKRTADGSEFEKRTADGSEFESPKKKAKVE

SEQ ID NO: 6009 - protein, 2088 aa, synthetic construct
MPAAKRVKLDGGDKKYSIGLDIGTNSVGWAVITDEYKVPSKKFKVLGNTDRHSIKKNLIGALLFDSGETAEATRLKRTARRRYTRRKNRICYLQEIFSNEMAKVDDSFFHRLEESFLVEEDKKHERHPIFGNIVDEVAYHEKYPTIYHLRKKLVDSTDKADLRLIYLALAHMIKFRGHFLIEGDLNPDNSDVDKLFIQLVQTYNQLFEENPINASGVDAKAILSARLSKSRRLENLIAQLPGEKKNGLFGNLIALSLGLTPNFKSNFDLAEDAKLQLSKDTYDDDLDNLLAQIGDQYADLFLAAKNLSDAILLSDILRVNTEITKAPLSASMIKRYDEHHQDLTLLKALVRQQLPEKYKEIFFDQSKNGYAGYIDGGASQEEFYKFIKPILEKMDGTEELLVKLNREDLLRKQRTFDNGSIPHQIHLGELHAILRRQEDFYPFLKDNREKIEKILTFRIPYYVGPLARGNSRFAWMTRKSEETITPWNFEEVVDKGASAQSFIERMTNFDKNLPNEKVLPKHSLLYEYFTVYNELTKVKYVTEGMRKPAFLSGEQKKAIVDLLFKTNRKVTVKQLKEDYFKKIECFDSVEISGVEDRFNASLGTYHDLLKIIKDKDFLDNEENEDILEDIVLTLTLFEDREMIEERLKTYAHLFDDKVMKQLKRRRYTGWGRLSRKLINGIRDKQSGKTILDFLKSDGFANRNFMQLIHDDSLTFKEDIQKAQVSGQGDSLHEHIANLAGSPAIKKGILQTVKVVDELVKVMGRHKPENIVIEMARENQTTQKGQKNSRERMKRIEEGIKELGSQILKEHPVENTQLQNEKLYLYYLQNGRDMYVDQELDINRLSDYDVDHIVPQSFLKDDSIDNKVLTRSDKARGKSDNVPSEEVVKKMKNYWRQLLNAKLITQRKFDNLTKAERGGLSELDKAGFIKRQLVETRQITKHVAQILDSRMNTKYDENDKLIREVKVITLKSKLVSDFRKDFQFYKVREINNYHHAHDAYLNAVVGTALIKKYPKLESEFVYGDYKVYDVRKMIAKSEQEIGKATAKYFFYSNIMNFFKTEITLANGEIRKRPLIETNGETGEIVWDKGRDFATVRKVLSMPQVNIVKKTEVQTGGFSKESILPKRNSDKLIARKKDWDPKKYGGFDSPTVAYSVLVVAKVEKGKSKKLKSVKELLGITIMERSSFEKNPIDFLEAKGYKEVKKDLIIKLPKYSLFELENGRKRMLASAGELQKGNELALPSKYVNFLYLASHYEKLKGSPEDNEQKQLFVEQHKHYLDEIIEQISEFSKRVILADANLDKVLSAYNKHRDKPIREQAENIIHLFTLTNLGAPAAFKYFDTTIDRKRYTSTKEVLDATLIHQSITGLYETRIDLSQLGGDGGGGSGGTLGIEDEYRLHETSTEPDVSLGSTWLSDFPQAWAETGGMGLAVRQAPLIIPLKATSTPVSIQQYPMSHEARLGIKPHIQRLLDQGILVPCQSPWNTPLLPVKKPGTNDYRPVQDLREVNKRVEDIHPTVPNPYNLLSGLPPSHQWYTVLDLKDAFFCLRLHPTSQPLFAFEWRDPGMGISGQLTWTRLPQGFKNSPTLFNEALHRDLADFRIQHPDLILLQYVDDILLAATSELDCQQGTRALLQTLGDLGYRASAKKAQICQKQVKYLGYLLREGQRWLTEARKETVMGQPVPKTPRQLREFLGTAGFCRLWIPGFAEMAAPLYPLTKPGTLFSWGPDQQKAYQEIKQALLTAPALGLPDLTKPFELFVDEKQGYAKGVLTQKLGPWRRPVAYLSKKLDPVAAGWPPCLRMVAAIAVLTKDAGKLTMGQPLVILAPHAVEALVKQPPDRWLSNARMTHYQAMLLDTDRVQFGPVVALNPATLLPLPEEGAPHDCLEILAETHGTRPDLTDQPIPDADHTWYTDGSSFLQEGQRKAGAAVTTETEVIWAGALPAGTSAQRAELIALTQALKMAEGKRLNVYTDSRYAFATAHIHGEIYRRRGWLTSEGREIKNKSEILALLKALFLPKRLSIIHCLGHQKGDSAEARGNRLADQAAREAAIKTPPDTSTLLAGKRTADGSEFEKRTADGSEFESPKKKAKVE

SEQ ID NO: 6010 - protein, 2088 aa, synthetic construct
MPAAKRVKLDGGDKKYSIGLDIGTNSVGWAVITDEYKVPSKKFKVLGNTDRHSIKKNLIGALLFDSGETAEATRLKRTARRRYTRRKNRICYLQEIFSNEMAKVDDSFFHRLEESFLVEEDKKHERHPIFGNIVDEVAYHEKYPTIYHLRKKLVDSTDKADLRLIYLALAHMIKFRGHFLIEGDLNPDNSDVDKLFIQLVQTYNQLFEENPINASGVDAKAILSARLSKSRRLENLIAQLPGEKKNGLFGNLIALSLGLTPNFKSNFDLAEDAKLQLSKDTYDDDLDNLLAQIGDQYADLFLAAKNLSDAILLSDILRVNTEITKAPLSASMIKRYDEHHQDLTLLKALVRQQLPEKYKEIFFDQSKNGYAGYIDGGASQEEFYKFIKPILEKMDGTEELLVKLNREDLLRKQRTFDNGSIPHQIHLGELHAILRRQEDFYPFLKDNREKIEKILTFRIPYYVGPLARGNSRFAWMTRKSEETITPWNFEEVVDKGASAQSFIERMTNFDKNLPNEKVLPKHSLLYEYFTVYNELTKVKYVTEGMRKPAFLSGEQKKAIVDLLFKTNRKVTVKQLKEDYFKKIECFDSVEISGVEDRFNASLGTYHDLLKIIKDKDFLDNEENEDILEDIVLTLTLFEDREMIEERLKTYAHLFDDKVMKQLKRRRYTGWGRLSRKLINGIRDKQSGKTILDFLKSDGFANRNFMQLIHDDSLTFKEDIQKAQVSGQGDSLHEHIANLAGSPAIKKGILQTVKVVDELVKVMGRHKPENIVIEMARENQTTQKGQKNSRERMKRIEEGIKELGSQILKEHPVENTQLQNEKLYLYYLQNGRDMYVDQELDINRLSDYDVDHIVPQSFLKDDSIDNKVLTRSDKARGKSDNVPSEEVVKKMKNYWRQLLNAKLITQRKFDNLTKAERGGLSELDKAGFIKRQLVETRQITKHVAQILDSRMNTKYDENDKLIREVKVITLKSKLVSDFRKDFQFYKVREINNYHHAHDAYLNAVVGTALIKKYPKLESEFVYGDYKVYDVRKMIAKSEQEIGKATAKYFFYSNIMNFFKTEITLANGEIRKRPLIETNGETGEIVWDKGRDFATVRKVLSMPQVNIVKKTEVQTGGFSKESILPKRNSDKLIARKKDWDPKKYGGFDSPTVAYSVLVVAKVEKGKSKKLKSVKELLGITIMERSSFEKNPIDFLEAKGYKEVKKDLIIKLPKYSLFELENGRKRMLASAGELQKGNELALPSKYVNFLYLASHYEKLKGSPEDNEQKQLFVEQHKHYLDEIIEQISEFSKRVILADANLDKVLSAYNKHRDKPIREQAENIIHLFTLTNLGAPAAFKYFDTTIDRKRYTSTKEVLDATLIHQSITGLYETRIDLSQLGGDGGGGSGGTLNIEDEYRLHETSKEPDVSLGSTWLSDFPQAWAETGGMGLAVRQAPLIIPLKATSTPVSIKQYPMSQEARLGIKPHIQRLLDQGILVPCQSPWNTPLLPVKKPGTNDYRPVQDLREVNKRVEDIHPTVPNPYNLLSGLPPSHQWYTVLDLKDAFFCLRLHPTSQPLFAFEWRDPEMGISGQLTWTRLPQGFKNSPTLFNEALHRDLAGFRIQHPDLILLQYVDDLLLAATSELDCQQGTRALLQTLGDLGYRASAKKAQICQKQVKYLGYLLKEGQRWLTEARKETVMGQPIPKTPRQLREFLGTAGFCRLWIPGFAEMAAPLYPLTKPGTLFNWGPDQQKAFQEIKQALLTAPALGLPDLTKPFELFVDEKQGYAKGVLTQKLGPWRRPVAYLSKKLDPVAAGWPPCLRMVAAIAVLTKDAGKLTMGQPLVILAPHAVEALVKQPPDRWLSNARMTHYQALLLDTDRVQFGPVVALNPATLLPLPEEGLQHDCLDILAEAHGTRSDLMDQPLPDADHTWYTDGSSFLQEGQRKAGAAVTTETEVIWARALPAGTSAQRAELIALTQALKMAEGKKLNVYTDSRYAFATAHIHGEIYRRRGWLTSEGKEIKNKDEILALLKALFLPKRLSIIHCPGHQKGNSAEARGNRMADQAAREVATRETPETSTLLAGKRTADGSEFEKRTADGSEFESPKKKAKVE

SEQ ID NO: 6011 - protein, 2088 aa, synthetic construct
MPAAKRVKLDGGDKKYSIGLDIGTNSVGWAVITDEYKVPSKKFKVLGNTDRHSIKKNLIGALLFDSGETAEATRLKRTARRRYTRRKNRICYLQEIFSNEMAKVDDSFFHRLEESFLVEEDKKHERHPIFGNIVDEVAYHEKYPTIYHLRKKLVDSTDKADLRLIYLALAHMIKFRGHFLIEGDLNPDNSDVDKLFIQLVQTYNQLFEENPINASGVDAKAILSARLSKSRRLENLIAQLPGEKKNGLFGNLIALSLGLTPNFKSNFDLAEDAKLQLSKDTYDDDLDNLLAQIGDQYADLFLAAKNLSDAILLSDILRVNTEITKAPLSASMIKRYDEHHQDLTLLKALVRQQLPEKYKEIFFDQSKNGYAGYIDGGASQEEFYKFIKPILEKMDGTEELLVKLNREDLLRKQRTFDNGSIPHQIHLGELHAILRRQEDFYPFLKDNREKIEKILTFRIPYYVGPLARGNSRFAWMTRKSEETITPWNFEEVVDKGASAQSFIERMTNFDKNLPNEKVLPKHSLLYEYFTVYNELTKVKYVTEGMRKPAFLSGEQKKAIVDLLFKTNRKVTVKQLKEDYFKKIECFDSVEISGVEDRFNASLGTYHDLLKIIKDKDFLDNEENEDILEDIVLTLTLFEDREMIEERLKTYAHLFDDKVMKQLKRRRYTGWGRLSRKLINGIRDKQSGKTILDFLKSDGFANRNFMQLIHDDSLTFKEDIQKAQVSGQGDSLHEHIANLAGSPAIKKGILQTVKVVDELVKVMGRHKPENIVIEMARENQTTQKGQKNSRERMKRIEEGIKELGSQILKEHPVENTQLQNEKLYLYYLQNGRDMYVDQELDINRLSDYDVDHIVPQSFLKDDSIDNKVLTRSDKARGKSDNVPSEEVVKKMKNYWRQLLNAKLITQRKFDNLTKAERGGLSELDKAGFIKRQLVETRQITKHVAQILDSRMNTKYDENDKLIREVKVITLKSKLVSDFRKDFQFYKVREINNYHHAHDAYLNAVVGTALIKKYPKLESEFVYGDYKVYDVRKMIAKSEQEIGKATAKYFFYSNIMNFFKTEITLANGEIRKRPLIETNGETGEIVWDKGRDFATVRKVLSMPQVNIVKKTEVQTGGFSKESILPKRNSDKLIARKKDWDPKKYGGFDSPTVAYSVLVVAKVEKGKSKKLKSVKELLGITIMERSSFEKNPIDFLEAKGYKEVKKDLIIKLPKYSLFELENGRKRMLASAGELQKGNELALPSKYVNFLYLASHYEKLKGSPEDNEQKQLFVEQHKHYLDEIIEQISEFSKRVILADANLDKVLSAYNKHRDKPIREQAENIIHLFTLTNLGAPAAFKYFDTTIDRKRYTSTKEVLDATLIHQSITGLYETRIDLSQLGGDGGGGSGGTLNIEDEYRLHETSKGPDVPLGSTWLSDFPQAWAETGGMGLAVRQAPLIIPLKATSTPVSIKQYPMSQEARLGIKPHIQRLLDQGILVPCQSPWNTPLLPVKKPGTNDYRPVQDLREVNKRVEDIHPTVPNPYNLLSGLPPSHQWYTVLDLKDAFFCLRLHPTSQSLFAFEWRDPEMGISGQLTWTRLPQGFKNSPTLFNEALHRDLADFRIQHPDLILLQYVDDLLLAATSELDCQQGTRALLQTLGDLGYRASAKKAQICQKQVKYLGYLLKEGQRWLTEARKETVMGQPTPKTPRQLREFLGTAGFCRLWIPGFAEMAAPLYPLTKPGTLFEWGPDQQKAYQEIKQALLTAPALGLPDLTKPFELFVDEKQGYAKGVLTQKLGPWRRPVAYLSKKLDPVAAGWPPCLRMVAAIAVLTKDAGKLTMGQPLVILAPHAVEALVKQPPDRWLSNARMTHYQALLLDTDRVQFGPIVALNPATLLPLPEEGLQHDCLDILAEAHGTRPDLTDQPLPDADHTWYTDGSSFLQEGQRKAGAAVTTETEVVWAKALPAGTSAQRAELIALTQALKMAEGKKLNVYTDSRYAFATAHIHGEIYRRRGWLTSEGKEIKNKDEILALLKALFLPKRLSIIHCPGHQKGNRAEARGNRMADQAAREVATRETPETSTLLAGKRTADGSEFEKRTADGSEFESPKKKAKVE

SEQ ID NO: 6012 - protein, 2088 aa, synthetic construct
MPAAKRVKLDGGDKKYSIGLDIGTNSVGWAVITDEYKVPSKKFKVLGNTDRHSIKKNLIGALLFDSGETAEATRLKRTARRRYTRRKNRICYLQEIFSNEMAKVDDSFFHRLEESFLVEEDKKHERHPIFGNIVDEVAYHEKYPTIYHLRKKLVDSTDKADLRLIYLALAHMIKFRGHFLIEGDLNPDNSDVDKLFIQLVQTYNQLFEENPINASGVDAKAILSARLSKSRRLENLIAQLPGEKKNGLFGNLIALSLGLTPNFKSNFDLAEDAKLQLSKDTYDDDLDNLLAQIGDQYADLFLAAKNLSDAILLSDILRVNTEITKAPLSASMIKRYDEHHQDLTLLKALVRQQLPEKYKEIFFDQSKNGYAGYIDGGASQEEFYKFIKPILEKMDGTEELLVKLNREDLLRKQRTFDNGSIPHQIHLGELHAILRRQEDFYPFLKDNREKIEKILTFRIPYYVGPLARGNSRFAWMTRKSEETITPWNFEEVVDKGASAQSFIERMTNFDKNLPNEKVLPKHSLLYEYFTVYNELTKVKYVTEGMRKPAFLSGEQKKAIVDLLFKTNRKVTVKQLKEDYFKKIECFDSVEISGVEDRFNASLGTYHDLLKIIKDKDFLDNEENEDILEDIVLTLTLFEDREMIEERLKTYAHLFDDKVMKQLKRRRYTGWGRLSRKLINGIRDKQSGKTILDFLKSDGFANRNFMQLIHDDSLTFKEDIQKAQVSGQGDSLHEHIANLAGSPAIKKGILQTVKVVDELVKVMGRHKPENIVIEMARENQTTQKGQKNSRERMKRIEEGIKELGSQILKEHPVENTQLQNEKLYLYYLQNGRDMYVDQELDINRLSDYDVDHIVPQSFLKDDSIDNKVLTRSDKARGKSDNVPSEEVVKKMKNYWRQLLNAKLITQRKFDNLTKAERGGLSELDKAGFIKRQLVETRQITKHVAQILDSRMNTKYDENDKLIREVKVITLKSKLVSDFRKDFQFYKVREINNYHHAHDAYLNAVVGTALIKKYPKLESEFVYGDYKVYDVRKMIAKSEQEIGKATAKYFFYSNIMNFFKTEITLANGEIRKRPLIETNGETGEIVWDKGRDFATVRKVLSMPQVNIVKKTEVQTGGFSKESILPKRNSDKLIARKKDWDPKKYGGFDSPTVAYSVLVVAKVEKGKSKKLKSVKELLGITIMERSSFEKNPIDFLEAKGYKEVKKDLIIKLPKYSLFELENGRKRMLASAGELQKGNELALPSKYVNFLYLASHYEKLKGSPEDNEQKQLFVEQHKHYLDEIIEQISEFSKRVILADANLDKVLSAYNKHRDKPIREQAENIIHLFTLTNLGAPAAFKYFDTTIDRKRYTSTKEVLDATLIHQSITGLYETRIDLSQLGGDGGGGSGGTLNIEDEYRLHETSKGPDVPLGSTWLSDFPQAWAETGGMGLAVRQAPLIIPLKATSTPVSIKQYPMSQEARLGIKPHIQRLLDQGILVPCQSPWNTPLLPVKKPGTNDYRPVQDLREVNKRVEDIHPTVPNPYNLLSGLPPSHQWYTVLDLKDAFFCLRLHPTSQSLFAFEWRDPEMGISGQLTWTRLPQGFKNSPTLFNEALHRDLADFRIQHPDLILLQYVDDLLLAATSELDCQQGTRALLQTLGDLGYRASAKKAQICQKQVKYLGYLLKEGQRWLTEARKETVMGQPTPKTPRQLREFLGKAGFCRLFIPGFAEMAAPLYPLTKPGTLFEWGPDQQKAYQEIKQALLTAPALGLPDLTKPFELFVDEKQGYAKGVLTQKLGPWRRPVAYLSKKLDPVAAGWPPCLRMVAAIAVLTKDAGKLTMGQPLVILAPHAVEALVKQPPDRWLSNARMTHYQALLLDTDRVQFGPIVALNPATLLPLPEEGLQHDCLDILAEAHGTRPDLTDQPLPDADHTWYTDGSSFLQEGQRKAGAAVTTETEVVWAKALPAGTSAQRAELIALTQALKMAEGKKLNVYTDSRYAFATAHIHGEIYRRRGWLTSEGKEIKNKDEILALLKALFLPKRLSIIHCPGHQKGNRAEARGNRMADQAAREVATRETPETSTLLAGKRTADGSEFEKRTADGSEFESPKKKAKVE

SEQ ID NO: 6013 - protein, 2086 aa, synthetic construct
MPAAKRVKLDGGDKKYSIGLDIGTNSVGWAVITDEYKVPSKKFKVLGNTDRHSIKKNLIGALLFDSGETAEATRLKRTARRRYTRRKNRICYLQEIFSNEMAKVDDSFFHRLEESFLVEEDKKHERHPIFGNIVDEVAYHEKYPTIYHLRKKLVDSTDKADLRLIYLALAHMIKFRGHFLIEGDLNPDNSDVDKLFIQLVQTYNQLFEENPINASGVDAKAILSARLSKSRRLENLIAQLPGEKKNGLFGNLIALSLGLTPNFKSNFDLAEDAKLQLSKDTYDDDLDNLLAQIGDQYADLFLAAKNLSDAILLSDILRVNTEITKAPLSASMIKRYDEHHQDLTLLKALVRQQLPEKYKEIFFDQSKNGYAGYIDGGASQEEFYKFIKPILEKMDGTEELLVKLNREDLLRKQRTFDNGSIPHQIHLGELHAILRRQEDFYPFLKDNREKIEKILTFRIPYYVGPLARGNSRFAWMTRKSEETITPWNFEEVVDKGASAQSFIERMTNFDKNLPNEKVLPKHSLLYEYFTVYNELTKVKYVTEGMRKPAFLSGEQKKAIVDLLFKTNRKVTVKQLKEDYFKKIECFDSVEISGVEDRFNASLGTYHDLLKIIKDKDFLDNEENEDILEDIVLTLTLFEDREMIEERLKTYAHLFDDKVMKQLKRRRYTGWGRLSRKLINGIRDKQSGKTILDFLKSDGFANRNFMQLIHDDSLTFKEDIQKAQVSGQGDSLHEHIANLAGSPAIKKGILQTVKVVDELVKVMGRHKPENIVIEMARENQTTQKGQKNSRERMKRIEEGIKELGSQILKEHPVENTQLQNEKLYLYYLQNGRDMYVDQELDINRLSDYDVDHIVPQSFLKDDSIDNKVLTRSDKARGKSDNVPSEEVVKKMKNYWRQLLNAKLITQRKFDNLTKAERGGLSELDKAGFIKRQLVETRQITKHVAQILDSRMNTKYDENDKLIREVKVITLKSKLVSDFRKDFQFYKVREINNYHHAHDAYLNAVVGTALIKKYPKLESEFVYGDYKVYDVRKMIAKSEQEIGKATAKYFFYSNIMNFFKTEITLANGEIRKRPLIETNGETGEIVWDKGRDFATVRKVLSMPQVNIVKKTEVQTGGFSKESILPKRNSDKLIARKKDWDPKKYGGFDSPTVAYSVLVVAKVEKGKSKKLKSVKELLGITIMERSSFEKNPIDFLEAKGYKEVKKDLIIKLPKYSLFELENGRKRMLASAGELQKGNELALPSKYVNFLYLASHYEKLKGSPEDNEQKQLFVEQHKHYLDEIIEQISEFSKRVILADANLDKVLSAYNKHRDKPIREQAENIIHLFTLTNLGAPAAFKYFDTTIDRKRYTSTKEVLDATLIHQSITGLYETRIDLSQLGGDGGGGSGGVLNLEEEYRLHEKPVPSSIDPSWLQLFPTVWAERAGMGLANQVPPVVVELRSGASPVAVRQYPMSKEAREGIRPHIQRFLDLGVLVPCQSPWNTPLLPVKKPGTNDYRPVQDLREINKRVQDIHPTVPNPYNLLSSLPPSHTWYSVLDLKDAFFCLKLHPNSQPLFAFEWRDPEKGNTGQLTWTRLPQGFKNSPTLFNEALHRDLAPFRALNPQVVLLQYVDDLLVAAPTYRDCKEGTQKLLQELSKLGYRVSAKKAQLCQKEVTYLGYLLKEGKRWLTPARKATVMKIPPPTTPRQVREFLGKAGFCRLFIPGFASLAAPLYPLTKPSIPFIWTEEHQKAFDRIKEALLSAPALALPDLTKPFTLYVDERAGVARGVLTQTLGPWRRPVAYLSKKLDPVASGWPTCLKAVAAVALLLKDADKLTLGQNVTVIASHSLESIVRQPPDRWMTNARMTHYQSLLLNERVSFAPPAVLNPATLLPVESEATPVHRCSEILAEETGTRRDLKDQPLPGVPAWYTDGSSFIAEGKRRAGAAIVDGKRTVWASSLPEGTSAQKAELVALTQALRLAEGKDINIYTDSRYAFATAHIHGAIYKQRGWLTSAGKDIKNKEEILALLEAIHLPKRVAIIHCPGHQKGNDPVATGNRRADEAAKQAALSTRVLAETTKPAGKRTADGSEFEKRTADGSEFESPKKKAKVE

SEQ ID NO: 6014 - protein, 2088 aa, synthetic construct
MPAAKRVKLDGGDKKYSIGLDIGTNSVGWAVITDEYKVPSKKFKVLGNTDRHSIKKNLIGALLFDSGETAEATRLKRTARRRYTRRKNRICYLQEIFSNEMAKVDDSFFHRLEESFLVEEDKKHERHPIFGNIVDEVAYHEKYPTIYHLRKKLVDSTDKADLRLIYLALAHMIKFRGHFLIEGDLNPDNSDVDKLFIQLVQTYNQLFEENPINASGVDAKAILSARLSKSRRLENLIAQLPGEKKNGLFGNLIALSLGLTPNFKSNFDLAEDAKLQLSKDTYDDDLDNLLAQIGDQYADLFLAAKNLSDAILLSDILRVNTEITKAPLSASMIKRYDEHHQDLTLLKALVRQQLPEKYKEIFFDQSKNGYAGYIDGGASQEEFYKFIKPILEKMDGTEELLVKLNREDLLRKQRTFDNGSIPHQIHLGELHAILRRQEDFYPFLKDNREKIEKILTFRIPYYVGPLARGNSRFAWMTRKSEETITPWNFEEVVDKGASAQSFIERMTNFDKNLPNEKVLPKHSLLYEYFTVYNELTKVKYVTEGMRKPAFLSGEQKKAIVDLLFKTNRKVTVKQLKEDYFKKIECFDSVEISGVEDRFNASLGTYHDLLKIIKDKDFLDNEENEDILEDIVLTLTLFEDREMIEERLKTYAHLFDDKVMKQLKRRRYTGWGRLSRKLINGIRDKQSGKTILDFLKSDGFANRNFMQLIHDDSLTFKEDIQKAQVSGQGDSLHEHIANLAGSPAIKKGILQTVKVVDELVKVMGRHKPENIVIEMARENQTTQKGQKNSRERMKRIEEGIKELGSQILKEHPVENTQLQNEKLYLYYLQNGRDMYVDQELDINRLSDYDVDHIVPQSFLKDDSIDNKVLTRSDKARGKSDNVPSEEVVKKMKNYWRQLLNAKLITQRKFDNLTKAERGGLSELDKAGFIKRQLVETRQITKHVAQILDSRMNTKYDENDKLIREVKVITLKSKLVSDFRKDFQFYKVREINNYHHAHDAYLNAVVGTALIKKYPKLESEFVYGDYKVYDVRKMIAKSEQEIGKATAKYFFYSNIMNFFKTEITLANGEIRKRPLIETNGETGEIVWDKGRDFATVRKVLSMPQVNIVKKTEVQTGGFSKESILPKRNSDKLIARKKDWDPKKYGGFDSPTVAYSVLVVAKVEKGKSKKLKSVKELLGITIMERSSFEKNPIDFLEAKGYKEVKKDLIIKLPKYSLFELENGRKRMLASAGELQKGNELALPSKYVNFLYLASHYEKLKGSPEDNEQKQLFVEQHKHYLDEIIEQISEFSKRVILADANLDKVLSAYNKHRDKPIREQAENIIHLFTLTNLGAPAAFKYFDTTIDRKRYTSTKEVLDATLIHQSITGLYETRIDLSQLGGDGGGGSGGTLNIEDEYRLHETSKEPDVPLGSTWLSDFPQAWAETGGMGLAVRQAPLIIPLKATSTPVSIKQYPMSQEARLGIKPHIQRLLDQGILVPCQSPWNTPLLPVKKPGTNDYRPVQDLREVNKRVEDIHPTVPNPYNLLSGLPPSHQWYTVLDLKDAFFCLRLHPTSQPLFAFEWRDPEMGISGQLTWTRLPQGFKNSPTLFNEALHRDLADFRIQHPDLILLQYVDDLLLAATSEQDCQRGTRALLQTLGNLGYRASAKKAQICQKQVKYLGYLLKEGQRWLTEARKETVMGQPTPKTPRQLREFLGKAGFCRLFIPGFAEMAAPLYPLTKPGTLFNWGPDQQKAYQEIKQALLTAPALGLPDLTKPFELFVDEKQGYAKGVLTQKLGPWRRPVAYLSKKLDPVAAGWPPCLRMVAAIAVLTKDAGKLTMGQPLVILAPHAVEALVKQPPDRWLSNARMTHYQAMLLDTDRVQFGPVVALNPATLLPLPEKEAPHDCLEILAETHGTRPDLTDQPIPDADYTWYTDGSSFLQEGQRRAGAAVTTETEVIWARALPAGTSAQRAELIALTQALKMAEGKKLNVYTDSRYAFATAHVHGEIYRRRGWLTSEGREIKNKNEILALLKALFLPKRLSIIHCPGHQKGNSAEARGNRMADQAAREAAMKAVLETSTLLAGKRTADGSEFEKRTADGSEFESPKKKAKVE

SEQ ID NO: 6015 - protein, 2093 aa, synthetic construct
MPAAKRVKLDGGDKKYSIGLDIGTNSVGWAVITDEYKVPSKKFKVLGNTDRHSIKKNLIGALLFDSGETAEATRLKRTARRRYTRRKNRICYLQEIFSNEMAKVDDSFFHRLEESFLVEEDKKHERHPIFGNIVDEVAYHEKYPTIYHLRKKLVDSTDKADLRLIYLALAHMIKFRGHFLIEGDLNPDNSDVDKLFIQLVQTYNQLFEENPINASGVDAKAILSARLSKSRRLENLIAQLPGEKKNGLFGNLIALSLGLTPNFKSNFDLAEDAKLQLSKDTYDDDLDNLLAQIGDQYADLFLAAKNLSDAILLSDILRVNTEITKAPLSASMIKRYDEHHQDLTLLKALVRQQLPEKYKEIFFDQSKNGYAGYIDGGASQEEFYKFIKPILEKMDGTEELLVKLNREDLLRKQRTFDNGSIPHQIHLGELHAILRRQEDFYPFLKDNREKIEKILTFRIPYYVGPLARGNSRFAWMTRKSEETITPWNFEEVVDKGASAQSFIERMTNFDKNLPNEKVLPKHSLLYEYFTVYNELTKVKYVTEGMRKPAFLSGEQKKAIVDLLFKTNRKVTVKQLKEDYFKKIECFDSVEISGVEDRFNASLGTYHDLLKIIKDKDFLDNEENEDILEDIVLTLTLFEDREMIEERLKTYAHLFDDKVMKQLKRRRYTGWGRLSRKLINGIRDKQSGKTILDFLKSDGFANRNFMQLIHDDSLTFKEDIQKAQVSGQGDSLHEHIANLAGSPAIKKGILQTVKVVDELVKVMGRHKPENIVIEMARENQTTQKGQKNSRERMKRIEEGIKELGSQILKEHPVENTQLQNEKLYLYYLQNGRDMYVDQELDINRLSDYDVDHIVPQSFLKDDSIDNKVLTRSDKARGKSDNVPSEEVVKKMKNYWRQLLNAKLITQRKFDNLTKAERGGLSELDKAGFIKRQLVETRQITKHVAQILDSRMNTKYDENDKLIREVKVITLKSKLVSDFRKDFQFYKVREINNYHHAHDAYLNAVVGTALIKKYPKLESEFVYGDYKVYDVRKMIAKSEQEIGKATAKYFFYSNIMNFFKTEITLANGEIRKRPLIETNGETGEIVWDKGRDFATVRKVLSMPQVNIVKKTEVQTGGFSKESILPKRNSDKLIARKKDWDPKKYGGFDSPTVAYSVLVVAKVEKGKSKKLKSVKELLGITIMERSSFEKNPIDFLEAKGYKEVKKDLIIKLPKYSLFELENGRKRMLASAGELQKGNELALPSKYVNFLYLASHYEKLKGSPEDNEQKQLFVEQHKHYLDEIIEQISEFSKRVILADANLDKVLSAYNKHRDKPIREQAENIIHLFTLTNLGAPAAFKYFDTTIDRKRYTSTKEVLDATLIHQSITGLYETRIDLSQLGGDGGGGSGGSGGTAPLEEEYRLFLEAPIQNVTLLEQWKREIPKVWAEINPPGLASTQAPIHVQLLSTALPVRVRQYPITLEAKRSLRETIRKFRAAGILRPVHSPWNTPLLPVRKSGTSEYRMVQDLREVNKRVETIHPTVPNPYTLLSLLPPDRIWYSVLDLKDAFFCIPLAPESQLIFAFEWADAEEGESGQLTWTRLPQGFKNSPTLFNEALNRDLQGFRLDHPSVSLLQYVDDLLIAADTQAACLSATRDLLMTLAELGYRVSGKKAQLCQEEVTYLGFKIHKGSRSLSNSRTQAILQIPVPKTKRQVREFLGTIGYCRLWIPGFAELAQPLYAATRPGNDPLVWGEKEEEAFQSLKLALTQPPALALPSLDKPFQLFVEETSGAAKGVLTQALGPWKRPVAYLSKRLDPVAAGWPRCLRAIAAAALLTREASKLTFGQDIEITSSHNLESLLRSPPDKWLTNARITQYQVLLLDPPRVRFKQTAALNPATLLPETDDTLPIHHCLDTLDSLTSTRPDLTDQPLAQAEATLFTDGSSYIRDGKRYAGAAVVTLDSVIWAEPLPIGTSAQKAELIALTKALEWSKDKSVNIYTDSRYAFATLHVHGMIYRERGWLTAGGKAIKNAPEILALLTAVWLPKRVAVMHCKGHQKDDAPTSTGNRRADEVAREVAIRPLSTQATISAGKRTADGSEFEKRTADGSEFESPKKKAKVE

SEQ ID NO: 6016 - protein, 2082 aa, synthetic construct
MPAAKRVKLDGGDKKYSIGLDIGTNSVGWAVITDEYKVPSKKFKVLGNTDRHSIKKNLIGALLFDSGETAEATRLKRTARRRYTRRKNRICYLQEIFSNEMAKVDDSFFHRLEESFLVEEDKKHERHPIFGNIVDEVAYHEKYPTIYHLRKKLVDSTDKADLRLIYLALAHMIKFRGHFLIEGDLNPDNSDVDKLFIQLVQTYNQLFEENPINASGVDAKAILSARLSKSRRLENLIAQLPGEKKNGLFGNLIALSLGLTPNFKSNFDLAEDAKLQLSKDTYDDDLDNLLAQIGDQYADLFLAAKNLSDAILLSDILRVNTEITKAPLSASMIKRYDEHHQDLTLLKALVRQQLPEKYKEIFFDQSKNGYAGYIDGGASQEEFYKFIKPILEKMDGTEELLVKLNREDLLRKQRTFDNGSIPHQIHLGELHAILRRQEDFYPFLKDNREKIEKILTFRIPYYVGPLARGNSRFAWMTRKSEETITPWNFEEVVDKGASAQSFIERMTNFDKNLPNEKVLPKHSLLYEYFTVYNELTKVKYVTEGMRKPAFLSGEQKKAIVDLLFKTNRKVTVKQLKEDYFKKIECFDSVEISGVEDRFNASLGTYHDLLKIIKDKDFLDNEENEDILEDIVLTLTLFEDREMIEERLKTYAHLFDDKVMKQLKRRRYTGWGRLSRKLINGIRDKQSGKTILDFLKSDGFANRNFMQLIHDDSLTFKEDIQKAQVSGQGDSLHEHIANLAGSPAIKKGILQTVKVVDELVKVMGRHKPENIVIEMARENQTTQKGQKNSRERMKRIEEGIKELGSQILKEHPVENTQLQNEKLYLYYLQNGRDMYVDQELDINRLSDYDVDHIVPQSFLKDDSIDNKVLTRSDKARGKSDNVPSEEVVKKMKNYWRQLLNAKLITQRKFDNLTKAERGGLSELDKAGFIKRQLVETRQITKHVAQILDSRMNTKYDENDKLIREVKVITLKSKLVSDFRKDFQFYKVREINNYHHAHDAYLNAVVGTALIKKYPKLESEFVYGDYKVYDVRKMIAKSEQEIGKATAKYFFYSNIMNFFKTEITLANGEIRKRPLIETNGETGEIVWDKGRDFATVRKVLSMPQVNIVKKTEVQTGGFSKESILPKRNSDKLIARKKDWDPKKYGGFDSPTVAYSVLVVAKVEKGKSKKLKSVKELLGITIMERSSFEKNPIDFLEAKGYKEVKKDLIIKLPKYSLFELENGRKRMLASAGELQKGNELALPSKYVNFLYLASHYEKLKGSPEDNEQKQLFVEQHKHYLDEIIEQISEFSKRVILADANLDKVLSAYNKHRDKPIREQAENIIHLFTLTNLGAPAAFKYFDTTIDRKRYTSTKEVLDATLIHQSITGLYETRIDLSQLGGDGGGGSGGSGGVPWILKKPLELTIKLDLEEQQGTLLNNSILSKKGKEELKQLFEKYSALWQSWENQVGHRRIRPHKIATGTVKPTPQKQYHINPKAKPDIQIVINDLLKQGVLIQKESTMNTPVYPVPKPNGRWRMVLDYRAVNKVTPLIAVQNQHSYGILGSLFKGRYKTTIDLSNGFWAHPIVPEDYWITAFTWQGKQYCWTVLPQGFLNSPGLFNGDVVDLLQGIPNVEVYVDDVYISHDSEKEHLEYLDILFNRLKEAGYIISLKKSNIANSIVDFLGFQITNEGRGLTDTFKEKLENITAPTTLKQLQSILGKLNFARNFIPDFTELIAPLYALIPKSPKNYVPWQIEHSTTLETLITKLNGAEYLQGRKGDKTLIMKVNASYTTGYIRYYNEGEKKPISYVSIVFSKTELKFTELEKLLTTVHKGLLKALDLSMGQNIHVYSPIVSMQNIQKTPQTAKKALASRWLSWLSYLEDPRIRFFYDPQMPALKDLPAVDTGKDNKKHPSNFQHIFYTDGSAITSPTKEGHLNAGMGIVYFINKDGNLQKQQEWSISLGNHTAQFAEIAAFEFALKKCLPLGGNILVVTDSNYVAKAYNEELDVWASNGFVNNRKKPLKHISKWKSVADLKRLRPDVVVTHEPGHQKLDSSPHAYGNNLADQLATQASFKVHAGKRTADGSEFEKRTADGSEFESPKKKAKVE

SEQ ID NO: 6017 - protein, 2090 aa, synthetic construct
MPAAKRVKLDGGDKKYSIGLDIGTNSVGWAVITDEYKVPSKKFKVLGNTDRHSIKKNLIGALLFDSGETAEATRLKRTARRRYTRRKNRICYLQEIFSNEMAKVDDSFFHRLEESFLVEEDKKHERHPIFGNIVDEVAYHEKYPTIYHLRKKLVDSTDKADLRLIYLALAHMIKFRGHFLIEGDLNPDNSDVDKLFIQLVQTYNQLFEENPINASGVDAKAILSARLSKSRRLENLIAQLPGEKKNGLFGNLIALSLGLTPNFKSNFDLAEDAKLQLSKDTYDDDLDNLLAQIGDQYADLFLAAKNLSDAILLSDILRVNTEITKAPLSASMIKRYDEHHQDLTLLKALVRQQLPEKYKEIFFDQSKNGYAGYIDGGASQEEFYKFIKPILEKMDGTEELLVKLNREDLLRKQRTFDNGSIPHQIHLGELHAILRRQEDFYPFLKDNREKIEKILTFRIPYYVGPLARGNSRFAWMTRKSEETITPWNFEEVVDKGASAQSFIERMTNFDKNLPNEKVLPKHSLLYEYFTVYNELTKVKYVTEGMRKPAFLSGEQKKAIVDLLFKTNRKVTVKQLKEDYFKKIECFDSVEISGVEDRFNASLGTYHDLLKIIKDKDFLDNEENEDILEDIVLTLTLFEDREMIEERLKTYAHLFDDKVMKQLKRRRYTGWGRLSRKLINGIRDKQSGKTILDFLKSDGFANRNFMQLIHDDSLTFKEDIQKAQVSGQGDSLHEHIANLAGSPAIKKGILQTVKVVDELVKVMGRHKPENIVIEMARENQTTQKGQKNSRERMKRIEEGIKELGSQILKEHPVENTQLQNEKLYLYYLQNGRDMYVDQELDINRLSDYDVDHIVPQSFLKDDSIDNKVLTRSDKARGKSDNVPSEEVVKKMKNYWRQLLNAKLITQRKFDNLTKAERGGLSELDKAGFIKRQLVETRQITKHVAQILDSRMNTKYDENDKLIREVKVITLKSKLVSDFRKDFQFYKVREINNYHHAHDAYLNAVVGTALIKKYPKLESEFVYGDYKVYDVRKMIAKSEQEIGKATAKYFFYSNIMNFFKTEITLANGEIRKRPLIETNGETGEIVWDKGRDFATVRKVLSMPQVNIVKKTEVQTGGFSKESILPKRNSDKLIARKKDWDPKKYGGFDSPTVAYSVLVVAKVEKGKSKKLKSVKELLGITIMERSSFEKNPIDFLEAKGYKEVKKDLIIKLPKYSLFELENGRKRMLASAGELQKGNELALPSKYVNFLYLASHYEKLKGSPEDNEQKQLFVEQHKHYLDEIIEQISEFSKRVILADANLDKVLSAYNKHRDKPIREQAENIIHLFTLTNLGAPAAFKYFDTTIDRKRYTSTKEVLDATLIHQSITGLYETRIDLSQLGGDGGGGSGGSGGTLQLEEEYRLFEPESTQKQEMDIWLKNFPQAWAETGGMGTAHCQAPVLIQLKATATPISIRQYPMPHEAYQGIKPHIRRMLDQGILKPCQSPWNTPLLPVKKPGTEDYRPVQDLREVNKRVEDIHPTVPNPYNLLSTLPPSHPWYTVLDLKDAFFCLRLHSESQLLFAFEWRDPEIGLSGQLTWTRLPQGFKNSPTLFNEALHSDLADFRVRYPALVLLQYVDDLLLAAATRTECLEGTKALLETLGNKGYRASAKKAQICLQEVTYLGYSLKDGQRWLTKARKEAILSIPVPKNSRQVREFLGKAGYCRLFIPGFAELAAPLYPLTRPGTLFQWGTEQQLAFEDIKKALLSSPALGLPDITKPFELFIDENSGFAKGVLVQKLGPWKRPVAYLSKKLDTVASGWPPCLRMVAAIAILVKDAGKLTLGQPLTILTSHPVEALVRQPPNKWLSNARMTHYQAMLLDAERVHFGPTVSLNPATLLPLPSGGNHHDCLQILAETHGTRPDLTDQPLPDADLTWYTDGSSFIRNGEREAGAAVTTESEVIWAAPLPPGTSAQRAELIALTQALKMAEGKKLTVYTDSRYAFATTHVHGEIYRRRGWLTSEGKEIKNKNEILALLEALFLPKRLSIIHCPGHQKGDSPQAKGNRLADDTAKKAATETHSSLTVLPAGKRTADGSEFEKRTADGSEFESPKKKAKVE

SEQ ID NO: 6018 - protein, 2171 aa, synthetic construct
MPAAKRVKLDGGDKKYSIGLDIGTNSVGWAVITDEYKVPSKKFKVLGNTDRHSIKKNLIGALLFDSGETAEATRLKRTARRRYTRRKNRICYLQEIFSNEMAKVDDSFFHRLEESFLVEEDKKHERHPIFGNIVDEVAYHEKYPTIYHLRKKLVDSTDKADLRLIYLALAHMIKFRGHFLIEGDLNPDNSDVDKLFIQLVQTYNQLFEENPINASGVDAKAILSARLSKSRRLENLIAQLPGEKKNGLFGNLIALSLGLTPNFKSNFDLAEDAKLQLSKDTYDDDLDNLLAQIGDQYADLFLAAKNLSDAILLSDILRVNTEITKAPLSASMIKRYDEHHQDLTLLKALVRQQLPEKYKEIFFDQSKNGYAGYIDGGASQEEFYKFIKPILEKMDGTEELLVKLNREDLLRKQRTFDNGSIPHQIHLGELHAILRRQEDFYPFLKDNREKIEKILTFRIPYYVGPLARGNSRFAWMTRKSEETITPWNFEEVVDKGASAQSFIERMTNFDKNLPNEKVLPKHSLLYEYFTVYNELTKVKYVTEGMRKPAFLSGEQKKAIVDLLFKTNRKVTVKQLKEDYFKKIECFDSVEISGVEDRFNASLGTYHDLLKIIKDKDFLDNEENEDILEDIVLTLTLFEDREMIEERLKTYAHLFDDKVMKQLKRRRYTGWGRLSRKLINGIRDKQSGKTILDFLKSDGFANRNFMQLIHDDSLTFKEDIQKAQVSGQGDSLHEHIANLAGSPAIKKGILQTVKVVDELVKVMGRHKPENIVIEMARENQTTQKGQKNSRERMKRIEEGIKELGSQILKEHPVENTQLQNEKLYLYYLQNGRDMYVDQELDINRLSDYDVDHIVPQSFLKDDSIDNKVLTRSDKARGKSDNVPSEEVVKKMKNYWRQLLNAKLITQRKFDNLTKAERGGLSELDKAGFIKRQLVETRQITKHVAQILDSRMNTKYDENDKLIREVKVITLKSKLVSDFRKDFQFYKVREINNYHHAHDAYLNAVVGTALIKKYPKLESEFVYGDYKVYDVRKMIAKSEQEIGKATAKYFFYSNIMNFFKTEITLANGEIRKRPLIETNGETGEIVWDKGRDFATVRKVLSMPQVNIVKKTEVQTGGFSKESILPKRNSDKLIARKKDWDPKKYGGFDSPTVAYSVLVVAKVEKGKSKKLKSVKELLGITIMERSSFEKNPIDFLEAKGYKEVKKDLIIKLPKYSLFELENGRKRMLASAGELQKGNELALPSKYVNFLYLASHYEKLKGSPEDNEQKQLFVEQHKHYLDEIIEQISEFSKRVILADANLDKVLSAYNKHRDKPIREQAENIIHLFTLTNLGAPAAFKYFDTTIDRKRYTSTKEVLDATLIHQSITGLYETRIDLSQLGGDGGGGSGGSGGMNPLQLLQPLPAEIKGTKLLAHWNSGATITCIPESFLEDEQPIKKTLIKTIHGEKQQNVYYVTFKVKGRKVEAEVIASPYEYILLSPTDVPWLTQQPLQLTILVPLQEYQEKILSKTALPEDQKQQLKTLFVKYDNLWQHWENQVGHRKIRPHNIATGDYPPRPQKQYPINPKAKPSIQIVIDDLLKQGVLTPQNSTMNTPVYPVPKPDGRWRMVLDYREVNKTIPLTAAQNQHSAGILATIVRQKYKTTLDLANGFWAHPITPESYWLTAFTWQGKQYCWTRLPQGFLNSPALFNADVVDLLKEIPNVQVYVDDIYLSHDDPKEHVQQLEKVFQILLQAGYVVSLKKSEIGQKTVEFLGFNITKEGRGLTDTFKTKLLNITPPKDLKQLQSILGLLNFARNFIPNFAELVQPLYNLIAPAKGKYIEWSEENTKQLNMVIEALNTASNLEERLPEQRLVIKVNTSPSAGYVRYYNETGKKPIMYLNYVFSKAELKFSMLEKLLTTMHKALIKAMDLAMGQEILVYSPIVSMTKIQKTPLPERKALPIRWITWMTYLEDPRIQFHYDKTLPELKHIPDVYTSSQSPVKHPSQYEGVFYTDGSAIKSPDPTKSNNAGMGIVHATYKPEYQVLNQWSIPLGNHTAQMAEIAAVEFACKKALKIPGPVLVITDSFYVAESANKELPYWKSNGFVNNKKKPLKHISKWKSIAECLSMKPDITIQHEKGISLQIPVFILKGNALADKLATQGSYVVNAGKRTADGSEFEKRTADGSEFESPKKKAKVE

SEQ ID NO: 6019 - protein, 2213 aa, synthetic construct
MPAAKRVKLDGGDKKYSIGLDIGTNSVGWAVITDEYKVPSKKFKVLGNTDRHSIKKNLIGALLFDSGETAEATRLKRTARRRYTRRKNRICYLQEIFSNEMAKVDDSFFHRLEESFLVEEDKKHERHPIFGNIVDEVAYHEKYPTIYHLRKKLVDSTDKADLRLIYLALAHMIKFRGHFLIEGDLNPDNSDVDKLFIQLVQTYNQLFEENPINASGVDAKAILSARLSKSRRLENLIAQLPGEKKNGLFGNLIALSLGLTPNFKSNFDLAEDAKLQLSKDTYDDDLDNLLAQIGDQYADLFLAAKNLSDAILLSDILRVNTEITKAPLSASMIKRYDEHHQDLTLLKALVRQQLPEKYKEIFFDQSKNGYAGYIDGGASQEEFYKFIKPILEKMDGTEELLVKLNREDLLRKQRTFDNGSIPHQIHLGELHAILRRQEDFYPFLKDNREKIEKILTFRIPYYVGPLARGNSRFAWMTRKSEETITPWNFEEVVDKGASAQSFIERMTNFDKNLPNEKVLPKHSLLYEYFTVYNELTKVKYVTEGMRKPAFLSGEQKKAIVDLLFKTNRKVTVKQLKEDYFKKIECFDSVEISGVEDRFNASLGTYHDLLKIIKDKDFLDNEENEDILEDIVLTLTLFEDREMIEERLKTYAHLFDDKVMKQLKRRRYTGWGRLSRKLINGIRDKQSGKTILDFLKSDGFANRNFMQLIHDDSLTFKEDIQKAQVSGQGDSLHEHIANLAGSPAIKKGILQTVKVVDELVKVMGRHKPENIVIEMARENQTTQKGQKNSRERMKRIEEGIKELGSQILKEHPVENTQLQNEKLYLYYLQNGRDMYVDQELDINRLSDYDVDHIVPQSFLKDDSIDNKVLTRSDKARGKSDNVPSEEVVKKMKNYWRQLLNAKLITQRKFDNLTKAERGGLSELDKAGFIKRQLVETRQITKHVAQILDSRMNTKYDENDKLIREVKVITLKSKLVSDFRKDFQFYKVREINNYHHAHDAYLNAVVGTALIKKYPKLESEFVYGDYKVYDVRKMIAKSEQEIGKATAKYFFYSNIMNFFKTEITLANGEIRKRPLIETNGETGEIVWDKGRDFATVRKVLSMPQVNIVKKTEVQTGGFSKESILPKRNSDKLIARKKDWDPKKYGGFDSPTVAYSVLVVAKVEKGKSKKLKSVKELLGITIMERSSFEKNPIDFLEAKGYKEVKKDLIIKLPKYSLFELENGRKRMLASAGELQKGNELALPSKYVNFLYLASHYEKLKGSPEDNEQKQLFVEQHKHYLDEIIEQISEFSKRVILADANLDKVLSAYNKHRDKPIREQAENIIHLFTLTNLGAPAAFKYFDTTIDRKRYTSTKEVLDATLIHQSITGLYETRIDLSQLGGDGGGGSGGSGGTLGDQGSRGSDPLPEPRVTLTVEGIPTEFLVNTGAEHSVLTKPMGKMGSKRTVVAGATGSKVYPWTTKRLLKIGQKQVTHSFLVIPECPAPLLGRDLLTKLKAQIQFSTEGPQVTWEDRPAMCLVLNLEEEYRLHEKPVPPSIDPSWLQLFPMVWAEKAGMGLANQVPPVVVELKSDASPVAVRQYPMSKEAREGIRPHIQRFLDLGILVPCQSPWNTPLLPVKKPGTNDYRPVQDLREVNKRVQDIHPTVPNPYNLLSSLPPSHTWYSVLDLKDAFFCLKLHPNSQPLFAFEWRDPEKGNTGQLTWTRLPQGFKNSPTLFDEALHRDLASFRALNPQVVMLQYVDDLLVAAPTYRDCKEGTRRLLQELSKLGYRVSAKKAQLCREEVTYLGYLLKGGKRWLTPARKATVMKIPTPTTPRQVREFLGTAGFCRLWIPGFASLAAPLYPLTREKVPFTWTEAHQEAFGRIKEALLSAPALALPDLTKPFALYVDEKEGVARGVLTQTLGPWRRPVAYLSKKLDPVASGWPTCLKAIAAVALLLKDADKLTLGQNVLVIAPHNLESIVRQPPDRWMTNARMTHYQSLLLNERVSFAPPAILNPATLLPVESDDTPIHICSEILAEETGTRPDLRDQPLPGVPAWYTDGSSFIMDGRRQAGAAIVDNKRTVWASNLPEGTSAQKAELIALTQALRLAEGKSINIYTDSRYAFATAHVHGAIYKQRGLLTSAGKDIKNKEEILALLEAIHLPKRVAIIHCPGHQRGTDPVATGNRKADEAAKQAAQSTRILTETTKNAGKRTADGSEFEKRTADGSEFESPKKKAKVE

SEQ ID NO: 6020 - protein, 2122 aa, synthetic construct
MPAAKRVKLDGGDKKYSIGLDIGTNSVGWAVITDEYKVPSKKFKVLGNTDRHSIKKNLIGALLFDSGETAEATRLKRTARRRYTRRKNRICYLQEIFSNEMAKVDDSFFHRLEESFLVEEDKKHERHPIFGNIVDEVAYHEKYPTIYHLRKKLVDSTDKADLRLIYLALAHMIKFRGHFLIEGDLNPDNSDVDKLFIQLVQTYNQLFEENPINASGVDAKAILSARLSKSRRLENLIAQLPGEKKNGLFGNLIALSLGLTPNFKSNFDLAEDAKLQLSKDTYDDDLDNLLAQIGDQYADLFLAAKNLSDAILLSDILRVNTEITKAPLSASMIKRYDEHHQDLTLLKALVRQQLPEKYKEIFFDQSKNGYAGYIDGGASQEEFYKFIKPILEKMDGTEELLVKLNREDLLRKQRTFDNGSIPHQIHLGELHAILRRQEDFYPFLKDNREKIEKILTFRIPYYVGPLARGNSRFAWMTRKSEETITPWNFEEVVDKGASAQSFIERMTNFDKNLPNEKVLPKHSLLYEYFTVYNELTKVKYVTEGMRKPAFLSGEQKKAIVDLLFKTNRKVTVKQLKEDYFKKIECFDSVEISGVEDRFNASLGTYHDLLKIIKDKDFLDNEENEDILEDIVLTLTLFEDREMIEERLKTYAHLFDDKVMKQLKRRRYTGWGRLSRKLINGIRDKQSGKTILDFLKSDGFANRNFMQLIHDDSLTFKEDIQKAQVSGQGDSLHEHIANLAGSPAIKKGILQTVKVVDELVKVMGRHKPENIVIEMARENQTTQKGQKNSRERMKRIEEGIKELGSQILKEHPVENTQLQNEKLYLYYLQNGRDMYVDQELDINRLSDYDVDHIVPQSFLKDDSIDNKVLTRSDKARGKSDNVPSEEVVKKMKNYWRQLLNAKLITQRKFDNLTKAERGGLSELDKAGFIKRQLVETRQITKHVAQILDSRMNTKYDENDKLIREVKVITLKSKLVSDFRKDFQFYKVREINNYHHAHDAYLNAVVGTALIKKYPKLESEFVYGDYKVYDVRKMIAKSEQEIGKATAKYFFYSNIMNFFKTEITLANGEIRKRPLIETNGETGEIVWDKGRDFATVRKVLSMPQVNIVKKTEVQTGGFSKESILPKRNSDKLIARKKDWDPKKYGGFDSPTVAYSVLVVAKVEKGKSKKLKSVKELLGITIMERSSFEKNPIDFLEAKGYKEVKKDLIIKLPKYSLFELENGRKRMLASAGELQKGNELALPSKYVNFLYLASHYEKLKGSPEDNEQKQLFVEQHKHYLDEIIEQISEFSKRVILADANLDKVLSAYNKHRDKPIREQAENIIHLFTLTNLGAPAAFKYFDTTIDRKRYTSTKEVLDATLIHQSITGLYETRIDLSQLGGDGGGGSGGSGGLLGRDLLTKLKAQIQFSTEGPQVTWEDRPAMCLVLNLEEEYRLHEKPVPPSIDPSWLQLFPMVWAEKAGMGLANQVPPVVVELKSDASPVAVRQYPMSKEAREGIRPHIQRFLDLGILVPCQSPWNTPLLPVKKPGTNDYRPVQDLREVNKRVQDIHPTVPNPYNLLSSLPPSHTWYSVLDLKDAFFCLKLHPNSQPLFAFEWRDPEKGNTGQLTWTRLPQGFKNSPTLFDEALHRDLASFRALNPQVVMLQYVDDLLVAAPTYRDCKEGTRRLLQELSKLGYRVSAKKAQLCREEVTYLGYLLKGGKRWLTPARKATVMKIPTPTTPRQVREFLGTAGFCRLWIPGFASLAAPLYPLTREKVPFTWTEAHQEAFGRIKEALLSAPALALPDLTKPFALYVDEKEGVARGVLTQTLGPWRRPVAYLSKKLDPVASGWPTCLKAIAAVALLLKDADKLTLGQNVLVIAPHNLESIVRQPPDRWMTNARMTHYQSLLLNERVSFAPPAILNPATLLPVESDDTPIHICSEILAEETGTRPDLRDQPLPGVPAWYTDGSSFIMDGRRQAGAAIVDNKRTVWASNLPEGTSAQKAELIALTQALRLAEGKSINIYTDSRYAFATAHVHGAIYKQRGLLTSAGKDIKNKEEILALLEAIHLPKRVAIIHCPGHQRGTDPVATGNRKADEAAKQAAQSTRILTETTKNAGKRTADGSEFEKRTADGSEFESPKKKAKVE

SEQ ID NO: 6021 - protein, 2213 aa, synthetic construct
MPAAKRVKLDGGDKKYSIGLDIGTNSVGWAVITDEYKVPSKKFKVLGNTDRHSIKKNLIGALLFDSGETAEATRLKRTARRRYTRRKNRICYLQEIFSNEMAKVDDSFFHRLEESFLVEEDKKHERHPIFGNIVDEVAYHEKYPTIYHLRKKLVDSTDKADLRLIYLALAHMIKFRGHFLIEGDLNPDNSDVDKLFIQLVQTYNQLFEENPINASGVDAKAILSARLSKSRRLENLIAQLPGEKKNGLFGNLIALSLGLTPNFKSNFDLAEDAKLQLSKDTYDDDLDNLLAQIGDQYADLFLAAKNLSDAILLSDILRVNTEITKAPLSASMIKRYDEHHQDLTLLKALVRQQLPEKYKEIFFDQSKNGYAGYIDGGASQEEFYKFIKPILEKMDGTEELLVKLNREDLLRKQRTFDNGSIPHQIHLGELHAILRRQEDFYPFLKDNREKIEKILTFRIPYYVGPLARGNSRFAWMTRKSEETITPWNFEEVVDKGASAQSFIERMTNFDKNLPNEKVLPKHSLLYEYFTVYNELTKVKYVTEGMRKPAFLSGEQKKAIVDLLFKTNRKVTVKQLKEDYFKKIECFDSVEISGVEDRFNASLGTYHDLLKIIKDKDFLDNEENEDILEDIVLTLTLFEDREMIEERLKTYAHLFDDKVMKQLKRRRYTGWGRLSRKLINGIRDKQSGKTILDFLKSDGFANRNFMQLIHDDSLTFKEDIQKAQVSGQGDSLHEHIANLAGSPAIKKGILQTVKVVDELVKVMGRHKPENIVIEMARENQTTQKGQKNSRERMKRIEEGIKELGSQILKEHPVENTQLQNEKLYLYYLQNGRDMYVDQELDINRLSDYDVDHIVPQSFLKDDSIDNKVLTRSDKARGKSDNVPSEEVVKKMKNYWRQLLNAKLITQRKFDNLTKAERGGLSELDKAGFIKRQLVETRQITKHVAQILDSRMNTKYDENDKLIREVKVITLKSKLVSDFRKDFQFYKVREINNYHHAHDAYLNAVVGTALIKKYPKLESEFVYGDYKVYDVRKMIAKSEQEIGKATAKYFFYSNIMNFFKTEITLANGEIRKRPLIETNGETGEIVWDKGRDFATVRKVLSMPQVNIVKKTEVQTGGFSKESILPKRNSDKLIARKKDWDPKKYGGFDSPTVAYSVLVVAKVEKGKSKKLKSVKELLGITIMERSSFEKNPIDFLEAKGYKEVKKDLIIKLPKYSLFELENGRKRMLASAGELQKGNELALPSKYVNFLYLASHYEKLKGSPEDNEQKQLFVEQHKHYLDEIIEQISEFSKRVILADANLDKVLSAYNKHRDKPIREQAENIIHLFTLTNLGAPAAFKYFDTTIDRKRYTSTKEVLDATLIHQSITGLYETRIDLSQLGGDGGGGSGGSGGTLGDQGSRGSDPLPEPRVTLTVEGIPTEFLVNTGAEHSVLTKPMGKMGSKRTVVAGATGSKVYPWTTKRLLKIGQKQVTHSFLVIPECPAPLLGRDLLTKLKAQIQFSTEGPQVTWEDRPAMCLVLNLEEEYRLHEKPVPPSIDPSWLQLFPMVWAEKAGMGLANQVPPVVVELKSDASPVAVRQYPMSKEAREGIRPHIQRFLDLGILVPCQSPWNTPLLPVKKPGTNDYRPVQDLREVNKRVQDIHPTVPNPYNLLSSLPPSHTWYSVLDLKDAFFCLKLHPNSQPLFAFEWRDPEKGNTGQLTWTRLPQGFKNSPTLFNEALHRDLASFRALNPQVVMLQYVDDLLVAAPTYRDCKEGTRRLLQELSKLGYRVSAKKAQLCREEVTYLGYLLKGGKRWLTPARKATVMKIPTPTTPRQVREFLGTAGFCRLWIPGFASLAAPLYPLTRPKVPFTWTEAHQEAFGRIKEALLSAPALALPDLTKPFALYVDEKEGVARGVLTQTLGPWRRPVAYLSKKLDPVASGWPTCLKAIAAVALLLKDADKLTLGQNVLVIAPHNLESIVRQPPDRWMTNARMTHYQSLLLNERVSFAPPAILNPATLLPVESDDTPIHICSEILAEETGTRPDLRDQPLPGVPAWYTDGSSFIMDGRRQAGAAIVDNKRTVWASNLPEGTSAQKAELIALTQALRLAEGKSINIYTDSRYAFATAHVHGAIYKQRGWLTSAGKDIKNKEEILALLEAIHLPKRVAIIHCPGHQRGTDPVATGNRKADEAAKQAAQSTRILTETTKNAGKRTADGSEFEKRTADGSEFESPKKKAKVE

SEQ ID NO: 6022 - protein, 2091 aa, synthetic construct
MPAAKRVKLDGGDKKYSIGLDIGTNSVGWAVITDEYKVPSKKFKVLGNTDRHSIKKNLIGALLFDSGETAEATRLKRTARRRYTRRKNRICYLQEIFSNEMAKVDDSFFHRLEESFLVEEDKKHERHPIFGNIVDEVAYHEKYPTIYHLRKKLVDSTDKADLRLIYLALAHMIKFRGHFLIEGDLNPDNSDVDKLFIQLVQTYNQLFEENPINASGVDAKAILSARLSKSRRLENLIAQLPGEKKNGLFGNLIALSLGLTPNFKSNFDLAEDAKLQLSKDTYDDDLDNLLAQIGDQYADLFLAAKNLSDAILLSDILRVNTEITKAPLSASMIKRYDEHHQDLTLLKALVRQQLPEKYKEIFFDQSKNGYAGYIDGGASQEEFYKFIKPILEKMDGTEELLVKLNREDLLRKQRTFDNGSIPHQIHLGELHAILRRQEDFYPFLKDNREKIEKILTFRIPYYVGPLARGNSRFAWMTRKSEETITPWNFEEVVDKGASAQSFIERMTNFDKNLPNEKVLPKHSLLYEYFTVYNELTKVKYVTEGMRKPAFLSGEQKKAIVDLLFKTNRKVTVKQLKEDYFKKIECFDSVEISGVEDRFNASLGTYHDLLKIIKDKDFLDNEENEDILEDIVLTLTLFEDREMIEERLKTYAHLFDDKVMKQLKRRRYTGWGRLSRKLINGIRDKQSGKTILDFLKSDGFANRNFMQLIHDDSLTFKEDIQKAQVSGQGDSLHEHIANLAGSPAIKKGILQTVKVVDELVKVMGRHKPENIVIEMARENQTTQKGQKNSRERMKRIEEGIKELGSQILKEHPVENTQLQNEKLYLYYLQNGRDMYVDQELDINRLSDYDVDHIVPQSFLKDDSIDNKVLTRSDKARGKSDNVPSEEVVKKMKNYWRQLLNAKLITQRKFDNLTKAERGGLSELDKAGFIKRQLVETRQITKHVAQILDSRMNTKYDENDKLIREVKVITLKSKLVSDFRKDFQFYKVREINNYHHAHDAYLNAVVGTALIKKYPKLESEFVYGDYKVYDVRKMIAKSEQEIGKATAKYFFYSNIMNFFKTEITLANGEIRKRPLIETNGETGEIVWDKGRDFATVRKVLSMPQVNIVKKTEVQTGGFSKESILPKRNSDKLIARKKDWDPKKYGGFDSPTVAYSVLVVAKVEKGKSKKLKSVKELLGITIMERSSFEKNPIDFLEAKGYKEVKKDLIIKLPKYSLFELENGRKRMLASAGELQKGNELALPSKYVNFLYLASHYEKLKGSPEDNEQKQLFVEQHKHYLDEIIEQISEFSKRVILADANLDKVLSAYNKHRDKPIREQAENIIHLFTLTNLGAPAAFKYFDTTIDRKRYTSTKEVLDATLIHQSITGLYETRIDLSQLGGDGGGGSGGSGGLGIEDEYRLHETSTEPDVSLGSTWLSDFPQAWAETGGMGLAVRQAPLIIPLKATSTPVSIQQYPMSHEARLGIKPHIQRLLDQGILVPCQSPWNTPLLPVKKPGTNDYRPVQDLREVNKRVEDIHPTVPNPYNLLSGLPPSHQWYTVLDLKDAFFCLRLHPTSQPLFAFEWRDPGMGISGQLTWTRLPQGFKNSPTLFNEALHRDLADFRIQHPDLILLQYVDDILLAATSELDCQQGTRALLQTLGDLGYRASAKKAQICQKQVKYLGYLLREGQRWLTEARKETVMGQPVPKTPRQLREFLGKAGFCRLFIPGFAEMAAPLYPLTKPGTLFSWGPDQQKAYQEIKQALLTAPALGLPDLTKPFELFVDEKQGYAKGVLTQKLGPWRRPVAYLSKKLDPVAAGWPPCLRMVAAIAVLTKDAGKLTMGQPLVILAPHAVEALVKQPPDRWLSNARMTHYQAMLLDTDRVQFGPVVALNPATLLPLPEEGAPHDCLEILAETHGTRPDLTDQPIPDADHTWYTDGSSFLQEGQRKAGAAVTTETEVIWAGALPAGTSAQRAELIALTQALKMAEGKRLNVYTDSRYAFATAHIHGEIYRRRGWLTSEGREIKNKSEILALLKALFLPKRLSIIHCLGHQKGDSAEARGNRLADQAAREAAIKTPPDTSTLLIAGKRTADGSEFEKRTADGSEFESPKKKAKVE

SEQ ID NO: 6023 - protein, 2091 aa, synthetic construct
MPAAKRVKLDGGDKKYSIGLDIGTNSVGWAVITDEYKVPSKKFKVLGNTDRHSIKKNLIGALLFDSGETAEATRLKRTARRRYTRRKNRICYLQEIFSNEMAKVDDSFFHRLEESFLVEEDKKHERHPIFGNIVDEVAYHEKYPTIYHLRKKLVDSTDKADLRLIYLALAHMIKFRGHFLIEGDLNPDNSDVDKLFIQLVQTYNQLFEENPINASGVDAKAILSARLSKSRRLENLIAQLPGEKKNGLFGNLIALSLGLTPNFKSNFDLAEDAKLQLSKDTYDDDLDNLLAQIGDQYADLFLAAKNLSDAILLSDILRVNTEITKAPLSASMIKRYDEHHQDLTLLKALVRQQLPEKYKEIFFDQSKNGYAGYIDGGASQEEFYKFIKPILEKMDGTEELLVKLNREDLLRKQRTFDNGSIPHQIHLGELHAILRRQEDFYPFLKDNREKIEKILTFRIPYYVGPLARGNSRFAWMTRKSEETITPWNFEEVVDKGASAQSFIERMTNFDKNLPNEKVLPKHSLLYEYFTVYNELTKVKYVTEGMRKPAFLSGEQKKAIVDLLFKTNRKVTVKQLKEDYFKKIECFDSVEISGVEDRFNASLGTYHDLLKIIKDKDFLDNEENEDILEDIVLTLTLFEDREMIEERLKTYAHLFDDKVMKQLKRRRYTGWGRLSRKLINGIRDKQSGKTILDFLKSDGFANRNFMQLIHDDSLTFKEDIQKAQVSGQGDSLHEHIANLAGSPAIKKGILQTVKVVDELVKVMGRHKPENIVIEMARENQTTQKGQKNSRERMKRIEEGIKELGSQILKEHPVENTQLQNEKLYLYYLQNGRDMYVDQELDINRLSDYDVDHIVPQSFLKDDSIDNKVLTRSDKARGKSDNVPSEEVVKKMKNYWRQLLNAKLITQRKFDNLTKAERGGLSELDKAGFIKRQLVETRQITKHVAQILDSRMNTKYDENDKLIREVKVITLKSKLVSDFRKDFQFYKVREINNYHHAHDAYLNAVVGTALIKKYPKLESEFVYGDYKVYDVRKMIAKSEQEIGKATAKYFFYSNIMNFFKTEITLANGEIRKRPLIETNGETGEIVWDKGRDFATVRKVLSMPQVNIVKKTEVQTGGFSKESILPKRNSDKLIARKKDWDPKKYGGFDSPTVAYSVLVVAKVEKGKSKKLKSVKELLGITIMERSSFEKNPIDFLEAKGYKEVKKDLIIKLPKYSLFELENGRKRMLASAGELQKGNELALPSKYVNFLYLASHYEKLKGSPEDNEQKQLFVEQHKHYLDEIIEQISEFSKRVILADANLDKVLSAYNKHRDKPIREQAENIIHLFTLTNLGAPAAFKYFDTTIDRKRYTSTKEVLDATLIHQSITGLYETRIDLSQLGGDGGGGSGGSGGTLGIEDEYRLHETSTEPDVSLGSTWLSDFPQAWAETGGMGLAVRQAPLIIPLKATSTPVSIQQYPMSHEARLGIKPHIQRLLDQGILVPCQSPWNTPLLPVKKPGTNDYRPVQDLREVNKRVEDIHPTVPNPYNLLSGLPPSHQWYTVLDLKDAFFCLRLHPTSQPLFAFEWRDPGMGISGQLTWTRLPQGFKNSPTLFNEALHRDLADFRIQHPDLILLQYVDDILLAATSELDCQQGTRALLQTLGDLGYRASAKKAQICQKQVKYLGYLLREGQRWLTEARKETVMGQPVPKTPRQLREFLGTAGFCRLWIPGFAEMAAPLYPLTKPGTLFSWGPDQQKAYQEIKQALLTAPALGLPDLTKPFELFVDEKQGYAKGVLTQKLGPWRRPVAYLSKKLDPVAAGWPPCLRMVAAIAVLTKDAGKLTMGQPLVILAPHAVEALVKQPPDRWLSNARMTHYQAMLLDTDRVQFGPVVALNPATLLPLPEEGAPHDCLEILAETHGTRPDLTDQPIPDADHTWYTDGSSFLQEGQRKAGAAVTTETEVIWAGALPAGTSAQRAELIALTQALKMAEGKRLNVYTDSRYAFATAHIHGEIYRRRGWLTSEGREIKNKSEILALLKALFLPKRLSIIHCLGHQKGDSAEARGNRLADQAAREAAIKTPPDTSTLLAGKRTADGSEFEKRTADGSEFESPKKKAKVE

SEQ ID NO: 6024 - protein, 2091 aa, synthetic construct
MPAAKRVKLDGGDKKYSIGLDIGTNSVGWAVITDEYKVPSKKFKVLGNTDRHSIKKNLIGALLFDSGETAEATRLKRTARRRYTRRKNRICYLQEIFSNEMAKVDDSFFHRLEESFLVEEDKKHERHPIFGNIVDEVAYHEKYPTIYHLRKKLVDSTDKADLRLIYLALAHMIKFRGHFLIEGDLNPDNSDVDKLFIQLVQTYNQLFEENPINASGVDAKAILSARLSKSRRLENLIAQLPGEKKNGLFGNLIALSLGLTPNFKSNFDLAEDAKLQLSKDTYDDDLDNLLAQIGDQYADLFLAAKNLSDAILLSDILRVNTEITKAPLSASMIKRYDEHHQDLTLLKALVRQQLPEKYKEIFFDQSKNGYAGYIDGGASQEEFYKFIKPILEKMDGTEELLVKLNREDLLRKQRTFDNGSIPHQIHLGELHAILRRQEDFYPFLKDNREKIEKILTFRIPYYVGPLARGNSRFAWMTRKSEETITPWNFEEVVDKGASAQSFIERMTNFDKNLPNEKVLPKHSLLYEYFTVYNELTKVKYVTEGMRKPAFLSGEQKKAIVDLLFKTNRKVTVKQLKEDYFKKIECFDSVEISGVEDRFNASLGTYHDLLKIIKDKDFLDNEENEDILEDIVLTLTLFEDREMIEERLKTYAHLFDDKVMKQLKRRRYTGWGRLSRKLINGIRDKQSGKTILDFLKSDGFANRNFMQLIHDDSLTFKEDIQKAQVSGQGDSLHEHIANLAGSPAIKKGILQTVKVVDELVKVMGRHKPENIVIEMARENQTTQKGQKNSRERMKRIEEGIKELGSQILKEHPVENTQLQNEKLYLYYLQNGRDMYVDQELDINRLSDYDVDHIVPQSFLKDDSIDNKVLTRSDKARGKSDNVPSEEVVKKMKNYWRQLLNAKLITQRKFDNLTKAERGGLSELDKAGFIKRQLVETRQITKHVAQILDSRMNTKYDENDKLIREVKVITLKSKLVSDFRKDFQFYKVREINNYHHAHDAYLNAVVGTALIKKYPKLESEFVYGDYKVYDVRKMIAKSEQEIGKATAKYFFYSNIMNFFKTEITLANGEIRKRPLIETNGETGEIVWDKGRDFATVRKVLSMPQVNIVKKTEVQTGGFSKESILPKRNSDKLIARKKDWDPKKYGGFDSPTVAYSVLVVAKVEKGKSKKLKSVKELLGITIMERSSFEKNPIDFLEAKGYKEVKKDLIIKLPKYSLFELENGRKRMLASAGELQKGNELALPSKYVNFLYLASHYEKLKGSPEDNEQKQLFVEQHKHYLDEIIEQISEFSKRVILADANLDKVLSAYNKHRDKPIREQAENIIHLFTLTNLGAPAAFKYFDTTIDRKRYTSTKEVLDATLIHQSITGLYETRIDLSQLGGDGGGGSGGSGGTLNIEDEYRLHETSKEPDVSLGSTWLSDFPQAWAETGGMGLAVRQAPLIIPLKATSTPVSIKQYPMSQEARLGIKPHIQRLLDQGILVPCQSPWNTPLLPVKKPGTNDYRPVQDLREVNKRVEDIHPTVPNPYNLLSGLPPSHQWYTVLDLKDAFFCLRLHPTSQPLFAFEWRDPEMGISGQLTWTRLPQGFKNSPTLFNEALHRDLAGFRIQHPDLILLQYVDDLLLAATSELDCQQGTRALLQTLGDLGYRASAKKAQICQKQVKYLGYLLKEGQRWLTEARKETVMGQPIPKTPRQLREFLGTAGFCRLWIPGFAEMAAPLYPLTKPGTLFNWGPDQQKAFQEIKQALLTAPALGLPDLTKPFELFVDEKQGYAKGVLTQKLGPWRRPVAYLSKKLDPVAAGWPPCLRMVAAIAVLTKDAGKLTMGQPLVILAPHAVEALVKQPPDRWLSNARMTHYQALLLDTDRVQFGPVVALNPATLLPLPEEGLQHDCLDILAEAHGTRSDLMDQPLPDADHTWYTDGSSFLQEGQRKAGAAVTTETEVIWARALPAGTSAQRAELIALTQALKMAEGKKLNVYTDSRYAFATAHIHGEIYRRRGWLTSEGKEIKNKDEILALLKALFLPKRLSIIHCPGHQKGNSAEARGNRMADQAAREVATRETPETSTLLAGKRTADGSEFEKRTADGSEFESPKKKAKVE

SEQ ID NO: 6025 - protein, 2091 aa, synthetic construct
MPAAKRVKLDGGDKKYSIGLDIGTNSVGWAVITDEYKVPSKKFKVLGNTDRHSIKKNLIGALLFDSGETAEATRLKRTARRRYTRRKNRICYLQEIFSNEMAKVDDSFFHRLEESFLVEEDKKHERHPIFGNIVDEVAYHEKYPTIYHLRKKLVDSTDKADLRLIYLALAHMIKFRGHFLIEGDLNPDNSDVDKLFIQLVQTYNQLFEENPINASGVDAKAILSARLSKSRRLENLIAQLPGEKKNGLFGNLIALSLGLTPNFKSNFDLAEDAKLQLSKDTYDDDLDNLLAQIGDQYADLFLAAKNLSDAILLSDILRVNTEITKAPLSASMIKRYDEHHQDLTLLKALVRQQLPEKYKEIFFDQSKNGYAGYIDGGASQEEFYKFIKPILEKMDGTEELLVKLNREDLLRKQRTFDNGSIPHQIHLGELHAILRRQEDFYPFLKDNREKIEKILTFRIPYYVGPLARGNSRFAWMTRKSEETITPWNFEEVVDKGASAQSFIERMTNFDKNLPNEKVLPKHSLLYEYFTVYNELTKVKYVTEGMRKPAFLSGEQKKAIVDLLFKTNRKVTVKQLKEDYFKKIECFDSVEISGVEDRFNASLGTYHDLLKIIKDKDFLDNEENEDILEDIVLTLTLFEDREMIEERLKTYAHLFDDKVMKQLKRRRYTGWGRLSRKLINGIRDKQSGKTILDFLKSDGFANRNFMQLIHDDSLTFKEDIQKAQVSGQGDSLHEHIANLAGSPAIKKGILQTVKVVDELVKVMGRHKPENIVIEMARENQTTQKGQKNSRERMKRIEEGIKELGSQILKEHPVENTQLQNEKLYLYYLQNGRDMYVDQELDINRLSDYDVDHIVPQSFLKDDSIDNKVLTRSDKARGKSDNVPSEEVVKKMKNYWRQLLNAKLITQRKFDNLTKAERGGLSELDKAGFIKRQLVETRQITKHVAQILDSRMNTKYDENDKLIREVKVITLKSKLVSDFRKDFQFYKVREINNYHHAHDAYLNAVVGTALIKKYPKLESEFVYGDYKVYDVRKMIAKSEQEIGKATAKYFFYSNIMNFFKTEITLANGEIRKRPLIETNGETGEIVWDKGRDFATVRKVLSMPQVNIVKKTEVQTGGFSKESILPKRNSDKLIARKKDWDPKKYGGFDSPTVAYSVLVVAKVEKGKSKKLKSVKELLGITIMERSSFEKNPIDFLEAKGYKEVKKDLIIKLPKYSLFELENGRKRMLASAGELQKGNELALPSKYVNFLYLASHYEKLKGSPEDNEQKQLFVEQHKHYLDEIIEQISEFSKRVILADANLDKVLSAYNKHRDKPIREQAENIIHLFTLTNLGAPAAFKYFDTTIDRKRYTSTKEVLDATLIHQSITGLYETRIDLSQLGGDGGGGSGGSGGTLNIEDEHRLHETSKEPDVSLGSTWLSDFPQAWAETGGMGLAVRQAPLIIPLKATSTPVSIKQYPMSQEARLGIKPHIQRLLDQGILVPCQSPWNTPLLPVKKPGTNDYRPVQDLREVNKRVEDIHPTVPNPYNLLSGLPPSHQWYTVLDLKDAFFCLRLHPTSQPLFAFEWRDPEMGISGQLTWTRLPQGFKNSPTLFNEALHRDLADFRIQHPDLILLQYVDDLLLAATSELDCQQGTRALLQTLGNLGYRASAKKAQICQKQVKYLGYLLKEGQRWLTEARKETVMGQPTPKTPRQLREFLGTAGFCRLWIPGFAEMAAPLYPLTKPGTLFNWGPDQQKAYQEIKQALLTAPALGLPDLTKPFELFVDEKQGYAKGVLTQKLGPWRRPVAYLSKKLDPVAAGWPPCLRMVAAIAVLTKDAGKLTMGQPLVILAPHAVEALVKQPPDRWLSNARMTHYQALLLDTDRVQFGPVVALNPATLLPLPEEGLQHNCLDILAEAHGTRPDLTDQPLPDADHTWYTDGSSLLQEGQRKAGAAVTTETEVIWAKALPAGTSAQRAELIALTQALKMAEGKKLNVYTDSRYAFATAHIHGEIYRRRGWLTSEGKEIKNKDEILALLKALFLPKRLSIIHCPGHQKGHSAEARGNRMADQAARKAAITETPDTSTLLAGKRTADGSEFEKRTADGSEFESPKKKAKVE

SEQ ID NO: 6026 - protein, 2085 aa, synthetic construct
MPAAKRVKLDGGDKKYSIGLDIGTNSVGWAVITDEYKVPSKKFKVLGNTDRHSIKKNLIGALLFDSGETAEATRLKRTARRRYTRRKNRICYLQEIFSNEMAKVDDSFFHRLEESFLVEEDKKHERHPIFGNIVDEVAYHEKYPTIYHLRKKLVDSTDKADLRLIYLALAHMIKFRGHFLIEGDLNPDNSDVDKLFIQLVQTYNQLFEENPINASGVDAKAILSARLSKSRRLENLIAQLPGEKKNGLFGNLIALSLGLTPNFKSNFDLAEDAKLQLSKDTYDDDLDNLLAQIGDQYADLFLAAKNLSDAILLSDILRVNTEITKAPLSASMIKRYDEHHQDLTLLKALVRQQLPEKYKEIFFDQSKNGYAGYIDGGASQEEFYKFIKPILEKMDGTEELLVKLNREDLLRKQRTFDNGSIPHQIHLGELHAILRRQEDFYPFLKDNREKIEKILTFRIPYYVGPLARGNSRFAWMTRKSEETITPWNFEEVVDKGASAQSFIERMTNFDKNLPNEKVLPKHSLLYEYFTVYNELTKVKYVTEGMRKPAFLSGEQKKAIVDLLFKTNRKVTVKQLKEDYFKKIECFDSVEISGVEDRFNASLGTYHDLLKIIKDKDFLDNEENEDILEDIVLTLTLFEDREMIEERLKTYAHLFDDKVMKQLKRRRYTGWGRLSRKLINGIRDKQSGKTILDFLKSDGFANRNFMQLIHDDSLTFKEDIQKAQVSGQGDSLHEHIANLAGSPAIKKGILQTVKVVDELVKVMGRHKPENIVIEMARENQTTQKGQKNSRERMKRIEEGIKELGSQILKEHPVENTQLQNEKLYLYYLQNGRDMYVDQELDINRLSDYDVDHIVPQSFLKDDSIDNKVLTRSDKARGKSDNVPSEEVVKKMKNYWRQLLNAKLITQRKFDNLTKAERGGLSELDKAGFIKRQLVETRQITKHVAQILDSRMNTKYDENDKLIREVKVITLKSKLVSDFRKDFQFYKVREINNYHHAHDAYLNAVVGTALIKKYPKLESEFVYGDYKVYDVRKMIAKSEQEIGKATAKYFFYSNIMNFFKTEITLANGEIRKRPLIETNGETGEIVWDKGRDFATVRKVLSMPQVNIVKKTEVQTGGFSKESILPKRNSDKLIARKKDWDPKKYGGFDSPTVAYSVLVVAKVEKGKSKKLKSVKELLGITIMERSSFEKNPIDFLEAKGYKEVKKDLIIKLPKYSLFELENGRKRMLASAGELQKGNELALPSKYVNFLYLASHYEKLKGSPEDNEQKQLFVEQHKHYLDEIIEQISEFSKRVILADANLDKVLSAYNKHRDKPIREQAENIIHLFTLTNLGAPAAFKYFDTTIDRKRYTSTKEVLDATLIHQSITGLYETRIDLSQLGGDGGGGSGGSGGTLQLDDEYRLYSPLVKPDQNIQFWLEQFPQAWAETAGMGLAKQVPPQVIQLKASATPVSVRQYPLSKEAQEGIRPHVQRLIQQGILVPVQSPWNTPLLPVRKPGTNDYRPVQDLREVNKRVQDIHPTVPNPYNLLCALPPQRSWYTVLDLKDAFFCLRLHPTSQPLFAFEWRDPGTGRTGQLTWTRLPQGFKNSPTIFDEALHRDLANFRIQHPQVTLLQYVDDLLLAGATKQDCLEGTKALLLELSDLGYRASAKKAQICRREVTYLGYSLRDGQRWLTEARKKTVVQIPAPTTAKQVREFLGTAGFCRLWIPGFATLAAPLYPLTKEKGEFSWAPEHQKAFDAIKKALLSAPALALPDVTKPFTLYVDERKGVARGVLTQTLGPWRRPVAYLSKKLDPVASGWPVCLKAIAAVAILVKDADKLTLGQNITVIAPHALENIVRQPPDRWMTNARMTHYQSLLLTERVTFAPPAALNPATLLPEETDEPVTHDCHQLLIEETGVRKDLTDIPLTGEVLTWFTDGSSYVVEGKRMAGAAVVDGTRTIWASSLPEGTSAQKAELMALTQALRLAEGKSINIYTDSRYAFATAHVHGAIYKQRGLLTSAGREIKNKEEILSLLEALHLPKRLAIIHCPGHQKAKDPISRGNQMADRVAKQAAQGVNLLAGKRTADGSEFEKRTADGSEFESPKKKAKVE

SEQ ID NO: 6027 - protein, 2171 aa, synthetic construct
MPAAKRVKLDGGDKKYSIGLDIGTNSVGWAVITDEYKVPSKKFKVLGNTDRHSIKKNLIGALLFDSGETAEATRLKRTARRRYTRRKNRICYLQEIFSNEMAKVDDSFFHRLEESFLVEEDKKHERHPIFGNIVDEVAYHEKYPTIYHLRKKLVDSTDKADLRLIYLALAHMIKFRGHFLIEGDLNPDNSDVDKLFIQLVQTYNQLFEENPINASGVDAKAILSARLSKSRRLENLIAQLPGEKKNGLFGNLIALSLGLTPNFKSNFDLAEDAKLQLSKDTYDDDLDNLLAQIGDQYADLFLAAKNLSDAILLSDILRVNTEITKAPLSASMIKRYDEHHQDLTLLKALVRQQLPEKYKEIFFDQSKNGYAGYIDGGASQEEFYKFIKPILEKMDGTEELLVKLNREDLLRKQRTFDNGSIPHQIHLGELHAILRRQEDFYPFLKDNREKIEKILTFRIPYYVGPLARGNSRFAWMTRKSEETITPWNFEEVVDKGASAQSFIERMTNFDKNLPNEKVLPKHSLLYEYFTVYNELTKVKYVTEGMRKPAFLSGEQKKAIVDLLFKTNRKVTVKQLKEDYFKKIECFDSVEISGVEDRFNASLGTYHDLLKIIKDKDFLDNEENEDILEDIVLTLTLFEDREMIEERLKTYAHLFDDKVMKQLKRRRYTGWGRLSRKLINGIRDKQSGKTILDFLKSDGFANRNFMQLIHDDSLTFKEDIQKAQVSGQGDSLHEHIANLAGSPAIKKGILQTVKVVDELVKVMGRHKPENIVIEMARENQTTQKGQKNSRERMKRIEEGIKELGSQILKEHPVENTQLQNEKLYLYYLQNGRDMYVDQELDINRLSDYDVDHIVPQSFLKDDSIDNKVLTRSDKARGKSDNVPSEEVVKKMKNYWRQLLNAKLITQRKFDNLTKAERGGLSELDKAGFIKRQLVETRQITKHVAQILDSRMNTKYDENDKLIREVKVITLKSKLVSDFRKDFQFYKVREINNYHHAHDAYLNAVVGTALIKKYPKLESEFVYGDYKVYDVRKMIAKSEQEIGKATAKYFFYSNIMNFFKTEITLANGEIRKRPLIETNGETGEIVWDKGRDFATVRKVLSMPQVNIVKKTEVQTGGFSKESILPKRNSDKLIARKKDWDPKKYGGFDSPTVAYSVLVVAKVEKGKSKKLKSVKELLGITIMERSSFEKNPIDFLEAKGYKEVKKDLIIKLPKYSLFELENGRKRMLASAGELQKGNELALPSKYVNFLYLASHYEKLKGSPEDNEQKQLFVEQHKHYLDEIIEQISEFSKRVILADANLDKVLSAYNKHRDKPIREQAENIIHLFTLTNLGAPAAFKYFDTTIDRKRYTSTKEVLDATLIHQSITGLYETRIDLSQLGGDGGGGSGGSGGMDPLQLLQPLEAEIKGTKLKAHWNSGATITCVPQAFLEEEVPIKNIWIKTIHGEKEQPVYYLTFKIQGRKVEAEVISSPYDYILVSPSDIPWLMKKPLQLTTLVPLQEYEERLLKQTMLTGSYKEKLQSLFLKYDALWQHWENQVGHRRIKPHHIATGTVNPRPQKQYPINPKAKASIQTVINDLLKQGVLIQQNSIMNTPVYPVPKPDGKWRMVLDYREVNKTIPLIAAQNQHSAGILSSIFRGKYKTTLDLSNGFWAHSITPESYWLTAFTWLGQQYCWTRLPQGFLNSPALFNADVVDLLKEVPNVQVYVDDIYISHDDPREHLEQLEKVFSLLLNAGYVVSLKKSEIAQHEVEFLGFNITKEGRGLTETFKQKLLNITPPRDLKQLQSILGLLNFARNFIPNFSELVKPLYNIIATAPGKYITWTTDNSQQLQNIISMLNSAENLEERNPEVRLIMKVNTSPSAGYIRFYNEFAKRPIMYLNYVYTKAEVKFTNTEKLLTTIHKGLIKALDLGMGQEILVYSPIVSMTKIQKTPLPERKALPIRWITWMSYLEDPRIQFHYDKTLPELQQVPTVTDDIIAKIKHPSEFSMVFYTDGSAIKHPNVNKSHNAGMGIAQVQFKPEFTVINTWSIPLGDHTAQLAEVAAVEFACKKALKIDGPVLIVTDSFYVAESVNKELPYWQSNGFFNNKKKPLKHVSKWKSIADCIQLKPDIIIIHEKGHQPTASTFHTEGNNLADKLATQGSYVVNAGKRTADGSEFEKRTADGSEFESPKKKAKVE

SEQ ID NO: 6028 - protein, 2091 aa, synthetic construct
MPAAKRVKLDGGDKKYSIGLDIGTNSVGWAVITDEYKVPSKKFKVLGNTDRHSIKKNLIGALLFDSGETAEATRLKRTARRRYTRRKNRICYLQEIFSNEMAKVDDSFFHRLEESFLVEEDKKHERHPIFGNIVDEVAYHEKYPTIYHLRKKLVDSTDKADLRLIYLALAHMIKFRGHFLIEGDLNPDNSDVDKLFIQLVQTYNQLFEENPINASGVDAKAILSARLSKSRRLENLIAQLPGEKKNGLFGNLIALSLGLTPNFKSNFDLAEDAKLQLSKDTYDDDLDNLLAQIGDQYADLFLAAKNLSDAILLSDILRVNTEITKAPLSASMIKRYDEHHQDLTLLKALVRQQLPEKYKEIFFDQSKNGYAGYIDGGASQEEFYKFIKPILEKMDGTEELLVKLNREDLLRKQRTFDNGSIPHQIHLGELHAILRRQEDFYPFLKDNREKIEKILTFRIPYYVGPLARGNSRFAWMTRKSEETITPWNFEEVVDKGASAQSFIERMTNFDKNLPNEKVLPKHSLLYEYFTVYNELTKVKYVTEGMRKPAFLSGEQKKAIVDLLFKTNRKVTVKQLKEDYFKKIECFDSVEISGVEDRFNASLGTYHDLLKIIKDKDFLDNEENEDILEDIVLTLTLFEDREMIEERLKTYAHLFDDKVMKQLKRRRYTGWGRLSRKLINGIRDKQSGKTILDFLKSDGFANRNFMQLIHDDSLTFKEDIQKAQVSGQGDSLHEHIANLAGSPAIKKGILQTVKVVDELVKVMGRHKPENIVIEMARENQTTQKGQKNSRERMKRIEEGIKELGSQILKEHPVENTQLQNEKLYLYYLQNGRDMYVDQELDINRLSDYDVDHIVPQSFLKDDSIDNKVLTRSDKARGKSDNVPSEEVVKKMKNYWRQLLNAKLITQRKFDNLTKAERGGLSELDKAGFIKRQLVETRQITKHVAQILDSRMNTKYDENDKLIREVKVITLKSKLVSDFRKDFQFYKVREINNYHHAHDAYLNAVVGTALIKKYPKLESEFVYGDYKVYDVRKMIAKSEQEIGKATAKYFFYSNIMNFFKTEITLANGEIRKRPLIETNGETGEIVWDKGRDFATVRKVLSMPQVNIVKKTEVQTGGFSKESILPKRNSDKLIARKKDWDPKKYGGFDSPTVAYSVLVVAKVEKGKSKKLKSVKELLGITIMERSSFEKNPIDFLEAKGYKEVKKDLIIKLPKYSLFELENGRKRMLASAGELQKGNELALPSKYVNFLYLASHYEKLKGSPEDNEQKQLFVEQHKHYLDEIIEQISEFSKRVILADANLDKVLSAYNKHRDKPIREQAENIIHLFTLTNLGAPAAFKYFDTTIDRKRYTSTKEVLDATLIHQSITGLYETRIDLSQLGGDGGGGSGGSGGTLNIEDEYRLHETSKEPDVPLGSTWLSDFPQAWAETGGMGLAVRQAPLIIPLKATSTPVSIKQYPMSQEARLGIKPHIQRLLDQGILVPCQSPWNTPLLPVKKPGTNDYRPVQDLREVNKRVEDIHPTVPNPYNLLSGLPPSHQWYTVLDLKDAFFCLRLHPTSQPLFAFEWRDPEMGISGQLTWTRLPQGFKNSPTLFNEALHRDLADFRIQHPDLILLQYVDDLLLAATSEQDCQRGTRALLQTLGNLGYRASAKKAQICQKQVKYLGYLLKEGQRWLTEARKETVMGQPTPKTPRQLREFLGTAGFCRLWIPGFAEMAAPLYPLTKPGTLFNWGPDQQKAYQEIKQALLTAPALGLPDLTKPFELFVDEKQGYAKGVLTQKLGPWRRPVAYLSKKLDPVAAGWPPCLRMVAAIAVLTKDAGKLTMGQPLVILAPHAVEALVKQPPDRWLSNARMTHYQAMLLDTDRVQFGPVVALNPATLLPLPEKEAPHDCLEILAETHGTRPDLTDQPIPDADYTWYTDGSSFLQEGQRRAGAAVTTETEVIWARALPAGTSAQRAELIALTQALKMAEGKKLNVYTDSRYAFATAHVHGEIYRRRGWLTSEGREIKNKNEILALLKALFLPKRLSIIHCPGHQKGNSAEARGNRMADQAAREAAMKAVLETSTLLAGKRTADGSEFEKRTADGSEFESPKKKAKVE

SEQ ID NO: 6029 - protein, 2096 aa, synthetic construct
MPAAKRVKLDGGDKKYSIGLDIGTNSVGWAVITDEYKVPSKKFKVLGNTDRHSIKKNLIGALLFDSGETAEATRLKRTARRRYTRRKNRICYLQEIFSNEMAKVDDSFFHRLEESFLVEEDKKHERHPIFGNIVDEVAYHEKYPTIYHLRKKLVDSTDKADLRLIYLALAHMIKFRGHFLIEGDLNPDNSDVDKLFIQLVQTYNQLFEENPINASGVDAKAILSARLSKSRRLENLIAQLPGEKKNGLFGNLIALSLGLTPNFKSNFDLAEDAKLQLSKDTYDDDLDNLLAQIGDQYADLFLAAKNLSDAILLSDILRVNTEITKAPLSASMIKRYDEHHQDLTLLKALVRQQLPEKYKEIFFDQSKNGYAGYIDGGASQEEFYKFIKPILEKMDGTEELLVKLNREDLLRKQRTFDNGSIPHQIHLGELHAILRRQEDFYPFLKDNREKIEKILTFRIPYYVGPLARGNSRFAWMTRKSEETITPWNFEEVVDKGASAQSFIERMTNFDKNLPNEKVLPKHSLLYEYFTVYNELTKVKYVTEGMRKPAFLSGEQKKAIVDLLFKTNRKVTVKQLKEDYFKKIECFDSVEISGVEDRFNASLGTYHDLLKIIKDKDFLDNEENEDILEDIVLTLTLFEDREMIEERLKTYAHLFDDKVMKQLKRRRYTGWGRLSRKLINGIRDKQSGKTILDFLKSDGFANRNFMQLIHDDSLTFKEDIQKAQVSGQGDSLHEHIANLAGSPAIKKGILQTVKVVDELVKVMGRHKPENIVIEMARENQTTQKGQKNSRERMKRIEEGIKELGSQILKEHPVENTQLQNEKLYLYYLQNGRDMYVDQELDINRLSDYDVDHIVPQSFLKDDSIDNKVLTRSDKARGKSDNVPSEEVVKKMKNYWRQLLNAKLITQRKFDNLTKAERGGLSELDKAGFIKRQLVETRQITKHVAQILDSRMNTKYDENDKLIREVKVITLKSKLVSDFRKDFQFYKVREINNYHHAHDAYLNAVVGTALIKKYPKLESEFVYGDYKVYDVRKMIAKSEQEIGKATAKYFFYSNIMNFFKTEITLANGEIRKRPLIETNGETGEIVWDKGRDFATVRKVLSMPQVNIVKKTEVQTGGFSKESILPKRNSDKLIARKKDWDPKKYGGFDSPTVAYSVLVVAKVEKGKSKKLKSVKELLGITIMERSSFEKNPIDFLEAKGYKEVKKDLIIKLPKYSLFELENGRKRMLASAGELQKGNELALPSKYVNFLYLASHYEKLKGSPEDNEQKQLFVEQHKHYLDEIIEQISEFSKRVILADANLDKVLSAYNKHRDKPIREQAENIIHLFTLTNLGAPAAFKYFDTTIDRKRYTSTKEVLDATLIHQSITGLYETRIDLSQLGGDGGGGSGGSGGSGGTAPLEEEYRLFLEAPIQNVTLLEQWKREIPKVWAEINPPGLASTQAPIHVQLLSTALPVRVRQYPITLEAKRSLRETIRKFRAAGILRPVHSPWNTPLLPVRKSGTSEYRMVQDLREVNKRVETIHPTVPNPYTLLSLLPPDRIWYSVLDLKDAFFCIPLAPESQLIFAFEWADAEEGESGQLTWTRLPQGFKNSPTLFNEALNRDLQGFRLDHPSVSLLQYVDDLLIAADTQAACLSATRDLLMTLAELGYRVSGKKAQLCQEEVTYLGFKIHKGSRSLSNSRTQAILQIPVPKTKRQVREFLGTIGYCRLWIPGFAELAQPLYAATRPGNDPLVWGEKEEEAFQSLKLALTQPPALALPSLDKPFQLFVEETSGAAKGVLTQALGPWKRPVAYLSKRLDPVAAGWPRCLRAIAAAALLTREASKLTFGQDIEITSSHNLESLLRSPPDKWLTNARITQYQVLLLDPPRVRFKQTAALNPATLLPETDDTLPIHHCLDTLDSLTSTRPDLTDQPLAQAEATLFTDGSSYIRDGKRYAGAAVVTLDSVIWAEPLPIGTSAQKAELIALTKALEWSKDKSVNIYTDSRYAFATLHVHGMIYRERGWLTAGGKAIKNAPEILALLTAVWLPKRVAVMHCKGHQKDDAPTSTGNRRADEVAREVAIRPLSTQATISAGKRTADGSEFEKRTADGSEFESPKKKAKVE

SEQ ID NO: 6030 - protein, 2096 aa, synthetic construct; identical to SEQ ID NO: 4501

SEQ ID NO: 6031 - protein, 2093 aa, synthetic construct
MPAAKRVKLDGGDKKYSIGLDIGTNSVGWAVITDEYKVPSKKFKVLGNTDRHSIKKNLIGALLFDSGETAEATRLKRTARRRYTRRKNRICYLQEIFSNEMAKVDDSFFHRLEESFLVEEDKKHERHPIFGNIVDEVAYHEKYPTIYHLRKKLVDSTDKADLRLIYLALAHMIKFRGHFLIEGDLNPDNSDVDKLFIQLVQTYNQLFEENPINASGVDAKAILSARLSKSRRLENLIAQLPGEKKNGLFGNLIALSLGLTPNFKSNFDLAEDAKLQLSKDTYDDDLDNLLAQIGDQYADLFLAAKNLSDAILLSDILRVNTEITKAPLSASMIKRYDEHHQDLTLLKALVRQQLPEKYKEIFFDQSKNGYAGYIDGGASQEEFYKFIKPILEKMDGTEELLVKLNREDLLRKQRTFDNGSIPHQIHLGELHAILRRQEDFYPFLKDNREKIEKILTFRIPYYVGPLARGNSRFAWMTRKSEETITPWNFEEVVDKGASAQSFIERMTNFDKNLPNEKVLPKHSLLYEYFTVYNELTKVKYVTEGMRKPAFLSGEQKKAIVDLLFKTNRKVTVKQLKEDYFKKIECFDSVEISGVEDRFNASLGTYHDLLKIIKDKDFLDNEENEDILEDIVLTLTLFEDREMIEERLKTYAHLFDDKVMKQLKRRRYTGWGRLSRKLINGIRDKQSGKTILDFLKSDGFANRNFMQLIHDDSLTFKEDIQKAQVSGQGDSLHEHIANLAGSPAIKKGILQTVKVVDELVKVMGRHKPENIVIEMARENQTTQKGQKNSRERMKRIEEGIKELGSQILKEHPVENTQLQNEKLYLYYLQNGRDMYVDQELDINRLSDYDVDHIVPQSFLKDDSIDNKVLTRSDKARGKSDNVPSEEVVKKMKNYWRQLLNAKLITQRKFDNLTKAERGGLSELDKAGFIKRQLVETRQITKHVAQILDSRMNTKYDENDKLIREVKVITLKSKLVSDFRKDFQFYKVREINNYHHAHDAYLNAVVGTALIKKYPKLESEFVYGDYKVYDVRKMIAKSEQEIGKATAKYFFYSNIMNFFKTEITLANGEIRKRPLIETNGETGEIVWDKGRDFATVRKVLSMPQVNIVKKTEVQTGGFSKESILPKRNSDKLIARKKDWDPKKYGGFDSPTVAYSVLVVAKVEKGKSKKLKSVKELLGITIMERSSFEKNPIDFLEAKGYKEVKKDLIIKLPKYSLFELENGRKRMLASAGELQKGNELALPSKYVNFLYLASHYEKLKGSPEDNEQKQLFVEQHKHYLDEIIEQISEFSKRVILADANLDKVLSAYNKHRDKPIREQAENIIHLFTLTNLGAPAAFKYFDTTIDRKRYTSTKEVLDATLIHQSITGLYETRIDLSQLGGDGGGGSGGSGGSGGTLQLEEEYRLFEPESTQKQEMDIWLKNFPQAWAETGGMGTAHCQAPVLIQLKATATPISIRQYPMPHEAYQGIKPHIRRMLDQGILKPCQSPWNTPLLPVKKPGTEDYRPVQDLREVNKRVEDIHPTVPNPYNLLSTLPPSHPWYTVLDLKDAFFCLRLHSESQLLFAFEWRDPEIGLSGQLTWTRLPQGFKNSPTLFNEALHSDLADFRVRYPALVLLQYVDDLLLAAATRTECLEGTKALLETLGNKGYRASAKKAQICLQEVTYLGYSLKDGQRWLTKARKEAILSIPVPKNSRQVREFLGKAGYCRLFIPGFAELAAPLYPLTRPGTLFQWGTEQQLAFEDIKKALLSSPALGLPDITKPFELFIDENSGFAKGVLVQKLGPWKRPVAYLSKKLDTVASGWPPCLRMVAAIAILVKDAGKLTLGQPLTILTSHPVEALVRQPPNKWLSNARMTHYQAMLLDAERVHFGPTVSLNPATLLPLPSGGNHHDCLQILAETHGTRPDLTDQPLPDADLTWYTDGSSFIRNGEREAGAAVTTESEVIWAAPLPPGTSAQRAELIALTQALKMAEGKKLTVYTDSRYAFATTHVHGEIYRRRGWLTSEGKEIKNKNEILALLEALFLPKRLSIIHCPGHQKGDSPQAKGNRLADDTAKKAATETHSSLTVLPAGKRTADGSEFEKRTADGSEFESPKKKAKVE

SEQ ID NO: 6032 - protein, 2094 aa, synthetic construct
MPAAKRVKLDGGDKKYSIGLDIGTNSVGWAVITDEYKVPSKKFKVLGNTDRHSIKKNLIGALLFDSGETAEATRLKRTARRRYTRRKNRICYLQEIFSNEMAKVDDSFFHRLEESFLVEEDKKHERHPIFGNIVDEVAYHEKYPTIYHLRKKLVDSTDKADLRLIYLALAHMIKFRGHFLIEGDLNPDNSDVDKLFIQLVQTYNQLFEENPINASGVDAKAILSARLSKSRRLENLIAQLPGEKKNGLFGNLIALSLGLTPNFKSNFDLAEDAKLQLSKDTYDDDLDNLLAQIGDQYADLFLAAKNLSDAILLSDILRVNTEITKAPLSASMIKRYDEHHQDLTLLKALVRQQLPEKYKEIFFDQSKNGYAGYIDGGASQEEFYKFIKPILEKMDGTEELLVKLNREDLLRKQRTFDNGSIPHQIHLGELHAILRRQEDFYPFLKDNREKIEKILTFRIPYYVGPLARGNSRFAWMTRKSEETITPWNFEEVVDKGASAQSFIERMTNFDKNLPNEKVLPKHSLLYEYFTVYNELTKVKYVTEGMRKPAFLSGEQKKAIVDLLFKTNRKVTVKQLKEDYFKKIECFDSVEISGVEDRFNASLGTYHDLLKIIKDKDFLDNEENEDILEDIVLTLTLFEDREMIEERLKTYAHLFDDKVMKQLKRRRYTGWGRLSRKLINGIRDKQSGKTILDFLKSDGFANRNFMQLIHDDSLTFKEDIQKAQVSGQGDSLHEHIANLAGSPAIKKGILQTVKVVDELVKVMGRHKPENIVIEMARENQTTQKGQKNSRERMKRIEEGIKELGSQILKEHPVENTQLQNEKLYLYYLQNGRDMYVDQELDINRLSDYDVDHIVPQSFLKDDSIDNKVLTRSDKARGKSDNVPSEEVVKKMKNYWRQLLNAKLITQRKFDNLTKAERGGLSELDKAGFIKRQLVETRQITKHVAQILDSRMNTKYDENDKLIREVKVITLKSKLVSDFRKDFQFYKVREINNYHHAHDAYLNAVVGTALIKKYPKLESEFVYGDYKVYDVRKMIAKSEQEIGKATAKYFFYSNIMNFFKTEITLANGEIRKRPLIETNGETGEIVWDKGRDFATVRKVLSMPQVNIVKKTEVQTGGFSKESILPKRNSDKLIARKKDWDPKKYGGFDSPTVAYSVLVVAKVEKGKSKKLKSVKELLGITIMERSSFEKNPIDFLEAKGYKEVKKDLIIKLPKYSLFELENGRKRMLASAGELQKGNELALPSKYVNFLYLASHYEKLKGSPEDNEQKQLFVEQHKHYLDEIIEQISEFSKRVILADANLDKVLSAYNKHRDKPIREQAENIIHLFTLTNLGAPAAFKYFDTTIDRKRYTSTKEVLDATLIHQSITGLYETRIDLSQLGGDGGGGSGGSGGSGGTLNLEDEYRLYETSAEPEVSPGSTWLSDFPQAWAETGGMGLAVRQAPLIIPLKATSTPVSIKQYPMSQEAKLGIKPHIQRLLDQGILVPCQSPWNTPLLPVKKPGTNDYRPVQDLREVNKRVEDIHPTVPNPYNLLSGLPPSHRWYTVLDLKDAFFCLRLHPTSQPLFAFEWRDPGMGISGQLTWTRLPQGFKNSPTLFNEALHRDLADFRIQHPDLILLQYVDDILLAATSELDCQQGTRALLLTLGNLGYRASAKKAQLCQKQVKYLGYLLKEGQRWLTEARKETVMGQPTPKTPRQLREFLGTAGFCRLWIPGFAEMAAPLYPLTKPGTLFNWGPDQQKAYQEIKQALLTAPALGLPDLTKPFELFVDEKQGYAKGVLTQKLGPWRRPVAYLSKKLDPVAAGWPPCLRMVAAIAVLRKDAGKLTMGQPLVILAPHAVEALVKQPPDRWLSNARMTHYQAMLLDTDRVQFGPVVALNPATLLPLPEEGAPHDCLEILAETHGTRPDLTDQPIPDADHTWYTDGSSFLQEGQRKAGAAVTTETEVIWARALPAGTSAQRAELIALTQALKMAEGKRLNVYTDSRYAFATAHIHGEIYRRRGWLTSEGREIKNKSEILALLKALFLPKRLSIIHCLGHQKGDSAEARGNRLADQAAREAAIKTPPDTSTLLAGKRTADGSEFEKRTADGSEFESPKKKAKVE

SEQ ID NO: 6033 - protein, 2094 aa, synthetic construct
MPAAKRVKLDGGDKKYSIGLDIGTNSVGWAVITDEYKVPSKKFKVLGNTDRHSIKKNLIGALLFDSGETAEATRLKRTARRRYTRRKNRICYLQEIFSNEMAKVDDSFFHRLEESFLVEEDKKHERHPIFGNIVDEVAYHEKYPTIYHLRKKLVDSTDKADLRLIYLALAHMIKFRGHFLIEGDLNPDNSDVDKLFIQLVQTYNQLFEENPINASGVDAKAILSARLSKSRRLENLIAQLPGEKKNGLFGNLIALSLGLTPNFKSNFDLAEDAKLQLSKDTYDDDLDNLLAQIGDQYADLFLAAKNLSDAILLSDILRVNTEITKAPLSASMIKRYDEHHQDLTLLKALVRQQLPEKYKEIFFDQSKNGYAGYIDGGASQEEFYKFIKPILEKMDGTEELLVKLNREDLLRKQRTFDNGSIPHQIHLGELHAILRRQEDFYPFLKDNREKIEKILTFRIPYYVGPLARGNSRFAWMTRKSEETITPWNFEEVVDKGASAQSFIERMTNFDKNLPNEKVLPKHSLLYEYFTVYNELTKVKYVTEGMRKPAFLSGEQKKAIVDLLFKTNRKVTVKQLKEDYFKKIECFDSVEISGVEDRFNASLGTYHDLLKIIKDKDFLDNEENEDILEDIVLTLTLFEDREMIEERLKTYAHLFDDKVMKQLKRRRYTGWGRLSRKLINGIRDKQSGKTILDFLKSDGFANRNFMQLIHDDSLTFKEDIQKAQVSGQGDSLHEHIANLAGSPAIKKGILQTVKVVDELVKVMGRHKPENIVIEMARENQTTQKGQKNSRERMKRIEEGIKELGSQILKEHPVENTQLQNEKLYLYYLQNGRDMYVDQELDINRLSDYDVDHIVPQSFLKDDSIDNKVLTRSDKARGKSDNVPSEEVVKKMKNYWRQLLNAKLITQRKFDNLTKAERGGLSELDKAGFIKRQLVETRQITKHVAQILDSRMNTKYDENDKLIREVKVITLKSKLVSDFRKDFQFYKVREINNYHHAHDAYLNAVVGTALIKKYPKLESEFVYGDYKVYDVRKMIAKSEQEIGKATAKYFFYSNIMNFFKTEITLANGEIRKRPLIETNGETGEIVWDKGRDFATVRKVLSMPQVNIVKKTEVQTGGFSKESILPKRNSDKLIARKKDWDPKKYGGFDSPTVAYSVLVVAKVEKGKSKKLKSVKELLGITIMERSSFEKNPIDFLEAKGYKEVKKDLIIKLPKYSLFELENGRKRMLASAGELQKGNELALPSKYVNFLYLASHYEKLKGSPEDNEQKQLFVEQHKHYLDEIIEQISEFSKRVILADANLDKVLSAYNKHRDKPIREQAENIIHLFTLTNLGAPAAFKYFDTTIDRKRYTSTKEVLDATLIHQSITGLYETRIDLSQLGGDGGGGSGGSGGSGGTLNLEDEYRLYETSAEPEVSPGSTWLSDFPQAWAETGGMGLAVRQAPLIIPLKATSTPVSIKQYPMSQEAKLGIKPHIQRLLDQGILVPCQSPWNTPLLPVKKPGTNDYRPVQDLREVNKRVEDIHPTVPNPYNLLSGLPPSHRWYTVLDLKDAFFCLRLHPTSQPLFAFEWRDPGMGISGQLTWTRLPQGFKNSPTLFNEALHRDLADFRIQHPDLILLQYVDDILLAATSELDCQQGTRALLLTLGNLGYRASAKKAQLCQKQVKYLGYLLKEGQRWLTEARKETVMGQPTPKTPRQLREFLGKAGFCRLFIPGFAEMAAPLYPLTKPGTLFNWGPDQQKAYQEIKQALLTAPALGLPDLTKPFELFVDEKQGYAKGVLTQKLGPWRRPVAYLSKKLDPVAAGWPPCLRMVAAIAVLRKDAGKLTMGQPLVILAPHAVEALVKQPPDRWLSNARMTHYQAMLLDTDRVQFGPVVALNPATLLPLPEEGAPHDCLEILAETHGTRPDLTDQPIPDADHTWYTDGSSFLQEGQRKAGAAVTTETEVIWARALPAGTSAQRAELIALTQALKMAEGKRLNVYTDSRYAFATAHIHGEIYRRRGWLTSEGREIKNKSEILALLKALFLPKRLSIIHCLGHQKGDSAEARGNRLADQAAREAAIKTPPDTSTLLAGKRTADGSEFEKRTADGSEFESPKKKAKVE

SEQ ID NO: 6034 - protein, 2094 aa, synthetic construct
MPAAKRVKLDGGDKKYSIGLDIGTNSVGWAVITDEYKVPSKKFKVLGNTDRHSIKKNLIGALLFDSGETAEATRLKRTARRRYTRRKNRICYLQEIFSNEMAKVDDSFFHRLEESFLVEEDKKHERHPIFGNIVDEVAYHEKYPTIYHLRKKLVDSTDKADLRLIYLALAHMIKFRGHFLIEGDLNPDNSDVDKLFIQLVQTYNQLFEENPINASGVDAKAILSARLSKSRRLENLIAQLPGEKKNGLFGNLIALSLGLTPNFKSNFDLAEDAKLQLSKDTYDDDLDNLLAQIGDQYADLFLAAKNLSDAILLSDILRVNTEITKAPLSASMIKRYDEHHQDLTLLKALVRQQLPEKYKEIFFDQSKNGYAGYIDGGASQEEFYKFIKPILEKMDGTEELLVKLNREDLLRKQRTFDNGSIPHQIHLGELHAILRRQEDFYPFLKDNREKIEKILTFRIPYYVGPLARGNSRFAWMTRKSEETITPWNFEEVVDKGASAQSFIERMTNFDKNLPNEKVLPKHSLLYEYFTVYNELTKVKYVTEGMRKPAFLSGEQKKAIVDLLFKTNRKVTVKQLKEDYFKKIECFDSVEISGVEDRFNASLGTYHDLLKIIKDKDFLDNEENEDILEDIVLTLTLFEDREMIEERLKTYAHLFDDKVMKQLKRRRYTGWGRLSRKLINGIRDKQSGKTILDFLKSDGFANRNFMQLIHDDSLTFKEDIQKAQVSGQGDSLHEHIANLAGSPAIKKGILQTVKVVDELVKVMGRHKPENIVIEMARENQTTQKGQKNSRERMKRIEEGIKELGSQILKEHPVENTQLQNEKLYLYYLQNGRDMYVDQELDINRLSDYDVDHIVPQSFLKDDSIDNKVLTRSDKARGKSDNVPSEEVVKKMKNYWRQLLNAKLITQRKFDNLTKAERGGLSELDKAGFIKRQLVETRQITKHVAQILDSRMNTKYDENDKLIREVKVITLKSKLVSDFRKDFQFYKVREINNYHHAHDAYLNAVVGTALIKKYPKLESEFVYGDYKVYDVRKMIAKSEQEIGKATAKYFFYSNIMNFFKTEITLANGEIRKRPLIETNGETGEIVWDKGRDFATVRKVLSMPQVNIVKKTEVQTGGFSKESILPKRNSDKLIARKKDWDPKKYGGFDSPTVAYSVLVVAKVEKGKSKKLKSVKELLGITIMERSSFEKNPIDFLEAKGYKEVKKDLIIKLPKYSLFELENGRKRMLASAGELQKGNELALPSKYVNFLYLASHYEKLKGSPEDNEQKQLFVEQHKHYLDEIIEQISEFSKRVILADANLDKVLSAYNKHRDKPIREQAENIIHLFTLTNLGAPAAFKYFDTTIDRKRYTSTKEVLDATLIHQSITGLYETRIDLSQLGGDGGGGSGGSGGSGGLGIEDEYRLHETSTEPDVSLGSTWLSDFPQAWAETGGMGLAVRQAPLIIPLKATSTPVSIQQYPMSHEARLGIKPHIQRLLDQGILVPCQSPWNTPLLPVKKPGTNDYRPVQDLREVNKRVEDIHPTVPNPYNLLSGLPPSHQWYTVLDLKDAFFCLRLHPTSQPLFAFEWRDPGMGISGQLTWTRLPQGFKNSPTLFNEALHRDLADFRIQHPDLILLQYVDDILLAATSELDCQQGTRALLQTLGDLGYRASAKKAQICQKQVKYLGYLLREGQRWLTEARKETVMGQPVPKTPRQLREFLGKAGFCRLFIPGFAEMAAPLYPLTKPGTLFSWGPDQQKAYQEIKQALLTAPALGLPDLTKPFELFVDEKQGYAKGVLTQKLGPWRRPVAYLSKKLDPVAAGWPPCLRMVAAIAVLTKDAGKLTMGQPLVILAPHAVEALVKQPPDRWLSNARMTHYQAMLLDTDRVQFGPVVALNPATLLPLPEEGAPHDCLEILAETHGTRPDLTDQPIPDADHTWYTDGSSFLQEGQRKAGAAVTTETEVIWAGALPAGTSAQRAELIALTQALKMAEGKRLNVYTDSRYAFATAHIHGEIYRRRGWLTSEGREIKNKSEILALLKALFLPKRLSIIHCLGHQKGDSAEARGNRLADQAAREAAIKTPPDTSTLLIAGKRTADGSEFEKRTADGSEFESPKKKAKVE

SEQ ID NO: 6035 - protein, 2094 aa, synthetic construct
MPAAKRVKLDGGDKKYSIGLDIGTNSVGWAVITDEYKVPSKKFKVLGNTDRHSIKKNLIGALLFDSGETAEATRLKRTARRRYTRRKNRICYLQEIFSNEMAKVDDSFFHRLEESFLVEEDKKHERHPIFGNIVDEVAYHEKYPTIYHLRKKLVDSTDKADLRLIYLALAHMIKFRGHFLIEGDLNPDNSDVDKLFIQLVQTYNQLFEENPINASGVDAKAILSARLSKSRRLENLIAQLPGEKKNGLFGNLIALSLGLTPNFKSNFDLAEDAKLQLSKDTYDDDLDNLLAQIGDQYADLFLAAKNLSDAILLSDILRVNTEITKAPLSASMIKRYDEHHQDLTLLKALVRQQLPEKYKEIFFDQSKNGYAGYIDGGASQEEFYKFIKPILEKMDGTEELLVKLNREDLLRKQRTFDNGSIPHQIHLGELHAILRRQEDFYPFLKDNREKIEKILTFRIPYYVGPLARGNSRFAWMTRKSEETITPWNFEEVVDKGASAQSFIERMTNFDKNLPNEKVLPKHSLLYEYFTVYNELTKVKYVTEGMRKPAFLSGEQKKAIVDLLFKTNRKVTVKQLKEDYFKKIECFDSVEISGVEDRFNASLGTYHDLLKIIKDKDFLDNEENEDILEDIVLTLTLFEDREMIEERLKTYAHLFDDKVMKQLKRRRYTGWGRLSRKLINGIRDKQSGKTILDFLKSDGFANRNFMQLIHDDSLTFKEDIQKAQVSGQGDSLHEHIANLAGSPAIKKGILQTVKVVDELVKVMGRHKPENIVIEMARENQTTQKGQKNSRERMKRIEEGIKELGSQILKEHPVENTQLQNEKLYLYYLQNGRDMYVDQELDINRLSDYDVDHIVPQSFLKDDSIDNKVLTRSDKARGKSDNVPSEEVVKKMKNYWRQLLNAKLITQRKFDNLTKAERGGLSELDKAGFIKRQLVETRQITKHVAQILDSRMNTKYDENDKLIREVKVITLKSKLVSDFRKDFQFYKVREINNYHHAHDAYLNAVVGTALIKKYPKLESEFVYGDYKVYDVRKMIAKSEQEIGKATAKYFFYSNIMNFFKTEITLANGEIRKRPLIETNGETGEIVWDKGRDFATVRKVLSMPQVNIVKKTEVQTGGFSKESILPKRNSDKLIARKKDWDPKKYGGFDSPTVAYSVLVVAKVEKGKSKKLKSVKELLGITIMERSSFEKNPIDFLEAKGYKEVKKDLIIKLPKYSLFELENGRKRMLASAGELQKGNELALPSKYVNFLYLASHYEKLKGSPEDNEQKQLFVEQHKHYLDEIIEQISEFSKRVILADANLDKVLSAYNKHRDKPIREQAENIIHLFTLTNLGAPAAFKYFDTTIDRKRYTSTKEVLDATLIHQSITGLYETRIDLSQLGGDGGGGSGGSGGSGGTLGIEDEYRLHETSTEPDVSLGSTWLSDFPQAWAETGGMGLAVRQAPLIIPLKATSTPVSIQQYPMSHEARLGIKPHIQRLLDQGILVPCQSPWNTPLLPVKKPGTNDYRPVQDLREVNKRVEDIHPTVPNPYNLLSGLPPSHQWYTVLDLKDAFFCLRLHPTSQPLFAFEWRDPGMGISGQLTWTRLPQGFKNSPTLFNEALHRDLADFRIQHPDLILLQYVDDILLAATSELDCQQGTRALLQTLGDLGYRASAKKAQICQKQVKYLGYLLREGQRWLTEARKETVMGQPVPKTPRQLREFLGTAGFCRLWIPGFAEMAAPLYPLTKPGTLFSWGPDQQKAYQEIKQALLTAPALGLPDLTKPFELFVDEKQGYAKGVLTQKLGPWRRPVAYLSKKLDPVAAGWPPCLRMVAAIAVLTKDAGKLTMGQPLVILAPHAVEALVKQPPDRWLSNARMTHYQAMLLDTDRVQFGPVVALNPATLLPLPEEGAPHDCLEILAETHGTRPDLTDQPIPDADHTWYTDGSSFLQEGQRKAGAAVTTETEVIWAGALPAGTSAQRAELIALTQALKMAEGKRLNVYTDSRYAFATAHIHGEIYRRRGWLTSEGREIKNKSEILALLKALFLPKRLSIIHCLGHQKGDSAEARGNRLADQAAREAAIKTPPDTSTLLAGKRTADGSEFEKRTADGSEFESPKKKAKVE

SEQ ID NO: 6036 - protein, 2094 aa, synthetic construct; identical to SEQ ID NO: 6034

SEQ ID NO: 6037 - protein, 2094 aa, synthetic construct
MPAAKRVKLDGGDKKYSIGLDIGTNSVGWAVITDEYKVPSKKFKVLGNTDRHSIKKNLIGALLFDSGETAEATRLKRTARRRYTRRKNRICYLQEIFSNEMAKVDDSFFHRLEESFLVEEDKKHERHPIFGNIVDEVAYHEKYPTIYHLRKKLVDSTDKADLRLIYLALAHMIKFRGHFLIEGDLNPDNSDVDKLFIQLVQTYNQLFEENPINASGVDAKAILSARLSKSRRLENLIAQLPGEKKNGLFGNLIALSLGLTPNFKSNFDLAEDAKLQLSKDTYDDDLDNLLAQIGDQYADLFLAAKNLSDAILLSDILRVNTEITKAPLSASMIKRYDEHHQDLTLLKALVRQQLPEKYKEIFFDQSKNGYAGYIDGGASQEEFYKFIKPILEKMDGTEELLVKLNREDLLRKQRTFDNGSIPHQIHLGELHAILRRQEDFYPFLKDNREKIEKILTFRIPYYVGPLARGNSRFAWMTRKSEETITPWNFEEVVDKGASAQSFIERMTNFDKNLPNEKVLPKHSLLYEYFTVYNELTKVKYVTEGMRKPAFLSGEQKKAIVDLLFKTNRKVTVKQLKEDYFKKIECFDSVEISGVEDRFNASLGTYHDLLKIIKDKDFLDNEENEDILEDIVLTLTLFEDREMIEERLKTYAHLFDDKVMKQLKRRRYTGWGRLSRKLINGIRDKQSGKTILDFLKSDGFANRNFMQLIHDDSLTFKEDIQKAQVSGQGDSLHEHIANLAGSPAIKKGILQTVKVVDELVKVMGRHKPENIVIEMARENQTTQKGQKNSRERMKRIEEGIKELGSQILKEHPVENTQLQNEKLYLYYLQNGRDMYVDQELDINRLSDYDVDHIVPQSFLKDDSIDNKVLTRSDKARGKSDNVPSEEVVKKMKNYWRQLLNAKLITQRKFDNLTKAERGGLSELDKAGFIKRQLVETRQITKHVAQILDSRMNTKYDENDKLIREVKVITLKSKLVSDFRKDFQFYKVREINNYHHAHDAYLNAVVGTALIKKYPKLESEFVYGDYKVYDVRKMIAKSEQEIGKATAKYFFYSNIMNFFKTEITLANGEIRKRPLIETNGETGEIVWDKGRDFATVRKVLSMPQVNIVKKTEVQTGGFSKESILPKRNSDKLIARKKDWDPKKYGGFDSPTVAYSVLVVAKVEKGKSKKLKSVKELLGITIMERSSFEKNPIDFLEAKGYKEVKKDLIIKLPKYSLFELENGRKRMLASAGELQKGNELALPSKYVNFLYLASHYEKLKGSPEDNEQKQLFVEQHKHYLDEIIEQISEFSKRVILADANLDKVLSAYNKHRDKPIREQAENIIHLFTLTNLGAPAAFKYFDTTIDRKRYTSTKEVLDATLIHQSITGLYETRIDLSQLGGDGGGGSGGSGGSGGTLGIEDEYRLHETSTEPDVSLGSTWLSDFPQAWAETGGMGLAVRQAPLIIPLKATSTPVSIQQYPMSHEARLGIKPHIQRLLDQGILVPCQSPWNTPLLPVKKPGTNDYRPVQDLREVNKRVEDIHPTVPNPYNLLSGLPPSHQWYTVLDLKDAFFCLRLHPTSQPLFAFEWRDPGMGISGQLTWTRLPQGFKNSPTLFDEALHRDLADFRIQHPDLILLQYVDDILLAATSELDCQQGTRALLQTLGDLGYRASAKKAQICQKQVKYLGYLLREGQRWLTEARKETVMGQPVPKTPRQLREFLGTAGFCRLWIPGFAEMAAPLYPLTKTGTLFSWGPDQQKAYQEIKQALLTAPALGLPDLTKPFELFVDEKQGYAKGVLTQKLGPWRRPVAYLSKKLDPVAAGWPPCLRMVAAIAVLTKDAGKLTMGQPLVILAPHAVEALVKQPPDRWLSNARMTHYQAMLLDTDRVQFGPVVALNPATLLPLPEEGAPHDCLEILAETHGTRPDLTDQPIPDADHTWYTDGSSFLQEGQRKAGAAVTTETEVIWAGALPAGTSAQRAELIALTQALKMAEGKRLNVYTDSRYAFATAHIHGEIYRRRGLLTSEGREIKNKSEILALLKALFLPKRLSIIHCLGHQKGDSAEARGNRLADQAAREAAIKTPPDTSTLLAGKRTADGSEFEKRTADGSEFESPKKKAKVE

SEQ ID NO: 6038 - protein, 2094 aa, synthetic construct; identical to SEQ ID NO: 6035

SEQ ID NO: 6039 - protein, 2094 aa, synthetic construct
MPAAKRVKLDGGDKKYSIGLDIGTNSVGWAVITDEYKVPSKKFKVLGNTDRHSIKKNLIGALLFDSGETAEATRLKRTARRRYTRRKNRICYLQEIFSNEMAKVDDSFFHRLEESFLVEEDKKHERHPIFGNIVDEVAYHEKYPTIYHLRKKLVDSTDKADLRLIYLALAHMIKFRGHFLIEGDLNPDNSDVDKLFIQLVQTYNQLFEENPINASGVDAKAILSARLSKSRRLENLIAQLPGEKKNGLFGNLIALSLGLTPNFKSNFDLAEDAKLQLSKDTYDDDLDNLLAQIGDQYADLFLAAKNLSDAILLSDILRVNTEITKAPLSASMIKRYDEHHQDLTLLKALVRQQLPEKYKEIFFDQSKNGYAGYIDGGASQEEFYKFIKPILEKMDGTEELLVKLNREDLLRKQRTFDNGSIPHQIHLGELHAILRRQEDFYPFLKDNREKIEKILTFRIPYYVGPLARGNSRFAWMTRKSEETITPWNFEEVVDKGASAQSFIERMTNFDKNLPNEKVLPKHSLLYEYFTVYNELTKVKYVTEGMRKPAFLSGEQKKAIVDLLFKTNRKVTVKQLKEDYFKKIECFDSVEISGVEDRFNASLGTYHDLLKIIKDKDFLDNEENEDILEDIVLTLTLFEDREMIEERLKTYAHLFDDKVMKQLKRRRYTGWGRLSRKLINGIRDKQSGKTILDFLKSDGFANRNFMQLIHDDSLTFKEDIQKAQVSGQGDSLHEHIANLAGSPAIKKGILQTVKVVDELVKVMGRHKPENIVIEMARENQTTQKGQKNSRERMKRIEEGIKELGSQILKEHPVENTQLQNEKLYLYYLQNGRDMYVDQELDINRLSDYDVDHIVPQSFLKDDSIDNKVLTRSDKARGKSDNVPSEEVVKKMKNYWRQLLNAKLITQRKFDNLTKAERGGLSELDKAGFIKRQLVETRQITKHVAQILDSRMNTKYDENDKLIREVKVITLKSKLVSDFRKDFQFYKVREINNYHHAHDAYLNAVVGTALIKKYPKLESEFVYGDYKVYDVRKMIAKSEQEIGKATAKYFFYSNIMNFFKTEITLANGEIRKRPLIETNGETGEIVWDKGRDFATVRKVLSMPQVNIVKKTEVQTGGFSKESILPKRNSDKLIARKKDWDPKKYGGFDSPTVAYSVLVVAKVEKGKSKKLKSVKELLGITIMERSSFEKNPIDFLEAKGYKEVKKDLIIKLPKYSLFELENGRKRMLASAGELQKGNELALPSKYVNFLYLASHYEKLKGSPEDNEQKQLFVEQHKHYLDEIIEQISEFSKRVILADANLDKVLSAYNKHRDKPIREQAENIIHLFTLTNLGAPAAFKYFDTTIDRKRYTSTKEVLDATLIHQSITGLYETRIDLSQLGGDGGGGSGGSGGSGGTLNIEDEYRLHETSKGPDVPLGSTWLSDFPQAWAETGGMGLAFRQAPLIISLKATSTPVSIKQYPMSQEARLGIKPHIQRLLDQGILVPCQSPWNTPLLPVKKPGTNDYRPVQDLREVNKRVEDIHPTVPNPYNLLSGLPPSHQWYTVLDLKDAFFCLRLHPTSQSLFAFEWKDPEMGISGQLTWTRLPQGFKNSPTLFNEALHRDLADFRIQHPDLILLQYVDDLLLAATSELDCQQGTRALLQTLGDLGYRASAKKAQICQKQVKYLGYLLKEGQRWLTEARKETVMGQPTPKTPRQLREFLGKAGLCRLFIPGFAEMAAPLYPLTKPGTLFKWGPDQQKAYQEIKQALLTAPALGLPDLTKPFELFVDEKQGYAKGVLTQKLGPWRRPVAYLSKKLDPVAAGWPPCLRMVAAIAVLTKDVGKLTMGQPLVILAPHAVEALVKQPPDRWLSNARMTHYQALLLDTDRVQFGPIVALNPATLLPLPEEGLQHDCLDILAEAHGTRPDLTDQPLPDADHTWYTDGSSFLQEGQRRAGAAVTTETEVIWAKALPAGTSAQRAELIALTQALKMAAGKKLNVYTDSRYAFATAHIHGEIYRRRGWLTSEGKEIKNKDEILALLKALFLPKRLSIIHCPGHQKGNHAEARGNRMADQAAREVATRETPETSTLLAGKRTADGSEFEKRTADGSEFESPKKKAKVE

SEQ ID NO: 6040 - protein, 2094 aa, synthetic construct
MPAAKRVKLDGGDKKYSIGLDIGTNSVGWAVITDEYKVPSKKFKVLGNTDRHSIKKNLIGALLFDSGETAEATRLKRTARRRYTRRKNRICYLQEIFSNEMAKVDDSFFHRLEESFLVEEDKKHERHPIFGNIVDEVAYHEKYPTIYHLRKKLVDSTDKADLRLIYLALAHMIKFRGHFLIEGDLNPDNSDVDKLFIQLVQTYNQLFEENPINASGVDAKAILSARLSKSRRLENLIAQLPGEKKNGLFGNLIALSLGLTPNFKSNFDLAEDAKLQLSKDTYDDDLDNLLAQIGDQYADLFLAAKNLSDAILLSDILRVNTEITKAPLSASMIKRYDEHHQDLTLLKALVRQQLPEKYKEIFFDQSKNGYAGYIDGGASQEEFYKFIKPILEKMDGTEELLVKLNREDLLRKQRTFDNGSIPHQIHLGELHAILRRQEDFYPFLKDNREKIEKILTFRIPYYVGPLARGNSRFAWMTRKSEETITPWNFEEVVDKGASAQSFIERMTNFDKNLPNEKVLPKHSLLYEYFTVYNELTKVKYVTEGMRKPAFLSGEQKKAIVDLLFKTNRKVTVKQLKEDYFKKIECFDSVEISGVEDRFNASLGTYHDLLKIIKDKDFLDNEENEDILEDIVLTLTLFEDREMIEERLKTYAHLFDDKVMKQLKRRRYTGWGRLSRKLINGIRDKQSGKTILDFLKSDGFANRNFMQLIHDDSLTFKEDIQKAQVSGQGDSLHEHIANLAGSPAIKKGILQTVKVVDELVKVMGRHKPENIVIEMARENQTTQKGQKNSRERMKRIEEGIKELGSQILKEHPVENTQLQNEKLYLYYLQNGRDMYVDQELDINRLSDYDVDHIVPQSFLKDDSIDNKVLTRSDKARGKSDNVPSEEVVKKMKNYWRQLLNAKLITQRKFDNLTKAERGGLSELDKAGFIKRQLVETRQITKHVAQILDSRMNTKYDENDKLIREVKVITLKSKLVSDFRKDFQFYKVREINNYHHAHDAYLNAVVGTALIKKYPKLESEFVYGDYKVYDVRKMIAKSEQEIGKATAKYFFYSNIMNFFKTEITLANGEIRKRPLIETNGETGEIVWDKGRDFATVRKVLSMPQVNIVKKTEVQTGGFSKESILPKRNSDKLIARKKDWDPKKYGGFDSPTVAYSVLVVAKVEKGKSKKLKSVKELLGITIMERSSFEKNPIDFLEAKGYKEVKKDLIIKLPKYSLFELENGRKRMLASAGELQKGNELALPSKYVNFLYLASHYEKLKGSPEDNEQKQLFVEQHKHYLDEIIEQISEFSKRVILADANLDKVLSAYNKHRDKPIREQAENIIHLFTLTNLGAPAAFKYFDTTIDRKRYTSTKEVLDATLIHQSITGLYETRIDLSQLGGDGGGGSGGSGGSGGTLNIEDEYRLHETSKGPDVPLGSTWLSDFPQAWAETGGMGLAVRQAPLIIPLKATSTPVSIKQYPMSQEARLGIKPHIQRLLDQGILVPCQSPWNTPLLPVKKPGTNDYRPVQDLREVNKRVEDIHPTVPNPYNLLSGLPPSHQWYTVLDLKDAFFCLRLHPTSQSLFAFEWRDPEMGISGQLTWTRLPQGFKNSPTLFDEALHRDLADFRIQHPDLILLQYVDDLLLAATSELDCQQGTRALLQTLGDLGYRASAKKAQICQKQVKYLGYLLKEGQRWLTEARKETVMGQPTPKTPRQLREFLGTAGFCRLWIPGFAEMAAPLYPLTKTGTLFEWGPDQQKAYQEIKQALLTAPALGLPDLTKPFELFVDEKQGYAKGVLTQKLGPWRRPVAYLSKKLDPVAAGWPPCLRMVAAIAVLTKDAGKLTMGQPLVILAPHAVEALVKQPPDRWLSNARMTHYQALLLDTDRVQFGPIVALNPATLLPLPEEGLQHDCLDILAEAHGTRPDLTDQPLPDADHTWYTDGSSFLQEGQRKAGAAVTTETEVVWAKALPAGTSAQRAELIALTQALKMAEGKKLNVYTDSRYAFATAHIHGEIYRRRGLLTSEGKEIKNKDEILALLKALFLPKRLSIIHCPGHQKGNRAEARGNRMADQAAREVATRETPETSTLLAGKRTADGSEFEKRTADGSEFESPKKKAKVE

SEQ ID NO: 6041 - protein, 2094 aa, synthetic construct
MPAAKRVKLDGGDKKYSIGLDIGTNSVGWAVITDEYKVPSKKFKVLGNTDRHSIKKNLIGALLFDSGETAEATRLKRTARRRYTRRKNRICYLQEIFSNEMAKVDDSFFHRLEESFLVEEDKKHERHPIFGNIVDEVAYHEKYPTIYHLRKKLVDSTDKADLRLIYLALAHMIKFRGHFLIEGDLNPDNSDVDKLFIQLVQTYNQLFEENPINASGVDAKAILSARLSKSRRLENLIAQLPGEKKNGLFGNLIALSLGLTPNFKSNFDLAEDAKLQLSKDTYDDDLDNLLAQIGDQYADLFLAAKNLSDAILLSDILRVNTEITKAPLSASMIKRYDEHHQDLTLLKALVRQQLPEKYKEIFFDQSKNGYAGYIDGGASQEEFYKFIKPILEKMDGTEELLVKLNREDLLRKQRTFDNGSIPHQIHLGELHAILRRQEDFYPFLKDNREKIEKILTFRIPYYVGPLARGNSRFAWMTRKSEETITPWNFEEVVDKGASAQSFIERMTNFDKNLPNEKVLPKHSLLYEYFTVYNELTKVKYVTEGMRKPAFLSGEQKKAIVDLLFKTNRKVTVKQLKEDYFKKIECFDSVEISGVEDRFNASLGTYHDLLKIIKDKDFLDNEENEDILEDIVLTLTLFEDREMIEERLKTYAHLFDDKVMKQLKRRRYTGWGRLSRKLINGIRDKQSGKTILDFLKSDGFANRNFMQLIHDDSLTFKEDIQKAQVSGQGDSLHEHIANLAGSPAIKKGILQTVKVVDELVKVMGRHKPENIVIEMARENQTTQKGQKNSRERMKRIEEGIKELGSQILKEHPVENTQLQNEKLYLYYLQNGRDMYVDQELDINRLSDYDVDHIVPQSFLKDDSIDNKVLTRSDKARGKSDNVPSEEVVKKMKNYWRQLLNAKLITQRKFDNLTKAERGGLSELDKAGFIKRQLVETRQITKHVAQILDSRMNTKYDENDKLIREVKVITLKSKLVSDFRKDFQFYKVREINNYHHAHDAYLNAVVGTALIKKYPKLESEFVYGDYKVYDVRKMIAKSEQEIGKATAKYFFYSNIMNFFKTEITLANGEIRKRPLIETNGETGEIVWDKGRDFATVRKVLSMPQVNIVKKTEVQTGGFSKESILPKRNSDKLIARKKDWDPKKYGGFDSPTVAYSVLVVAKVEKGKSKKLKSVKELLGITIMERSSFEKNPIDFLEAKGYKEVKKDLIIKLPKYSLFELENGRKRMLASAGELQKGNELALPSKYVNFLYLASHYEKLKGSPEDNEQKQLFVEQHKHYLDEIIEQISEFSKRVILADANLDKVLSAYNKHRDKPIREQAENIIHLFTLTNLGAPAAFKYFDTTIDRKRYTSTKEVLDATLIHQSITGLYETRIDLSQLGGDGGGGSGGSGGSGGTLNIEDEHRLHETSKEPDVSLGSTWLSDFPQAWAETGGMGLAVRQAPLIIPLKATSTPVSIKQYPMSQEARLGIKPHIQRLLDQGILVPCQSPWNTPLLPVKKPGTNDYRPVQDLREVNKRVEDIHPTVPNPYNLLSGLPPSHQWYTVLDLKDAFFCLRLHPTSQPLFAFEWRDPEMGISGQLTWTRLPQGFKNSPTLFNEALHRDLADFRIQHPDLILLQYVDDLLLAATSELDCQQGTRALLQTLGNLGYRASAKKAQICQKQVKYLGYLLKEGQRWLTEARKETVMGQPTPKTPRQLREFLGTAGFCRLWIPGFAEMAAPLYPLTKPGTLFNWGPDQQKAYQEIKQALLTAPALGLPDLTKPFELFVDEKQGYAKGVLTQKLGPWRRPVAYLSKKLDPVAAGWPPCLRMVAAIAVLTKDAGKLTMGQPLVILAPHAVEALVKQPPDRWLSNARMTHYQALLLDTDRVQFGPVVALNPATLLPLPEEGLQHNCLDILAEAHGTRPDLTDQPLPDADHTWYTDGSSLLQEGQRKAGAAVTTETEVIWAKALPAGTSAQRAELIALTQALKMAEGKKLNVYTDSRYAFATAHIHGEIYRRRGWLTSEGKEIKNKDEILALLKALFLPKRLSIIHCPGHQKGHSAEARGNRMADQAARKAAITETPDTSTLLAGKRTADGSEFEKRTADGSEFESPKKKAKVE

SEQ ID NO: 6042 - protein, 2094 aa, synthetic construct
MPAAKRVKLDGGDKKYSIGLDIGTNSVGWAVITDEYKVPSKKFKVLGNTDRHSIKKNLIGALLFDSGETAEATRLKRTARRRYTRRKNRICYLQEIFSNEMAKVDDSFFHRLEESFLVEEDKKHERHPIFGNIVDEVAYHEKYPTIYHLRKKLVDSTDKADLRLIYLALAHMIKFRGHFLIEGDLNPDNSDVDKLFIQLVQTYNQLFEENPINASGVDAKAILSARLSKSRRLENLIAQLPGEKKNGLFGNLIALSLGLTPNFKSNFDLAEDAKLQLSKDTYDDDLDNLLAQIGDQYADLFLAAKNLSDAILLSDILRVNTEITKAPLSASMIKRYDEHHQDLTLLKALVRQQLPEKYKEIFFDQSKNGYAGYIDGGASQEEFYKFIKPILEKMDGTEELLVKLNREDLLRKQRTFDNGSIPHQIHLGELHAILRRQEDFYPFLKDNREKIEKILTFRIPYYVGPLARGNSRFAWMTRKSEETITPWNFEEVVDKGASAQSFIERMTNFDKNLPNEKVLPKHSLLYEYFTVYNELTKVKYVTEGMRKPAFLSGEQKKAIVDLLFKTNRKVTVKQLKEDYFKKIECFDSVEISGVEDRFNASLGTYHDLLKIIKDKDFLDNEENEDILEDIVLTLTLFEDREMIEERLKTYAHLFDDKVMKQLKRRRYTGWGRLSRKLINGIRDKQSGKTILDFLKSDGFANRNFMQLIHDDSLTFKEDIQKAQVSGQGDSLHEHIANLAGSPAIKKGILQTVKVVDELVKVMGRHKPENIVIEMARENQTTQKGQKNSRERMKRIEEGIKELGSQILKEHPVENTQLQNEKLYLYYLQNGRDMYVDQELDINRLSDYDVDHIVPQSFLKDDSIDNKVLTRSDKARGKSDNVPSEEVVKKMKNYWRQLLNAKLITQRKFDNLTKAERGGLSELDKAGFIKRQLVETRQITKHVAQILDSRMNTKYDENDKLIREVKVITLKSKLVSDFRKDFQFYKVREINNYHHAHDAYLNAVVGTALIKKYPKLESEFVYGDYKVYDVRKMIAKSEQEIGKATAKYFFYSNIMNFFKTEITLANGEIRKRPLIETNGETGEIVWDKGRDFATVRKVLSMPQVNIVKKTEVQTGGFSKESILPKRNSDKLIARKKDWDPKKYGGFDSPTVAYSVLVVAKVEKGKSKKLKSVKELLGITIMERSSFEKNPIDFLEAKGYKEVKKDLIIKLPKYSLFELENGRKRMLASAGELQKGNELALPSKYVNFLYLASHYEKLKGSPEDNEQKQLFVEQHKHYLDEIIEQISEFSKRVILADANLDKVLSAYNKHRDKPIREQAENIIHLFTLTNLGAPAAFKYFDTTIDRKRYTSTKEVLDATLIHQSITGLYETRIDLSQLGGDGGGGSGGSGGSGGTLNIEDEHRLHETSKEPDVSLGSTWLSDFPQAWAETGGMGLAVRQAPLIIPLKATSTPVSIKQYPMSQEARLGIKPHIQRLLDQGILVPCQSPWNTPLLPVKKPGTNDYRPVQDLREVNKRVEDIHPTVPNPYNLLSGLPPSHQWYTVLDLKDAFFCLRLHPTSQPLFAFEWRDPEMGISGQLTWTRLPQGFKNSPTLFDEALHRDLADFRIQHPDLILLQYVDDLLLAATSELDCQQGTRALLQTLGNLGYRASAKKAQICQKQVKYLGYLLKEGQRWLTEARKETVMGQPTPKTPRQLREFLGTAGFCRLWIPGFAEMAAPLYPLTKTGTLFNWGPDQQKAYQEIKQALLTAPALGLPDLTKPFELFVDEKQGYAKGVLTQKLGPWRRPVAYLSKKLDPVAAGWPPCLRMVAAIAVLTKDAGKLTMGQPLVILAPHAVEALVKQPPDRWLSNARMTHYQALLLDTDRVQFGPVVALNPATLLPLPEEGLQHNCLDILAEAHGTRPDLTDQPLPDADHTWYTDGSSLLQEGQRKAGAAVTTETEVIWAKALPAGTSAQRAELIALTQALKMAEGKKLNVYTDSRYAFATAHIHGEIYRRRGLLTSEGKEIKNKDEILALLKALFLPKRLSIIHCPGHQKGHSAEARGNRMADQAARKAAITETPDTSTLLAGKRTADGSEFEKRTADGSEFESPKKKAKVE

SEQ ID NO: 6043 - protein, 2094 aa, synthetic construct; identical to SEQ ID NO: 6041

SEQ ID NO: 6044 - protein, 2092 aa, synthetic construct
MPAAKRVKLDGGDKKYSIGLDIGTNSVGWAVITDEYKVPSKKFKVLGNTDRHSIKKNLIGALLFDSGETAEATRLKRTARRRYTRRKNRICYLQEIFSNEMAKVDDSFFHRLEESFLVEEDKKHERHPIFGNIVDEVAYHEKYPTIYHLRKKLVDSTDKADLRLIYLALAHMIKFRGHFLIEGDLNPDNSDVDKLFIQLVQTYNQLFEENPINASGVDAKAILSARLSKSRRLENLIAQLPGEKKNGLFGNLIALSLGLTPNFKSNFDLAEDAKLQLSKDTYDDDLDNLLAQIGDQYADLFLAAKNLSDAILLSDILRVNTEITKAPLSASMIKRYDEHHQDLTLLKALVRQQLPEKYKEIFFDQSKNGYAGYIDGGASQEEFYKFIKPILEKMDGTEELLVKLNREDLLRKQRTFDNGSIPHQIHLGELHAILRRQEDFYPFLKDNREKIEKILTFRIPYYVGPLARGNSRFAWMTRKSEETITPWNFEEVVDKGASAQSFIERMTNFDKNLPNEKVLPKHSLLYEYFTVYNELTKVKYVTEGMRKPAFLSGEQKKAIVDLLFKTNRKVTVKQLKEDYFKKIECFDSVEISGVEDRFNASLGTYHDLLKIIKDKDFLDNEENEDILEDIVLTLTLFEDREMIEERLKTYAHLFDDKVMKQLKRRRYTGWGRLSRKLINGIRDKQSGKTILDFLKSDGFANRNFMQLIHDDSLTFKEDIQKAQVSGQGDSLHEHIANLAGSPAIKKGILQTVKVVDELVKVMGRHKPENIVIEMARENQTTQKGQKNSRERMKRIEEGIKELGSQILKEHPVENTQLQNEKLYLYYLQNGRDMYVDQELDINRLSDYDVDHIVPQSFLKDDSIDNKVLTRSDKARGKSDNVPSEEVVKKMKNYWRQLLNAKLITQRKFDNLTKAERGGLSELDKAGFIKRQLVETRQITKHVAQILDSRMNTKYDENDKLIREVKVITLKSKLVSDFRKDFQFYKVREINNYHHAHDAYLNAVVGTALIKKYPKLESEFVYGDYKVYDVRKMIAKSEQEIGKATAKYFFYSNIMNFFKTEITLANGEIRKRPLIETNGETGEIVWDKGRDFATVRKVLSMPQVNIVKKTEVQTGGFSKESILPKRNSDKLIARKKDWDPKKYGGFDSPTVAYSVLVVAKVEKGKSKKLKSVKELLGITIMERSSFEKNPIDFLEAKGYKEVKKDLIIKLPKYSLFELENGRKRMLASAGELQKGNELALPSKYVNFLYLASHYEKLKGSPEDNEQKQLFVEQHKHYLDEIIEQISEFSKRVILADANLDKVLSAYNKHRDKPIREQAENIIHLFTLTNLGAPAAFKYFDTTIDRKRYTSTKEVLDATLIHQSITGLYETRIDLSQLGGDGGGGSGGSGGSGGVLNLEEEYRLHEKPVPSSIDPSWLQLFPTVWAERAGMGLANQVPPVVVELRSGASPVAVRQYPMSKEAREGIRPHIQRFLDLGVLVPCQSPWNTPLLPVKKPGTNDYRPVQDLREINKRVQDIHPTVPNPYNLLSSLPPSHTWYSVLDLKDAFFCLKLHPNSQPLFAFEWRDPEKGNTGQLTWTRLPQGFKNSPTLFDEALHRDLAPFRALNPQVVLLQYVDDLLVAAPTYRDCKEGTQKLLQELSKLGYRVSAKKAQLCQKEVTYLGYLLKEGKRWLTPARKATVMKIPPPTTPRQVREFLGTAGFCRLWIPGFASLAAPLYPLTKESIPFIWTEEHQKAFDRIKEALLSAPALALPDLTKPFTLYVDERAGVARGVLTQTLGPWRRPVAYLSKKLDPVASGWPTCLKAVAAVALLLKDADKLTLGQNVTVIASHSLESIVRQPPDRWMTNARMTHYQSLLLNERVSFAPPAVLNPATLLPVESEATPVHRCSEILAEETGTRRDLKDQPLPGVPAWYTDGSSFIAEGKRRAGAAIVDGKRTVWASSLPEGTSAQKAELVALTQALRLAEGKDINIYTDSRYAFATAHIHGAIYKQRGLLTSAGKDIKNKEEILALLEAIHLPKRVAIIHCPGHQKGNDPVATGNRRADEAAKQAALSTRVLAETTKPAGKRTADGSEFEKRTADGSEFESPKKKAKVE

SEQ ID NO: 6045 - protein, 2099 aa, synthetic construct
MPAAKRVKLDGGDKKYSIGLDIGTNSVGWAVITDEYKVPSKKFKVLGNTDRHSIKKNLIGALLFDSGETAEATRLKRTARRRYTRRKNRICYLQEIFSNEMAKVDDSFFHRLEESFLVEEDKKHERHPIFGNIVDEVAYHEKYPTIYHLRKKLVDSTDKADLRLIYLALAHMIKFRGHFLIEGDLNPDNSDVDKLFIQLVQTYNQLFEENPINASGVDAKAILSARLSKSRRLENLIAQLPGEKKNGLFGNLIALSLGLTPNFKSNFDLAEDAKLQLSKDTYDDDLDNLLAQIGDQYADLFLAAKNLSDAILLSDILRVNTEITKAPLSASMIKRYDEHHQDLTLLKALVRQQLPEKYKEIFFDQSKNGYAGYIDGGASQEEFYKFIKPILEKMDGTEELLVKLNREDLLRKQRTFDNGSIPHQIHLGELHAILRRQEDFYPFLKDNREKIEKILTFRIPYYVGPLARGNSRFAWMTRKSEETITPWNFEEVVDKGASAQSFIERMTNFDKNLPNEKVLPKHSLLYEYFTVYNELTKVKYVTEGMRKPAFLSGEQKKAIVDLLFKTNRKVTVKQLKEDYFKKIECFDSVEISGVEDRFNASLGTYHDLLKIIKDKDFLDNEENEDILEDIVLTLTLFEDREMIEERLKTYAHLFDDKVMKQLKRRRYTGWGRLSRKLINGIRDKQSGKTILDFLKSDGFANRNFMQLIHDDSLTFKEDIQKAQVSGQGDSLHEHIANLAGSPAIKKGILQTVKVVDELVKVMGRHKPENIVIEMARENQTTQKGQKNSRERMKRIEEGIKELGSQILKEHPVENTQLQNEKLYLYYLQNGRDMYVDQELDINRLSDYDVDHIVPQSFLKDDSIDNKVLTRSDKARGKSDNVPSEEVVKKMKNYWRQLLNAKLITQRKFDNLTKAERGGLSELDKAGFIKRQLVETRQITKHVAQILDSRMNTKYDENDKLIREVKVITLKSKLVSDFRKDFQFYKVREINNYHHAHDAYLNAVVGTALIKKYPKLESEFVYGDYKVYDVRKMIAKSEQEIGKATAKYFFYSNIMNFFKTEITLANGEIRKRPLIETNGETGEIVWDKGRDFATVRKVLSMPQVNIVKKTEVQTGGFSKESILPKRNSDKLIARKKDWDPKKYGGFDSPTVAYSVLVVAKVEKGKSKKLKSVKELLGITIMERSSFEKNPIDFLEAKGYKEVKKDLIIKLPKYSLFELENGRKRMLASAGELQKGNELALPSKYVNFLYLASHYEKLKGSPEDNEQKQLFVEQHKHYLDEIIEQISEFSKRVILADANLDKVLSAYNKHRDKPIREQAENIIHLFTLTNLGAPAAFKYFDTTIDRKRYTSTKEVLDATLIHQSITGLYETRIDLSQLGGDGGGGSGGSGGSGGSGGTAPLEEEYRLFLEAPIQNVTLLEQWKREIPKVWAEINPPGLASTQAPIHVQLLSTALPVRVRQYPITLEAKRSLRETIRKFRAAGILRPVHSPWNTPLLPVRKSGTSEYRMVQDLREVNKRVETIHPTVPNPYTLLSLLPPDRIWYSVLDLKDAFFCIPLAPESQLIFAFEWADAEEGESGQLTWTRLPQGFKNSPTLFNEALNRDLQGFRLDHPSVSLLQYVDDLLIAADTQAACLSATRDLLMTLAELGYRVSGKKAQLCQEEVTYLGFKIHKGSRSLSNSRTQAILQIPVPKTKRQVREFLGTIGYCRLWIPGFAELAQPLYAATRPGNDPLVWGEKEEEAFQSLKLALTQPPALALPSLDKPFQLFVEETSGAAKGVLTQALGPWKRPVAYLSKRLDPVAAGWPRCLRAIAAAALLTREASKLTFGQDIEITSSHNLESLLRSPPDKWLTNARITQYQVLLLDPPRVRFKQTAALNPATLLPETDDTLPIHHCLDTLDSLTSTRPDLTDQPLAQAEATLFTDGSSYIRDGKRYAGAAVVTLDSVIWAEPLPIGTSAQKAELIALTKALEWSKDKSVNIYTDSRYAFATLHVHGMIYRERGWLTAGGKAIKNAPEILALLTAVWLPKRVAVMHCKGHQKDDAPTSTGNRRADEVAREVAIRPLSTQATISAGKRTADGSEFEKRTADGSEFESPKKKAKVE

SEQ ID NO: 6046 - protein, 2103 aa, synthetic construct
MPAAKRVKLDGGDKKYSIGLDIGTNSVGWAVITDEYKVPSKKFKVLGNTDRHSIKKNLIGALLFDSGETAEATRLKRTARRRYTRRKNRICYLQEIFSNEMAKVDDSFFHRLEESFLVEEDKKHERHPIFGNIVDEVAYHEKYPTIYHLRKKLVDSTDKADLRLIYLALAHMIKFRGHFLIEGDLNPDNSDVDKLFIQLVQTYNQLFEENPINASGVDAKAILSARLSKSRRLENLIAQLPGEKKNGLFGNLIALSLGLTPNFKSNFDLAEDAKLQLSKDTYDDDLDNLLAQIGDQYADLFLAAKNLSDAILLSDILRVNTEITKAPLSASMIKRYDEHHQDLTLLKALVRQQLPEKYKEIFFDQSKNGYAGYIDGGASQEEFYKFIKPILEKMDGTEELLVKLNREDLLRKQRTFDNGSIPHQIHLGELHAILRRQEDFYPFLKDNREKIEKILTFRIPYYVGPLARGNSRFAWMTRKSEETITPWNFEEVVDKGASAQSFIERMTNFDKNLPNEKVLPKHSLLYEYFTVYNELTKVKYVTEGMRKPAFLSGEQKKAIVDLLFKTNRKVTVKQLKEDYFKKIECFDSVEISGVEDRFNASLGTYHDLLKIIKDKDFLDNEENEDILEDIVLTLTLFEDREMIEERLKTYAHLFDDKVMKQLKRRRYTGWGRLSRKLINGIRDKQSGKTILDFLKSDGFANRNFMQLIHDDSLTFKEDIQKAQVSGQGDSLHEHIANLAGSPAIKKGILQTVKVVDELVKVMGRHKPENIVIEMARENQTTQKGQKNSRERMKRIEEGIKELGSQILKEHPVENTQLQNEKLYLYYLQNGRDMYVDQELDINRLSDYDVDHIVPQSFLKDDSIDNKVLTRSDKARGKSDNVPSEEVVKKMKNYWRQLLNAKLITQRKFDNLTKAERGGLSELDKAGFIKRQLVETRQITKHVAQILDSRMNTKYDENDKLIREVKVITLKSKLVSDFRKDFQFYKVREINNYHHAHDAYLNAVVGTALIKKYPKLESEFVYGDYKVYDVRKMIAKSEQEIGKATAKYFFYSNIMNFFKTEITLANGEIRKRPLIETNGETGEIVWDKGRDFATVRKVLSMPQVNIVKKTEVQTGGFSKESILPKRNSDKLIARKKDWDPKKYGGFDSPTVAYSVLVVAKVEKGKSKKLKSVKELLGITIMERSSFEKNPIDFLEAKGYKEVKKDLIIKLPKYSLFELENGRKRMLASAGELQKGNELALPSKYVNFLYLASHYEKLKGSPEDNEQKQLFVEQHKHYLDEIIEQISEFSKRVILADANLDKVLSAYNKHRDKPIREQAENIIHLFTLTNLGAPAAFKYFDTTIDRKRYTSTKEVLDATLIHQSITGLYETRIDLSQLGGDGGGGSGGSGGSGGSGGTVSLQDEHRLFDIPVTTSLPDVWLQDFPQAWAETGGLGRAKCQAPIIIDLKPTAVPVSIKQYPMSLEAHMGIRQHIIKFLELGVLRPCRSPWNTPLLPVKKPGTQDYRPVQDLREINKRTVDIHPTVPNPYNLLSTLKPDYSWYTVLDLKDAFFCLPLAPQSQELFAFEWKDPERGISGQLTWTRLPQGFKNSPTLFNEALHRDLTDFRTQHPEVTLLQYVDDLLLAAPTKKACTQGTRHLLQELGEKGYRASAKKAQICQTKVTYLGYILSEGKRWLTPGRIETVARIPPPRNPREVREFLGTAGFCRLWIPGFAELAAPLYALTKPSTPFTWQTEHQLAFEALKKALLSAPALGLPDTSKPFTLFLDERQGIAKGVLTQKLGPWKRPVAYLSKKLDPVAAGWPPCLRIMAATAMLVKDSAKLTLGQPLTVITPHTLEAIVRQPPDRWITNARLTHYQALLLDTDRVQFGPPVTLNPATLLPVPENQPSPHDCRQVLAETHGTREDLKDQELPDADHTWYTDGSSYLDSGTRRAGAAVVDGHNTIWAQSLPPGTSAQKAELIALTKALELSKGKKANIYTDSRYAFATAHTHGSIYERRGWLTSEGKEIKNKAEIIALLKALFLPQEVAIIHCPGHQKGQDPVAVGNRQADRVARQAAMAEVLTLATEPDNTSHITAGKRTADGSEFEKRTADGSEFESPKKKAKVE

SEQ ID NO: 6047 - protein, 2088 aa, synthetic construct
MPAAKRVKLDGGDKKYSIGLDIGTNSVGWAVITDEYKVPSKKFKVLGNTDRHSIKKNLIGALLFDSGETAEATRLKRTARRRYTRRKNRICYLQEIFSNEMAKVDDSFFHRLEESFLVEEDKKHERHPIFGNIVDEVAYHEKYPTIYHLRKKLVDSTDKADLRLIYLALAHMIKFRGHFLIEGDLNPDNSDVDKLFIQLVQTYNQLFEENPINASGVDAKAILSARLSKSRRLENLIAQLPGEKKNGLFGNLIALSLGLTPNFKSNFDLAEDAKLQLSKDTYDDDLDNLLAQIGDQYADLFLAAKNLSDAILLSDILRVNTEITKAPLSASMIKRYDEHHQDLTLLKALVRQQLPEKYKEIFFDQSKNGYAGYIDGGASQEEFYKFIKPILEKMDGTEELLVKLNREDLLRKQRTFDNGSIPHQIHLGELHAILRRQEDFYPFLKDNREKIEKILTFRIPYYVGPLARGNSRFAWMTRKSEETITPWNFEEVVDKGASAQSFIERMTNFDKNLPNEKVLPKHSLLYEYFTVYNELTKVKYVTEGMRKPAFLSGEQKKAIVDLLFKTNRKVTVKQLKEDYFKKIECFDSVEISGVEDRFNASLGTYHDLLKIIKDKDFLDNEENEDILEDIVLTLTLFEDREMIEERLKTYAHLFDDKVMKQLKRRRYTGWGRLSRKLINGIRDKQSGKTILDFLKSDGFANRNFMQLIHDDSLTFKEDIQKAQVSGQGDSLHEHIANLAGSPAIKKGILQTVKVVDELVKVMGRHKPENIVIEMARENQTTQKGQKNSRERMKRIEEGIKELGSQILKEHPVENTQLQNEKLYLYYLQNGRDMYVDQELDINRLSDYDVDHIVPQSFLKDDSIDNKVLTRSDKARGKSDNVPSEEVVKKMKNYWRQLLNAKLITQRKFDNLTKAERGGLSELDKAGFIKRQLVETRQITKHVAQILDSRMNTKYDENDKLIREVKVITLKSKLVSDFRKDFQFYKVREINNYHHAHDAYLNAVVGTALIKKYPKLESEFVYGDYKVYDVRKMIAKSEQEIGKATAKYFFYSNIMNFFKTEITLANGEIRKRPLIETNGETGEIVWDKGRDFATVRKVLSMPQVNIVKKTEVQTGGFSKESILPKRNSDKLIARKKDWDPKKYGGFDSPTVAYSVLVVAKVEKGKSKKLKSVKELLGITIMERSSFEKNPIDFLEAKGYKEVKKDLIIKLPKYSLFELENGRKRMLASAGELQKGNELALPSKYVNFLYLASHYEKLKGSPEDNEQKQLFVEQHKHYLDEIIEQISEFSKRVILADANLDKVLSAYNKHRDKPIREQAENIIHLFTLTNLGAPAAFKYFDTTIDRKRYTSTKEVLDATLIHQSITGLYETRIDLSQLGGDGGGGSGGSGGSGGSGGVPWLTQQPLQLTILVPLQEYQEKILSKTALPEDQKQQLKTLFVKYDNLWQHWENQVGHRKIRPHNIATGDYPPRPQKQYPINPKAKPSIQIVIDDLLKQGVLTPQNSTMNTPVYPVPKPDGRWRMVLDYREVNKTIPLTAAQNQHSAGILATIVRQKYKTTLDLANGFWAHPITPESYWLTAFTWQGKQYCWTRLPQGFLNSPALFTADVVDLLKEIPNVQVYVDDIYLSHDDPKEHVQQLEKVFQILLQAGYVVSLKKSEIGQKTVEFLGFNITKEGRGLTDTFKTKLLNITPPKDLKQLQSILGLLNFARNFIPNFAELVQPLYNLIASAKGKYIEWSEENTKQLNMVIEALNTASNLEERLPEQRLVIKVNTSPSAGYVRYYNETGKKPIMYLNYVFSKAELKFSMLEKLLTTMHKALIKAMDLAMGQEILVYSPIVSMTKIQKTPLPERKALPIRWITWMTYLEDPRIQFHYDKTLPELKHIPDVYTSSQSPVKHPSQYEGVFYTDGSAIKSPDPTKSNNAGMGIVHATYKPEYQVLNQWSIPLGNHTAQMAEIAAVEFACKKALKIPGPVLVITDSFYVAESANKELPYWKSNGFVNNKKKPLKHISKWKSIAECLSMKPDITIQHEKGISLQIPVFILKGNALADKLATQGSYVVNAGKRTADGSEFEKRTADGSEFESPKKKAKVE

SEQ ID NO: 6048 - protein, 2128 aa, synthetic construct
MPAAKRVKLDGGDKKYSIGLDIGTNSVGWAVITDEYKVPSKKFKVLGNTDRHSIKKNLIGALLFDSGETAEATRLKRTARRRYTRRKNRICYLQEIFSNEMAKVDDSFFHRLEESFLVEEDKKHERHPIFGNIVDEVAYHEKYPTIYHLRKKLVDSTDKADLRLIYLALAHMIKFRGHFLIEGDLNPDNSDVDKLFIQLVQTYNQLFEENPINASGVDAKAILSARLSKSRRLENLIAQLPGEKKNGLFGNLIALSLGLTPNFKSNFDLAEDAKLQLSKDTYDDDLDNLLAQIGDQYADLFLAAKNLSDAILLSDILRVNTEITKAPLSASMIKRYDEHHQDLTLLKALVRQQLPEKYKEIFFDQSKNGYAGYIDGGASQEEFYKFIKPILEKMDGTEELLVKLNREDLLRKQRTFDNGSIPHQIHLGELHAILRRQEDFYPFLKDNREKIEKILTFRIPYYVGPLARGNSRFAWMTRKSEETITPWNFEEVVDKGASAQSFIERMTNFDKNLPNEKVLPKHSLLYEYFTVYNELTKVKYVTEGMRKPAFLSGEQKKAIVDLLFKTNRKVTVKQLKEDYFKKIECFDSVEISGVEDRFNASLGTYHDLLKIIKDKDFLDNEENEDILEDIVLTLTLFEDREMIEERLKTYAHLFDDKVMKQLKRRRYTGWGRLSRKLINGIRDKQSGKTILDFLKSDGFANRNFMQLIHDDSLTFKEDIQKAQVSGQGDSLHEHIANLAGSPAIKKGILQTVKVVDELVKVMGRHKPENIVIEMARENQTTQKGQKNSRERMKRIEEGIKELGSQILKEHPVENTQLQNEKLYLYYLQNGRDMYVDQELDINRLSDYDVDHIVPQSFLKDDSIDNKVLTRSDKARGKSDNVPSEEVVKKMKNYWRQLLNAKLITQRKFDNLTKAERGGLSELDKAGFIKRQLVETRQITKHVAQILDSRMNTKYDENDKLIREVKVITLKSKLVSDFRKDFQFYKVREINNYHHAHDAYLNAVVGTALIKKYPKLESEFVYGDYKVYDVRKMIAKSEQEIGKATAKYFFYSNIMNFFKTEITLANGEIRKRPLIETNGETGEIVWDKGRDFATVRKVLSMPQVNIVKKTEVQTGGFSKESILPKRNSDKLIARKKDWDPKKYGGFDSPTVAYSVLVVAKVEKGKSKKLKSVKELLGITIMERSSFEKNPIDFLEAKGYKEVKKDLIIKLPKYSLFELENGRKRMLASAGELQKGNELALPSKYVNFLYLASHYEKLKGSPEDNEQKQLFVEQHKHYLDEIIEQISEFSKRVILADANLDKVLSAYNKHRDKPIREQAENIIHLFTLTNLGAPAAFKYFDTTIDRKRYTSTKEVLDATLIHQSITGLYETRIDLSQLGGDGGGGSGGSGGSGGSGGLLGRDLLTKLKAQIQFSTEGPQVTWEDRPAMCLVLNLEEEYRLHEKPVPPSIDPSWLQLFPMVWAEKAGMGLANQVPPVVVELKSDASPVAVRQYPMSKEAREGIRPHIQRFLDLGILVPCQSPWNTPLLPVKKPGTNDYRPVQDLREVNKRVQDIHPTVPNPYNLLSSLPPSHTWYSVLDLKDAFFCLKLHPNSQPLFAFEWRDPEKGNTGQLTWTRLPQGFKNSPTLFNEALHRDLASFRALNPQVVMLQYVDDLLVAAPTYRDCKEGTRRLLQELSKLGYRVSAKKAQLCREEVTYLGYLLKGGKRWLTPARKATVMKIPTPTTPRQVREFLGTAGFCRLWIPGFASLAAPLYPLTRPKVPFTWTEAHQEAFGRIKEALLSAPALALPDLTKPFALYVDEKEGVARGVLTQTLGPWRRPVAYLSKKLDPVASGWPTCLKAIAAVALLLKDADKLTLGQNVLVIAPHNLESIVRQPPDRWMTNARMTHYQSLLLNERVSFAPPAILNPATLLPVESDDTPIHICSEILAEETGTRPDLRDQPLPGVPAWYTDGSSFIMDGRRQAGAAIVDNKRTVWASNLPEGTSAQKAELIALTQALRLAEGKSINIYTDSRYAFATAHVHGAIYKQRGWLTSAGKDIKNKEEILALLEAIHLPKRVAIIHCPGHQRGTDPVATGNRKADEAAKQAAQSTRILTETTKNAGKRTADGSEFEKRTADGSEFESPKKKAKVE

SEQ ID NO: 6049 - protein, 2219 aa, synthetic construct
MPAAKRVKLDGGDKKYSIGLDIGTNSVGWAVITDEYKVPSKKFKVLGNTDRHSIKKNLIGALLFDSGETAEATRLKRTARRRYTRRKNRICYLQEIFSNEMAKVDDSFFHRLEESFLVEEDKKHERHPIFGNIVDEVAYHEKYPTIYHLRKKLVDSTDKADLRLIYLALAHMIKFRGHFLIEGDLNPDNSDVDKLFIQLVQTYNQLFEENPINASGVDAKAILSARLSKSRRLENLIAQLPGEKKNGLFGNLIALSLGLTPNFKSNFDLAEDAKLQLSKDTYDDDLDNLLAQIGDQYADLFLAAKNLSDAILLSDILRVNTEITKAPLSASMIKRYDEHHQDLTLLKALVRQQLPEKYKEIFFDQSKNGYAGYIDGGASQEEFYKFIKPILEKMDGTEELLVKLNREDLLRKQRTFDNGSIPHQIHLGELHAILRRQEDFYPFLKDNREKIEKILTFRIPYYVGPLARGNSRFAWMTRKSEETITPWNFEEVVDKGASAQSFIERMTNFDKNLPNEKVLPKHSLLYEYFTVYNELTKVKYVTEGMRKPAFLSGEQKKAIVDLLFKTNRKVTVKQLKEDYFKKIECFDSVEISGVEDRFNASLGTYHDLLKIIKDKDFLDNEENEDILEDIVLTLTLFEDREMIEERLKTYAHLFDDKVMKQLKRRRYTGWGRLSRKLINGIRDKQSGKTILDFLKSDGFANRNFMQLIHDDSLTFKEDIQKAQVSGQGDSLHEHIANLAGSPAIKKGILQTVKVVDELVKVMGRHKPENIVIEMARENQTTQKGQKNSRERMKRIEEGIKELGSQILKEHPVENTQLQNEKLYLYYLQNGRDMYVDQELDINRLSDYDVDHIVPQSFLKDDSIDNKVLTRSDKARGKSDNVPSEEVVKKMKNYWRQLLNAKLITQRKFDNLTKAERGGLSELDKAGFIKRQLVETRQITKHVAQILDSRMNTKYDENDKLIREVKVITLKSKLVSDFRKDFQFYKVREINNYHHAHDAYLNAVVGTALIKKYPKLESEFVYGDYKVYDVRKMIAKSEQEIGKATAKYFFYSNIMNFFKTEITLANGEIRKRPLIETNGETGEIVWDKGRDFATVRKVLSMPQVNIVKKTEVQTGGFSKESILPKRNSDKLIARKKDWDPKKYGGFDSPTVAYSVLVVAKVEKGKSKKLKSVKELLGITIMERSSFEKNPIDFLEAKGYKEVKKDLIIKLPKYSLFELENGRKRMLASAGELQKGNELALPSKYVNFLYLASHYEKLKGSPEDNEQKQLFVEQHKHYLDEIIEQISEFSKRVILADANLDKVLSAYNKHRDKPIREQAENIIHLFTLTNLGAPAAFKYFDTTIDRKRYTSTKEVLDATLIHQSITGLYETRIDLSQLGGDGGGGSGGSGGSGGSGGTLGDQGSRGSDPLPEPRVTLTVEGIPTEFLVNTGAEHSVLTKPMGKMGSKRTVVAGATGSKVYPWTTKRLLKIGQKQVTHSFLVIPECPAPLLGRDLLTKLKAQIQFSTEGPQVTWEDRPAMCLVLNLEEEYRLHEKPVPPSIDPSWLQLFPMVWAEKAGMGLANQVPPVVVELKSDASPVAVRQYPMSKEAREGIRPHIQRFLDLGILVPCQSPWNTPLLPVKKPGTNDYRPVQDLREVNKRVQDIHPTVPNPYNLLSSLPPSHTWYSVLDLKDAFFCLKLHPNSQPLFAFEWRDPEKGNTGQLTWTRLPQGFKNSPTLFNEALHRDLASFRALNPQVVMLQYVDDLLVAAPTYRDCKEGTRRLLQELSKLGYRVSAKKAQLCREEVTYLGYLLKGGKRWLTPARKATVMKIPTPTTPRQVREFLGKAGFCRLFIPGFASLAAPLYPLTRPKVPFTWTEAHQEAFGRIKEALLSAPALALPDLTKPFALYVDEKEGVARGVLTQTLGPWRRPVAYLSKKLDPVASGWPTCLKAIAAVALLLKDADKLTLGQNVLVIAPHNLESIVRQPPDRWMTNARMTHYQSLLLNERVSFAPPAILNPATLLPVESDDTPIHICSEILAEETGTRPDLRDQPLPGVPAWYTDGSSFIMDGRRQAGAAIVDNKRTVWASNLPEGTSAQKAELIALTQALRLAEGKSINIYTDSRYAFATAHVHGAIYKQRGWLTSAGKDIKNKEEILALLEAIHLPKRVAIIHCPGHQRGTDPVATGNRKADEAAKQAAQSTRILTETTKNAGKRTADGSEFEKRTADGSEFESPKKKAKVE

SEQ ID NO: 6050 - protein, 2097 aa, synthetic construct
MPAAKRVKLDGGDKKYSIGLDIGTNSVGWAVITDEYKVPSKKFKVLGNTDRHSIKKNLIGALLFDSGETAEATRLKRTARRRYTRRKNRICYLQEIFSNEMAKVDDSFFHRLEESFLVEEDKKHERHPIFGNIVDEVAYHEKYPTIYHLRKKLVDSTDKADLRLIYLALAHMIKFRGHFLIEGDLNPDNSDVDKLFIQLVQTYNQLFEENPINASGVDAKAILSARLSKSRRLENLIAQLPGEKKNGLFGNLIALSLGLTPNFKSNFDLAEDAKLQLSKDTYDDDLDNLLAQIGDQYADLFLAAKNLSDAILLSDILRVNTEITKAPLSASMIKRYDEHHQDLTLLKALVRQQLPEKYKEIFFDQSKNGYAGYIDGGASQEEFYKFIKPILEKMDGTEELLVKLNREDLLRKQRTFDNGSIPHQIHLGELHAILRRQEDFYPFLKDNREKIEKILTFRIPYYVGPLARGNSRFAWMTRKSEETITPWNFEEVVDKGASAQSFIERMTNFDKNLPNEKVLPKHSLLYEYFTVYNELTKVKYVTEGMRKPAFLSGEQKKAIVDLLFKTNRKVTVKQLKEDYFKKIECFDSVEISGVEDRFNASLGTYHDLLKIIKDKDFLDNEENEDILEDIVLTLTLFEDREMIEERLKTYAHLFDDKVMKQLKRRRYTGWGRLSRKLINGIRDKQSGKTILDFLKSDGFANRNFMQLIHDDSLTFKEDIQKAQVSGQGDSLHEHIANLAGSPAIKKGILQTVKVVDELVKVMGRHKPENIVIEMARENQTTQKGQKNSRERMKRIEEGIKELGSQILKEHPVENTQLQNEKLYLYYLQNGRDMYVDQELDINRLSDYDVDHIVPQSFLKDDSIDNKVLTRSDKARGKSDNVPSEEVVKKMKNYWRQLLNAKLITQRKFDNLTKAERGGLSELDKAGFIKRQLVETRQITKHVAQILDSRMNTKYDENDKLIREVKVITLKSKLVSDFRKDFQFYKVREINNYHHAHDAYLNAVVGTALIKKYPKLESEFVYGDYKVYDVRKMIAKSEQEIGKATAKYFFYSNIMNFFKTEITLANGEIRKRPLIETNGETGEIVWDKGRDFATVRKVLSMPQVNIVKKTEVQTGGFSKESILPKRNSDKLIARKKDWDPKKYGGFDSPTVAYSVLVVAKVEKGKSKKLKSVKELLGITIMERSSFEKNPIDFLEAKGYKEVKKDLIIKLPKYSLFELENGRKRMLASAGELQKGNELALPSKYVNFLYLASHYEKLKGSPEDNEQKQLFVEQHKHYLDEIIEQISEFSKRVILADANLDKVLSAYNKHRDKPIREQAENIIHLFTLTNLGAPAAFKYFDTTIDRKRYTSTKEVLDATLIHQSITGLYETRIDLSQLGGDGGGGSGGSGGSGGSGGTLNIEDEYRLHETSKGPDVPLGSTWLSDFPQAWAETGGMGLAVRQAPLIIPLKATSTPVSIKQYPMSQEARLGIKPHIQRLLDQGILVPCQSPWNTPLLPVKKPGTNDYRPVQDLREVNKRVEDIHPTVPNPYNLLSGLPPSHQWYTVLDLKDAFFCLRLHPTSQSLFAFEWRDPEMGISGQLTWTRLPQGFKNSPTLFNEALHRDLADFRIQHPDLILLQYVDDLLLAATSELDCQQGTRALLQTLGDLGYRASAKKAQICQKQVKYLGYLLKEGQRWLTEARKETVMGQPTPKTPRQLREFLGTAGFCRLWIPGFAEMAAPLYPLTKPGTLFEWGPDQQKAYQEIKQALLTAPALGLPDLTKPFELFVDEKQGYAKGVLTQKLGPWRRPVAYLSKKLDPVAAGWPPCLRMVAAIAVLTKDAGKLTMGQPLVILAPHAVEALVKQPPDRWLSNARMTHYQALLLDTDRVQFGPIVALNPATLLPLPEEGLQHDCLDILAEAHGTRPDLTDQPLPDADHTWYTDGSSFLQEGQRKAGAAVTTETEVVWAKALPAGTSAQRAELIALTQALKMAEGKKLNVYTDSRYAFATAHIHGEIYRRRGWLTSEGKEIKNKDEILALLKALFLPKRLSIIHCPGHQKGNRAEARGNRMADQAAREVATRETPETSTLLAGKRTADGSEFEKRTADGSEFESPKKKAKVE

SEQ ID NO: 6051 - protein, 2088 aa, synthetic construct
MPAAKRVKLDGGDKKYSIGLDIGTNSVGWAVITDEYKVPSKKFKVLGNTDRHSIKKNLIGALLFDSGETAEATRLKRTARRRYTRRKNRICYLQEIFSNEMAKVDDSFFHRLEESFLVEEDKKHERHPIFGNIVDEVAYHEKYPTIYHLRKKLVDSTDKADLRLIYLALAHMIKFRGHFLIEGDLNPDNSDVDKLFIQLVQTYNQLFEENPINASGVDAKAILSARLSKSRRLENLIAQLPGEKKNGLFGNLIALSLGLTPNFKSNFDLAEDAKLQLSKDTYDDDLDNLLAQIGDQYADLFLAAKNLSDAILLSDILRVNTEITKAPLSASMIKRYDEHHQDLTLLKALVRQQLPEKYKEIFFDQSKNGYAGYIDGGASQEEFYKFIKPILEKMDGTEELLVKLNREDLLRKQRTFDNGSIPHQIHLGELHAILRRQEDFYPFLKDNREKIEKILTFRIPYYVGPLARGNSRFAWMTRKSEETITPWNFEEVVDKGASAQSFIERMTNFDKNLPNEKVLPKHSLLYEYFTVYNELTKVKYVTEGMRKPAFLSGEQKKAIVDLLFKTNRKVTVKQLKEDYFKKIECFDSVEISGVEDRFNASLGTYHDLLKIIKDKDFLDNEENEDILEDIVLTLTLFEDREMIEERLKTYAHLFDDKVMKQLKRRRYTGWGRLSRKLINGIRDKQSGKTILDFLKSDGFANRNFMQLIHDDSLTFKEDIQKAQVSGQGDSLHEHIANLAGSPAIKKGILQTVKVVDELVKVMGRHKPENIVIEMARENQTTQKGQKNSRERMKRIEEGIKELGSQILKEHPVENTQLQNEKLYLYYLQNGRDMYVDQELDINRLSDYDVDHIVPQSFLKDDSIDNKVLTRSDKARGKSDNVPSEEVVKKMKNYWRQLLNAKLITQRKFDNLTKAERGGLSELDKAGFIKRQLVETRQITKHVAQILDSRMNTKYDENDKLIREVKVITLKSKLVSDFRKDFQFYKVREINNYHHAHDAYLNAVVGTALIKKYPKLESEFVYGDYKVYDVRKMIAKSEQEIGKATAKYFFYSNIMNFFKTEITLANGEIRKRPLIETNGETGEIVWDKGRDFATVRKVLSMPQVNIVKKTEVQTGGFSKESILPKRNSDKLIARKKDWDPKKYGGFDSPTVAYSVLVVAKVEKGKSKKLKSVKELLGITIMERSSFEKNPIDFLEAKGYKEVKKDLIIKLPKYSLFELENGRKRMLASAGELQKGNELALPSKYVNFLYLASHYEKLKGSPEDNEQKQLFVEQHKHYLDEIIEQISEFSKRVILADANLDKVLSAYNKHRDKPIREQAENIIHLFTLTNLGAPAAFKYFDTTIDRKRYTSTKEVLDATLIHQSITGLYETRIDLSQLGGDGGGGSGGSGGSGGSGGIPWLMKKPLQLTTLVPLQEYEERLLKQTMLTGSYKEKLQSLFLKYDALWQHWENQVGHRRIKPHHIATGTVNPRPQKQYPINPKAKASIQTVINDLLKQGVLIQQNSIMNTPVYPVPKPDGKWRMVLDYREVNKTIPLIAAQNQHSAGILSSIFRGKYKTTLDLSNGFWAHSITPESYWLTAFTWLGQQYCWTRLPQGFLNSPALFNADVVDLLKEVPNVQVYVDDIYISHDDPREHLEQLEKVFSLLLNAGYVVSLKKSEIAQHEVEFLGFNITKEGRGLTETFKQKLLNITPPRDLKQLQSILGKLNFARNFIPNFSELVKPLYNIIATAPGKYITWTTDNSQQLQNIISMLNSAENLEERNPEVRLIMKVNTSPSAGYIRFYNEFAKRPIMYLNYVYTKAEVKFTNTEKLLTTIHKGLIKALDLGMGQEILVYSPIVSMTKIQKTPLPERKALPIRWITWMSYLEDPRIQFHYDKTLPELQQVPTVTDDIIAKIKHPSEFSMVFYTDGSAIKHPNVNKSHNAGMGIAQVQFKPEFTVINTWSIPLGDHTAQLAEVAAVEFACKKALKIDGPVLIVTDSFYVAESVNKELPYWQSNGFFNNKKKPLKHVSKWKSIADCIQLKPDIIIIHEKGHQPTASTFHTEGNNLADKLATQGSYVVNAGKRTADGSEFEKRTADGSEFESPKKKAKVE

SEQ ID NO: 6052 - protein, 2177 aa, synthetic construct
MPAAKRVKLDGGDKKYSIGLDIGTNSVGWAVITDEYKVPSKKFKVLGNTDRHSIKKNLIGALLFDSGETAEATRLKRTARRRYTRRKNRICYLQEIFSNEMAKVDDSFFHRLEESFLVEEDKKHERHPIFGNIVDEVAYHEKYPTIYHLRKKLVDSTDKADLRLIYLALAHMIKFRGHFLIEGDLNPDNSDVDKLFIQLVQTYNQLFEENPINASGVDAKAILSARLSKSRRLENLIAQLPGEKKNGLFGNLIALSLGLTPNFKSNFDLAEDAKLQLSKDTYDDDLDNLLAQIGDQYADLFLAAKNLSDAILLSDILRVNTEITKAPLSASMIKRYDEHHQDLTLLKALVRQQLPEKYKEIFFDQSKNGYAGYIDGGASQEEFYKFIKPILEKMDGTEELLVKLNREDLLRKQRTFDNGSIPHQIHLGELHAILRRQEDFYPFLKDNREKIEKILTFRIPYYVGPLARGNSRFAWMTRKSEETITPWNFEEVVDKGASAQSFIERMTNFDKNLPNEKVLPKHSLLYEYFTVYNELTKVKYVTEGMRKPAFLSGEQKKAIVDLLFKTNRKVTVKQLKEDYFKKIECFDSVEISGVEDRFNASLGTYHDLLKIIKDKDFLDNEENEDILEDIVLTLTLFEDREMIEERLKTYAHLFDDKVMKQLKRRRYTGWGRLSRKLINGIRDKQSGKTILDFLKSDGFANRNFMQLIHDDSLTFKEDIQKAQVSGQGDSLHEHIANLAGSPAIKKGILQTVKVVDELVKVMGRHKPENIVIEMARENQTTQKGQKNSRERMKRIEEGIKELGSQILKEHPVENTQLQNEKLYLYYLQNGRDMYVDQELDINRLSDYDVDHIVPQSFLKDDSIDNKVLTRSDKARGKSDNVPSEEVVKKMKNYWRQLLNAKLITQRKFDNLTKAERGGLSELDKAGFIKRQLVETRQITKHVAQILDSRMNTKYDENDKLIREVKVITLKSKLVSDFRKDFQFYKVREINNYHHAHDAYLNAVVGTALIKKYPKLESEFVYGDYKVYDVRKMIAKSEQEIGKATAKYFFYSNIMNFFKTEITLANGEIRKRPLIETNGETGEIVWDKGRDFATVRKVLSMPQVNIVKKTEVQTGGFSKESILPKRNSDKLIARKKDWDPKKYGGFDSPTVAYSVLVVAKVEKGKSKKLKSVKELLGITIMERSSFEKNPIDFLEAKGYKEVKKDLIIKLPKYSLFELENGRKRMLASAGELQKGNELALPSKYVNFLYLASHYEKLKGSPEDNEQKQLFVEQHKHYLDEIIEQISEFSKRVILADANLDKVLSAYNKHRDKPIREQAENIIHLFTLTNLGAPAAFKYFDTTIDRKRYTSTKEVLDATLIHQSITGLYETRIDLSQLGGDGGGGSGGSGGSGGSGGMDPLQLLQPLEAEIKGTKLKAHWNSGATITCVPQAFLEEEVPIKNIWIKTIHGEKEQPVYYLTFKIQGRKVEAEVISSPYDYILVSPSDIPWLMKKPLQLTTLVPLQEYEERLLKQTMLTGSYKEKLQSLFLKYDALWQHWENQVGHRRIKPHHIATGTVNPRPQKQYPINPKAKASIQTVINDLLKQGVLIQQNSIMNTPVYPVPKPDGKWRMVLDYREVNKTIPLIAAQNQHSAGILSSIFRGKYKTTLDLSNGFWAHSITPESYWLTAFTWLGQQYCWTRLPQGFLNSPALFNADVVDLLKEVPNVQVYVDDIYISHDDPREHLEQLEKVFSLLLNAGYVVSLKKSEIAQHEVEFLGFNITKEGRGLTETFKQKLLNITPPRDLKQLQSILGKLNFARNFIPNFSELVKPLYNIIATAPGKYITWTTDNSQQLQNIISMLNSAENLEERNPEVRLIMKVNTSPSAGYIRFYNEFAKRPIMYLNYVYTKAEVKFTNTEKLLTTIHKGLIKALDLGMGQEILVYSPIVSMTKIQKTPLPERKALPIRWITWMSYLEDPRIQFHYDKTLPELQQVPTVTDDIIAKIKHPSEFSMVFYTDGSAIKHPNVNKSHNAGMGIAQVQFKPEFTVINTWSIPLGDHTAQLAEVAAVEFACKKALKIDGPVLIVTDSFYVAESVNKELPYWQSNGFFNNKKKPLKHVSKWKSIADCIQLKPDIIIIHEKGHQPTASTFHTEGNNLADKLATQGSYVVNAGKRTADGSEFEKRTADGSEFESPKKKAKVE

SEQ ID NO: 6053 - protein, 2095 aa, synthetic construct
MPAAKRVKLDGGDKKYSIGLDIGTNSVGWAVITDEYKVPSKKFKVLGNTDRHSIKKNLIGALLFDSGETAEATRLKRTARRRYTRRKNRICYLQEIFSNEMAKVDDSFFHRLEESFLVEEDKKHERHPIFGNIVDEVAYHEKYPTIYHLRKKLVDSTDKADLRLIYLALAHMIKFRGHFLIEGDLNPDNSDVDKLFIQLVQTYNQLFEENPINASGVDAKAILSARLSKSRRLENLIAQLPGEKKNGLFGNLIALSLGLTPNFKSNFDLAEDAKLQLSKDTYDDDLDNLLAQIGDQYADLFLAAKNLSDAILLSDILRVNTEITKAPLSASMIKRYDEHHQDLTLLKALVRQQLPEKYKEIFFDQSKNGYAGYIDGGASQEEFYKFIKPILEKMDGTEELLVKLNREDLLRKQRTFDNGSIPHQIHLGELHAILRRQEDFYPFLKDNREKIEKILTFRIPYYVGPLARGNSRFAWMTRKSEETITPWNFEEVVDKGASAQSFIERMTNFDKNLPNEKVLPKHSLLYEYFTVYNELTKVKYVTEGMRKPAFLSGEQKKAIVDLLFKTNRKVTVKQLKEDYFKKIECFDSVEISGVEDRFNASLGTYHDLLKIIKDKDFLDNEENEDILEDIVLTLTLFEDREMIEERLKTYAHLFDDKVMKQLKRRRYTGWGRLSRKLINGIRDKQSGKTILDFLKSDGFANRNFMQLIHDDSLTFKEDIQKAQVSGQGDSLHEHIANLAGSPAIKKGILQTVKVVDELVKVMGRHKPENIVIEMARENQTTQKGQKNSRERMKRIEEGIKELGSQILKEHPVENTQLQNEKLYLYYLQNGRDMYVDQELDINRLSDYDVDHIVPQSFLKDDSIDNKVLTRSDKARGKSDNVPSEEVVKKMKNYWRQLLNAKLITQRKFDNLTKAERGGLSELDKAGFIKRQLVETRQITKHVAQILDSRMNTKYDENDKLIREVKVITLKSKLVSDFRKDFQFYKVREINNYHHAHDAYLNAVVGTALIKKYPKLESEFVYGDYKVYDVRKMIAKSEQEIGKATAKYFFYSNIMNFFKTEITLANGEIRKRPLIETNGETGEIVWDKGRDFATVRKVLSMPQVNIVKKTEVQTGGFSKESILPKRNSDKLIARKKDWDPKKYGGFDSPTVAYSVLVVAKVEKGKSKKLKSVKELLGITIMERSSFEKNPIDFLEAKGYKEVKKDLIIKLPKYSLFELENGRKRMLASAGELQKGNELALPSKYVNFLYLASHYEKLKGSPEDNEQKQLFVEQHKHYLDEIIEQISEFSKRVILADANLDKVLSAYNKHRDKPIREQAENIIHLFTLTNLGAPAAFKYFDTTIDRKRYTSTKEVLDATLIHQSITGLYETRIDLSQLGGDGGGGSGGSGGSGGSGGVLNLEEEYRLHEKPVPSSIDPSWLQLFPTVWAERAGMGLANQVPPVVVELRSGASPVAVRQYPMSKEAREGIRPHIQRFLDLGVLVPCQSPWNTPLLPVKKPGTNDYRPVQDLREINKRVQDIHPTVPNPYNLLSSLPPSHTWYSVLDLKDAFFCLKLHPNSQPLFAFEWRDPEKGNTGQLTWTRLPQGFKNSPTLFDEALHRDLAPFRALNPQVVLLQYVDDLLVAAPTYRDCKEGTQKLLQELSKLGYRVSAKKAQLCQKEVTYLGYLLKEGKRWLTPARKATVMKIPPPTTPRQVREFLGTAGFCRLWIPGFASLAAPLYPLTKESIPFIWTEEHQKAFDRIKEALLSAPALALPDLTKPFTLYVDERAGVARGVLTQTLGPWRRPVAYLSKKLDPVASGWPTCLKAVAAVALLLKDADKLTLGQNVTVIASHSLESIVRQPPDRWMTNARMTHYQSLLLNERVSFAPPAVLNPATLLPVESEATPVHRCSEILAEETGTRRDLKDQPLPGVPAWYTDGSSFIAEGKRRAGAAIVDGKRTVWASSLPEGTSAQKAELVALTQALRLAEGKDINIYTDSRYAFATAHIHGAIYKQRGLLTSAGKDIKNKEEILALLEAIHLPKRVAIIHCPGHQKGNDPVATGNRRADEAAKQAALSTRVLAETTKPAGKRTADGSEFEKRTADGSEFESPKKKAKVE

SEQ ID NO: 6054 - protein, 2097 aa, synthetic construct
MPAAKRVKLDGGDKKYSIGLDIGTNSVGWAVITDEYKVPSKKFKVLGNTDRHSIKKNLIGALLFDSGETAEATRLKRTARRRYTRRKNRICYLQEIFSNEMAKVDDSFFHRLEESFLVEEDKKHERHPIFGNIVDEVAYHEKYPTIYHLRKKLVDSTDKADLRLIYLALAHMIKFRGHFLIEGDLNPDNSDVDKLFIQLVQTYNQLFEENPINASGVDAKAILSARLSKSRRLENLIAQLPGEKKNGLFGNLIALSLGLTPNFKSNFDLAEDAKLQLSKDTYDDDLDNLLAQIGDQYADLFLAAKNLSDAILLSDILRVNTEITKAPLSASMIKRYDEHHQDLTLLKALVRQQLPEKYKEIFFDQSKNGYAGYIDGGASQEEFYKFIKPILEKMDGTEELLVKLNREDLLRKQRTFDNGSIPHQIHLGELHAILRRQEDFYPFLKDNREKIEKILTFRIPYYVGPLARGNSRFAWMTRKSEETITPWNFEEVVDKGASAQSFIERMTNFDKNLPNEKVLPKHSLLYEYFTVYNELTKVKYVTEGMRKPAFLSGEQKKAIVDLLFKTNRKVTVKQLKEDYFKKIECFDSVEISGVEDRFNASLGTYHDLLKIIKDKDFLDNEENEDILEDIVLTLTLFEDREMIEERLKTYAHLFDDKVMKQLKRRRYTGWGRLSRKLINGIRDKQSGKTILDFLKSDGFANRNFMQLIHDDSLTFKEDIQKAQVSGQGDSLHEHIANLAGSPAIKKGILQTVKVVDELVKVMGRHKPENIVIEMARENQTTQKGQKNSRERMKRIEEGIKELGSQILKEHPVENTQLQNEKLYLYYLQNGRDMYVDQELDINRLSDYDVDHIVPQSFLKDDSIDNKVLTRSDKARGKSDNVPSEEVVKKMKNYWRQLLNAKLITQRKFDNLTKAERGGLSELDKAGFIKRQLVETRQITKHVAQILDSRMNTKYDENDKLIREVKVITLKSKLVSDFRKDFQFYKVREINNYHHAHDAYLNAVVGTALIKKYPKLESEFVYGDYKVYDVRKMIAKSEQEIGKATAKYFFYSNIMNFFKTEITLANGEIRKRPLIETNGETGEIVWDKGRDFATVRKVLSMPQVNIVKKTEVQTGGFSKESILPKRNSDKLIARKKDWDPKKYGGFDSPTVAYSVLVVAKVEKGKSKKLKSVKELLGITIMERSSFEKNPIDFLEAKGYKEVKKDLIIKLPKYSLFELENGRKRMLASAGELQKGNELALPSKYVNFLYLASHYEKLKGSPEDNEQKQLFVEQHKHYLDEIIEQISEFSKRVILADANLDKVLSAYNKHRDKPIREQAENIIHLFTLTNLGAPAAFKYFDTTIDRKRYTSTKEVLDATLIHQSITGLYETRIDLSQLGGDGGGGSGGSGGSGGSGGTLNIEDEYRLHETSKEPDVPLGSTWLSDFPQAWAETGGMGLAVRQAPLIIPLKATSTPVSIKQYPMSQEARLGIKPHIQRLLDQGILVPCQSPWNTPLLPVKKPGTNDYRPVQDLREVNKRVEDIHPTVPNPYNLLSGLPPSHQWYTVLDLKDAFFCLRLHPTSQPLFAFEWRDPEMGISGQLTWTRLPQGFKNSPTLFNEALHRDLADFRIQHPDLILLQYVDDLLLAATSEQDCQRGTRALLQTLGNLGYRASAKKAQICQKQVKYLGYLLKEGQRWLTEARKETVMGQPTPKTPRQLREFLGTAGFCRLWIPGFAEMAAPLYPLTKPGTLFNWGPDQQKAYQEIKQALLTAPALGLPDLTKPFELFVDEKQGYAKGVLTQKLGPWRRPVAYLSKKLDPVAAGWPPCLRMVAAIAVLTKDAGKLTMGQPLVILAPHAVEALVKQPPDRWLSNARMTHYQAMLLDTDRVQFGPVVALNPATLLPLPEKEAPHDCLEILAETHGTRPDLTDQPIPDADYTWYTDGSSFLQEGQRRAGAAVTTETEVIWARALPAGTSAQRAELIALTQALKMAEGKKLNVYTDSRYAFATAHVHGEIYRRRGWLTSEGREIKNKNEILALLKALFLPKRLSIIHCPGHQKGNSAEARGNRMADQAAREAAMKAVLETSTLLAGKRTADGSEFEKRTADGSEFESPKKKAKVE

SEQ ID NO: 6055 - protein, 2005 aa, synthetic construct
MPAAKRVKLDGGDKKYSIGLDIGTNSVGWAVITDEYKVPSKKFKVLGNTDRHSIKKNLIGALLFDSGETAEATRLKRTARRRYTRRKNRICYLQEIFSNEMAKVDDSFFHRLEESFLVEEDKKHERHPIFGNIVDEVAYHEKYPTIYHLRKKLVDSTDKADLRLIYLALAHMIKFRGHFLIEGDLNPDNSDVDKLFIQLVQTYNQLFEENPINASGVDAKAILSARLSKSRRLENLIAQLPGEKKNGLFGNLIALSLGLTPNFKSNFDLAEDAKLQLSKDTYDDDLDNLLAQIGDQYADLFLAAKNLSDAILLSDILRVNTEITKAPLSASMIKRYDEHHQDLTLLKALVRQQLPEKYKEIFFDQSKNGYAGYIDGGASQEEFYKFIKPILEKMDGTEELLVKLNREDLLRKQRTFDNGSIPHQIHLGELHAILRRQEDFYPFLKDNREKIEKILTFRIPYYVGPLARGNSRFAWMTRKSEETITPWNFEEVVDKGASAQSFIERMTNFDKNLPNEKVLPKHSLLYEYFTVYNELTKVKYVTEGMRKPAFLSGEQKKAIVDLLFKTNRKVTVKQLKEDYFKKIECFDSVEISGVEDRFNASLGTYHDLLKIIKDKDFLDNEENEDILEDIVLTLTLFEDREMIEERLKTYAHLFDDKVMKQLKRRRYTGWGRLSRKLINGIRDKQSGKTILDFLKSDGFANRNFMQLIHDDSLTFKEDIQKAQVSGQGDSLHEHIANLAGSPAIKKGILQTVKVVDELVKVMGRHKPENIVIEMARENQTTQKGQKNSRERMKRIEEGIKELGSQILKEHPVENTQLQNEKLYLYYLQNGRDMYVDQELDINRLSDYDVDHIVPQSFLKDDSIDNKVLTRSDKARGKSDNVPSEEVVKKMKNYWRQLLNAKLITQRKFDNLTKAERGGLSELDKAGFIKRQLVETRQITKHVAQILDSRMNTKYDENDKLIREVKVITLKSKLVSDFRKDFQFYKVREINNYHHAHDAYLNAVVGTALIKKYPKLESEFVYGDYKVYDVRKMIAKSEQEIGKATAKYFFYSNIMNFFKTEITLANGEIRKRPLIETNGETGEIVWDKGRDFATVRKVLSMPQVNIVKKTEVQTGGFSKESILPKRNSDKLIARKKDWDPKKYGGFDSPTVAYSVLVVAKVEKGKSKKLKSVKELLGITIMERSSFEKNPIDFLEAKGYKEVKKDLIIKLPKYSLFELENGRKRMLASAGELQKGNELALPSKYVNFLYLASHYEKLKGSPEDNEQKQLFVEQHKHYLDEIIEQISEFSKRVILADANLDKVLSAYNKHRDKPIREQAENIIHLFTLTNLGAPAAFKYFDTTIDRKRYTSTKEVLDATLIHQSITGLYETRIDLSQLGGDGGGGSGGSGGSGGSGGSGGGVLDTPPSHIGLEHLPPPPEVPQFPLNLERLQALQDLVHRSLEAGYISPWDGPGNNPVFPVRKPNGAWRFVHDLRATNALTKPIPALSPGPPDLTAPPTHPPHIICLDLKDAFFQIPVEDRFRFYLSFTLPSPGGLQPHRRFAWRVLPQGFINSPALFQRALQEPLRQVSAAFSQSLLVSYMDDILYASPTEEQRSQCYQALAARLRDLGFQVASEKTSQTPSPVPFLGQMVHEQIVTYQSLPTLQISSPISLHQLQAVLGDLQWVSRGTPTTRRPLQLLYSSLKRHHDPRAIIQLSPEQLQGIAELRQALSHNARSRYNEQEPLLAYVHLTRAGSTLVLFQKGAQFPLAYFQTPLTDNQASPWGLLLLLGCQYLQTQALSSYAKPILKYYHNLPKTSLDNWIQSSEDPRVQELLQLWPQISSQGIQPPGPWKTLITRAEVFLTPQFSPDPIPAALCLFSDGATGRGAYCLWKDHLLDFQAVPAPESAQKGELAGLLAGLAAAPPEPVNIWVDSKYLYSLLRTWVLGAWLQPDPVPSYALLYKSLLRHPAIVVGHVRSHSSASHPIASLNNYVDQLAGKRTADGSEFEKRTADGSEFESPKKKAKVE

SEQ ID NO: 6056 - protein, 2177 aa, synthetic construct
MPAAKRVKLDGGDKKYSIGLDIGTNSVGWAVITDEYKVPSKKFKVLGNTDRHSIKKNLIGALLFDSGETAEATRLKRTARRRYTRRKNRICYLQEIFSNEMAKVDDSFFHRLEESFLVEEDKKHERHPIFGNIVDEVAYHEKYPTIYHLRKKLVDSTDKADLRLIYLALAHMIKFRGHFLIEGDLNPDNSDVDKLFIQLVQTYNQLFEENPINASGVDAKAILSARLSKSRRLENLIAQLPGEKKNGLFGNLIALSLGLTPNFKSNFDLAEDAKLQLSKDTYDDDLDNLLAQIGDQYADLFLAAKNLSDAILLSDILRVNTEITKAPLSASMIKRYDEHHQDLTLLKALVRQQLPEKYKEIFFDQSKNGYAGYIDGGASQEEFYKFIKPILEKMDGTEELLVKLNREDLLRKQRTFDNGSIPHQIHLGELHAILRRQEDFYPFLKDNREKIEKILTFRIPYYVGPLARGNSRFAWMTRKSEETITPWNFEEVVDKGASAQSFIERMTNFDKNLPNEKVLPKHSLLYEYFTVYNELTKVKYVTEGMRKPAFLSGEQKKAIVDLLFKTNRKVTVKQLKEDYFKKIECFDSVEISGVEDRFNASLGTYHDLLKIIKDKDFLDNEENEDILEDIVLTLTLFEDREMIEERLKTYAHLFDDKVMKQLKRRRYTGWGRLSRKLINGIRDKQSGKTILDFLKSDGFANRNFMQLIHDDSLTFKEDIQKAQVSGQGDSLHEHIANLAGSPAIKKGILQTVKVVDELVKVMGRHKPENIVIEMARENQTTQKGQKNSRERMKRIEEGIKELGSQILKEHPVENTQLQNEKLYLYYLQNGRDMYVDQELDINRLSDYDVDHIVPQSFLKDDSIDNKVLTRSDKARGKSDNVPSEEVVKKMKNYWRQLLNAKLITQRKFDNLTKAERGGLSELDKAGFIKRQLVETRQITKHVAQILDSRMNTKYDENDKLIREVKVITLKSKLVSDFRKDFQFYKVREINNYHHAHDAYLNAVVGTALIKKYPKLESEFVYGDYKVYDVRKMIAKSEQEIGKATAKYFFYSNIMNFFKTEITLANGEIRKRPLIETNGETGEIVWDKGRDFATVRKVLSMPQVNIVKKTEVQTGGFSKESILPKRNSDKLIARKKDWDPKKYGGFDSPTVAYSVLVVAKVEKGKSKKLKSVKELLGITIMERSSFEKNPIDFLEAKGYKEVKKDLIIKLPKYSLFELENGRKRMLASAGELQKGNELALPSKYVNFLYLASHYEKLKGSPEDNEQKQLFVEQHKHYLDEIIEQISEFSKRVILADANLDKVLSAYNKHRDKPIREQAENIIHLFTLTNLGAPAAFKYFDTTIDRKRYTSTKEVLDATLIHQSITGLYETRIDLSQLGGDGGGGSGGSGGSGGSGGSGGMDLLKPLTVERKGVKIKGYWNSQADITCVPKDLLQGEEPVRQQNVTTIHGTQEGDVYYVNLKIDGRRINTEVIGTTLDYAIITPGDVPWILKKPLELTIKLDLEEQQGTLLNNSILSKKGKEELKQLFEKYSALWQSWENQVGHRRIRPHKIATGTVKPTPQKQYHINPKAKPDIQIVINDLLKQGVLIQKESTMNTPVYPVPKPNGRWRMVLDYRAVNKVTPLIAVQNQHSYGILGSLFKGRYKTTIDLSNGFWAHPIVPEDYWITAFTWQGKQYCWTVLPQGFLNSPGLFTGDVVDLLQGIPNVEVYVDDVYISHDSEKEHLEYLDILFNRLKEAGYIISLKKSNIANSIVDFLGFQITNEGRGLTDTFKEKLENITAPTTLKQLQSILGLLNFARNFIPDFTELIAPLYALIPKSTKNYVPWQIEHSTTLETLITKLNGAEYLQGRKGDKTLIMKVNASYTTGYIRYYNEGEKKPISYVSIVFSKTELKFTELEKLLTTVHKGLLKALDLSMGQNIHVYSPIVSMQNIQKTPQTAKKALASRWLSWLSYLEDPRIRFFYDPQMPALKDLPAVDTGKDNKKHPSNFQHIFYTDGSAITSPTKEGHLNAGMGIVYFINKDGNLQKQQEWSISLGNHTAQFAEIAAFEFALKKCLPLGGNILVVTDSNYVAKAYNEELDVWASNGFVNNRKKPLKHISKWKSVADLKRLRPDVVVTHEPGHQKLDSSPHAYGNNLADQLATQASFKVHAGKRTADGSEFEKRTADGSEFESPKKKAKVE

SEQ ID NO: 6057 - protein, 2177 aa, synthetic construct
MPAAKRVKLDGGDKKYSIGLDIGTNSVGWAVITDEYKVPSKKFKVLGNTDRHSIKKNLIGALLFDSGETAEATRLKRTARRRYTRRKNRICYLQEIFSNEMAKVDDSFFHRLEESFLVEEDKKHERHPIFGNIVDEVAYHEKYPTIYHLRKKLVDSTDKADLRLIYLALAHMIKFRGHFLIEGDLNPDNSDVDKLFIQLVQTYNQLFEENPINASGVDAKAILSARLSKSRRLENLIAQLPGEKKNGLFGNLIALSLGLTPNFKSNFDLAEDAKLQLSKDTYDDDLDNLLAQIGDQYADLFLAAKNLSDAILLSDILRVNTEITKAPLSASMIKRYDEHHQDLTLLKALVRQQLPEKYKEIFFDQSKNGYAGYIDGGASQEEFYKFIKPILEKMDGTEELLVKLNREDLLRKQRTFDNGSIPHQIHLGELHAILRRQEDFYPFLKDNREKIEKILTFRIPYYVGPLARGNSRFAWMTRKSEETITPWNFEEVVDKGASAQSFIERMTNFDKNLPNEKVLPKHSLLYEYFTVYNELTKVKYVTEGMRKPAFLSGEQKKAIVDLLFKTNRKVTVKQLKEDYFKKIECFDSVEISGVEDRFNASLGTYHDLLKIIKDKDFLDNEENEDILEDIVLTLTLFEDREMIEERLKTYAHLFDDKVMKQLKRRRYTGWGRLSRKLINGIRDKQSGKTILDFLKSDGFANRNFMQLIHDDSLTFKEDIQKAQVSGQGDSLHEHIANLAGSPAIKKGILQTVKVVDELVKVMGRHKPENIVIEMARENQTTQKGQKNSRERMKRIEEGIKELGSQILKEHPVENTQLQNEKLYLYYLQNGRDMYVDQELDINRLSDYDVDHIVPQSFLKDDSIDNKVLTRSDKARGKSDNVPSEEVVKKMKNYWRQLLNAKLITQRKFDNLTKAERGGLSELDKAGFIKRQLVETRQITKHVAQILDSRMNTKYDENDKLIREVKVITLKSKLVSDFRKDFQFYKVREINNYHHAHDAYLNAVVGTALIKKYPKLESEFVYGDYKVYDVRKMIAKSEQEIGKATAKYFFYSNIMNFFKTEITLANGEIRKRPLIETNGETGEIVWDKGRDFATVRKVLSMPQVNIVKKTEVQTGGFSKESILPKRNSDKLIARKKDWDPKKYGGFDSPTVAYSVLVVAKVEKGKSKKLKSVKELLGITIMERSSFEKNPIDFLEAKGYKEVKKDLIIKLPKYSLFELENGRKRMLASAGELQKGNELALPSKYVNFLYLASHYEKLKGSPEDNEQKQLFVEQHKHYLDEIIEQISEFSKRVILADANLDKVLSAYNKHRDKPIREQAENIIHLFTLTNLGAPAAFKYFDTTIDRKRYTSTKEVLDATLIHQSITGLYETRIDLSQLGGDGGGGSGGSGGSGGSGGSGGMDLLKPLTVERKGVKIKGYWNSQADITCVPKDLLQGEEPVRQQNVTTIHGTQEGDVYYVNLKIDGRRINTEVIGTTLDYAIITPGDVPWILKKPLELTIKLDLEEQQGTLLNNSILSKKGKEELKQLFEKYSALWQSWENQVGHRRIRPHKIATGTVKPTPQKQYHINPKAKPDIQIVINDLLKQGVLIQKESTMNTPVYPVPKPNGRWRMVLDYRAVNKVTPLIAVQNQHSYGILGSLFKGRYKTTIDLSNGFWAHPIVPEDYWITAFTWQGKQYCWTVLPQGFLNSPGLFNGDVVDLLQGIPNVEVYVDDVYISHDSEKEHLEYLDILFNRLKEAGYIISLKKSNIANSIVDFLGFQITNEGRGLTDTFKEKLENITAPTTLKQLQSILGLLNFARNFIPDFTELIAPLYALIPKSPKNYVPWQIEHSTTLETLITKLNGAEYLQGRKGDKTLIMKVNASYTTGYIRYYNEGEKKPISYVSIVFSKTELKFTELEKLLTTVHKGLLKALDLSMGQNIHVYSPIVSMQNIQKTPQTAKKALASRWLSWLSYLEDPRIRFFYDPQMPALKDLPAVDTGKDNKKHPSNFQHIFYTDGSAITSPTKEGHLNAGMGIVYFINKDGNLQKQQEWSISLGNHTAQFAEIAAFEFALKKCLPLGGNILVVTDSNYVAKAYNEELDVWASNGFVNNRKKPLKHISKWKSVADLKRLRPDVVVTHEPGHQKLDSSPHAYGNNLADQLATQASFKVHAGKRTADGSEFEKRTADGSEFESPKKKAKVE

SEQ ID NO: 6058 - protein, 2099 aa, synthetic construct
MPAAKRVKLDGGDKKYSIGLDIGTNSVGWAVITDEYKVPSKKFKVLGNTDRHSIKKNLIGALLFDSGETAEATRLKRTARRRYTRRKNRICYLQEIFSNEMAKVDDSFFHRLEESFLVEEDKKHERHPIFGNIVDEVAYHEKYPTIYHLRKKLVDSTDKADLRLIYLALAHMIKFRGHFLIEGDLNPDNSDVDKLFIQLVQTYNQLFEENPINASGVDAKAILSARLSKSRRLENLIAQLPGEKKNGLFGNLIALSLGLTPNFKSNFDLAEDAKLQLSKDTYDDDLDNLLAQIGDQYADLFLAAKNLSDAILLSDILRVNTEITKAPLSASMIKRYDEHHQDLTLLKALVRQQLPEKYKEIFFDQSKNGYAGYIDGGASQEEFYKFIKPILEKMDGTEELLVKLNREDLLRKQRTFDNGSIPHQIHLGELHAILRRQEDFYPFLKDNREKIEKILTFRIPYYVGPLARGNSRFAWMTRKSEETITPWNFEEVVDKGASAQSFIERMTNFDKNLPNEKVLPKHSLLYEYFTVYNELTKVKYVTEGMRKPAFLSGEQKKAIVDLLFKTNRKVTVKQLKEDYFKKIECFDSVEISGVEDRFNASLGTYHDLLKIIKDKDFLDNEENEDILEDIVLTLTLFEDREMIEERLKTYAHLFDDKVMKQLKRRRYTGWGRLSRKLINGIRDKQSGKTILDFLKSDGFANRNFMQLIHDDSLTFKEDIQKAQVSGQGDSLHEHIANLAGSPAIKKGILQTVKVVDELVKVMGRHKPENIVIEMARENQTTQKGQKNSRERMKRIEEGIKELGSQILKEHPVENTQLQNEKLYLYYLQNGRDMYVDQELDINRLSDYDVDHIVPQSFLKDDSIDNKVLTRSDKARGKSDNVPSEEVVKKMKNYWRQLLNAKLITQRKFDNLTKAERGGLSELDKAGFIKRQLVETRQITKHVAQILDSRMNTKYDENDKLIREVKVITLKSKLVSDFRKDFQFYKVREINNYHHAHDAYLNAVVGTALIKKYPKLESEFVYGDYKVYDVRKMIAKSEQEIGKATAKYFFYSNIMNFFKTEITLANGEIRKRPLIETNGETGEIVWDKGRDFATVRKVLSMPQVNIVKKTEVQTGGFSKESILPKRNSDKLIARKKDWDPKKYGGFDSPTVAYSVLVVAKVEKGKSKKLKSVKELLGITIMERSSFEKNPIDFLEAKGYKEVKKDLIIKLPKYSLFELENGRKRMLASAGELQKGNELALPSKYVNFLYLASHYEKLKGSPEDNEQKQLFVEQHKHYLDEIIEQISEFSKRVILADANLDKVLSAYNKHRDKPIREQAENIIHLFTLTNLGAPAAFKYFDTTIDRKRYTSTKEVLDATLIHQSITGLYETRIDLSQLGGDGGGGSGGSGGSGGSGGSGGTLQLEEEYRLFEPESTQKQEMDIWLKNFPQAWAETGGMGTAHCQAPVLIQLKATATPISIRQYPMPHEAYQGIKPHIRRMLDQGILKPCQSPWNTPLLPVKKPGTEDYRPVQDLREVNKRVEDIHPTVPNPYNLLSTLPPSHPWYTVLDLKDAFFCLRLHSESQLLFAFEWRDPEIGLSGQLTWTRLPQGFKNSPTLFNEALHSDLADFRVRYPALVLLQYVDDLLLAAATRTECLEGTKALLETLGNKGYRASAKKAQICLQEVTYLGYSLKDGQRWLTKARKEAILSIPVPKNSRQVREFLGTAGYCRLWIPGFAELAAPLYPLTRPGTLFQWGTEQQLAFEDIKKALLSSPALGLPDITKPFELFIDENSGFAKGVLVQKLGPWKRPVAYLSKKLDTVASGWPPCLRMVAAIAILVKDAGKLTLGQPLTILTSHPVEALVRQPPNKWLSNARMTHYQAMLLDAERVHFGPTVSLNPATLLPLPSGGNHHDCLQILAETHGTRPDLTDQPLPDADLTWYTDGSSFIRNGEREAGAAVTTESEVIWAAPLPPGTSAQRAELIALTQALKMAEGKKLTVYTDSRYAFATTHVHGEIYRRRGWLTSEGKEIKNKNEILALLEALFLPKRLSIIHCPGHQKGDSPQAKGNRLADDTAKKAATETHSSLTVLPAGKRTADGSEFEKRTADGSEFESPKKKAKVE

SEQ ID NO: 6059 - protein, 2099 aa, synthetic construct
MPAAKRVKLDGGDKKYSIGLDIGTNSVGWAVITDEYKVPSKKFKVLGNTDRHSIKKNLIGALLFDSGETAEATRLKRTARRRYTRRKNRICYLQEIFSNEMAKVDDSFFHRLEESFLVEEDKKHERHPIFGNIVDEVAYHEKYPTIYHLRKKLVDSTDKADLRLIYLALAHMIKFRGHFLIEGDLNPDNSDVDKLFIQLVQTYNQLFEENPINASGVDAKAILSARLSKSRRLENLIAQLPGEKKNGLFGNLIALSLGLTPNFKSNFDLAEDAKLQLSKDTYDDDLDNLLAQIGDQYADLFLAAKNLSDAILLSDILRVNTEITKAPLSASMIKRYDEHHQDLTLLKALVRQQLPEKYKEIFFDQSKNGYAGYIDGGASQEEFYKFIKPILEKMDGTEELLVKLNREDLLRKQRTFDNGSIPHQIHLGELHAILRRQEDFYPFLKDNREKIEKILTFRIPYYVGPLARGNSRFAWMTRKSEETITPWNFEEVVDKGASAQSFIERMTNFDKNLPNEKVLPKHSLLYEYFTVYNELTKVKYVTEGMRKPAFLSGEQKKAIVDLLFKTNRKVTVKQLKEDYFKKIECFDSVEISGVEDRFNASLGTYHDLLKIIKDKDFLDNEENEDILEDIVLTLTLFEDREMIEERLKTYAHLFDDKVMKQLKRRRYTGWGRLSRKLINGIRDKQSGKTILDFLKSDGFANRNFMQLIHDDSLTFKEDIQKAQVSGQGDSLHEHIANLAGSPAIKKGILQTVKVVDELVKVMGRHKPENIVIEMARENQTTQKGQKNSRERMKRIEEGIKELGSQILKEHPVENTQLQNEKLYLYYLQNGRDMYVDQELDINRLSDYDVDHIVPQSFLKDDSIDNKVLTRSDKARGKSDNVPSEEVVKKMKNYWRQLLNAKLITQRKFDNLTKAERGGLSELDKAGFIKRQLVETRQITKHVAQILDSRMNTKYDENDKLIREVKVITLKSKLVSDFRKDFQFYKVREINNYHHAHDAYLNAVVGTALIKKYPKLESEFVYGDYKVYDVRKMIAKSEQEIGKATAKYFFYSNIMNFFKTEITLANGEIRKRPLIETNGETGEIVWDKGRDFATVRKVLSMPQVNIVKKTEVQTGGFSKESILPKRNSDKLIARKKDWDPKKYGGFDSPTVAYSVLVVAKVEKGKSKKLKSVKELLGITIMERSSFEKNPIDFLEAKGYKEVKKDLIIKLPKYSLFELENGRKRMLASAGELQKGNELALPSKYVNFLYLASHYEKLKGSPEDNEQKQLFVEQHKHYLDEIIEQISEFSKRVILADANLDKVLSAYNKHRDKPIREQAENIIHLFTLTNLGAPAAFKYFDTTIDRKRYTSTKEVLDATLIHQSITGLYETRIDLSQLGGDGGGGSGGSGGSGGSGGSGGTLQLEEEYRLFEPESTQKQEMDIWLKNFPQAWAETGGMGTAHCQAPVLIQLKATATPISIRQYPMPHEAYQGIKPHIRRMLDQGILKPCQSPWNTPLLPVKKPGTEDYRPVQDLREVNKRVEDIHPTVPNPYNLLSTLPPSHPWYTVLDLKDAFFCLRLHSESQLLFAFEWRDPEIGLSGQLTWTRLPQGFKNSPTLFNEALHSDLADFRVRYPALVLLQYVDDLLLAAATRTECLEGTKALLETLGNKGYRASAKKAQICLQEVTYLGYSLKDGQRWLTKARKEAILSIPVPKNSRQVREFLGKAGYCRLFIPGFAELAAPLYPLTRPGTLFQWGTEQQLAFEDIKKALLSSPALGLPDITKPFELFIDENSGFAKGVLVQKLGPWKRPVAYLSKKLDTVASGWPPCLRMVAAIAILVKDAGKLTLGQPLTILTSHPVEALVRQPPNKWLSNARMTHYQAMLLDAERVHFGPTVSLNPATLLPLPSGGNHHDCLQILAETHGTRPDLTDQPLPDADLTWYTDGSSFIRNGEREAGAAVTTESEVIWAAPLPPGTSAQRAELIALTQALKMAEGKKLTVYTDSRYAFATTHVHGEIYRRRGWLTSEGKEIKNKNEILALLEALFLPKRLSIIHCPGHQKGDSPQAKGNRLADDTAKKAATETHSSLTVLPAGKRTADGSEFEKRTADGSEFESPKKKAKVE

SEQ ID NO: 6060 - protein, 2180 aa, synthetic construct
MPAAKRVKLDGGDKKYSIGLDIGTNSVGWAVITDEYKVPSKKFKVLGNTDRHSIKKNLIGALLFDSGETAEATRLKRTARRRYTRRKNRICYLQEIFSNEMAKVDDSFFHRLEESFLVEEDKKHERHPIFGNIVDEVAYHEKYPTIYHLRKKLVDSTDKADLRLIYLALAHMIKFRGHFLIEGDLNPDNSDVDKLFIQLVQTYNQLFEENPINASGVDAKAILSARLSKSRRLENLIAQLPGEKKNGLFGNLIALSLGLTPNFKSNFDLAEDAKLQLSKDTYDDDLDNLLAQIGDQYADLFLAAKNLSDAILLSDILRVNTEITKAPLSASMIKRYDEHHQDLTLLKALVRQQLPEKYKEIFFDQSKNGYAGYIDGGASQEEFYKFIKPILEKMDGTEELLVKLNREDLLRKQRTFDNGSIPHQIHLGELHAILRRQEDFYPFLKDNREKIEKILTFRIPYYVGPLARGNSRFAWMTRKSEETITPWNFEEVVDKGASAQSFIERMTNFDKNLPNEKVLPKHSLLYEYFTVYNELTKVKYVTEGMRKPAFLSGEQKKAIVDLLFKTNRKVTVKQLKEDYFKKIECFDSVEISGVEDRFNASLGTYHDLLKIIKDKDFLDNEENEDILEDIVLTLTLFEDREMIEERLKTYAHLFDDKVMKQLKRRRYTGWGRLSRKLINGIRDKQSGKTILDFLKSDGFANRNFMQLIHDDSLTFKEDIQKAQVSGQGDSLHEHIANLAGSPAIKKGILQTVKVVDELVKVMGRHKPENIVIEMARENQTTQKGQKNSRERMKRIEEGIKELGSQILKEHPVENTQLQNEKLYLYYLQNGRDMYVDQELDINRLSDYDVDHIVPQSFLKDDSIDNKVLTRSDKARGKSDNVPSEEVVKKMKNYWRQLLNAKLITQRKFDNLTKAERGGLSELDKAGFIKRQLVETRQITKHVAQILDSRMNTKYDENDKLIREVKVITLKSKLVSDFRKDFQFYKVREINNYHHAHDAYLNAVVGTALIKKYPKLESEFVYGDYKVYDVRKMIAKSEQEIGKATAKYFFYSNIMNFFKTEITLANGEIRKRPLIETNGETGEIVWDKGRDFATVRKVLSMPQVNIVKKTEVQTGGFSKESILPKRNSDKLIARKKDWDPKKYGGFDSPTVAYSVLVVAKVEKGKSKKLKSVKELLGITIMERSSFEKNPIDFLEAKGYKEVKKDLIIKLPKYSLFELENGRKRMLASAGELQKGNELALPSKYVNFLYLASHYEKLKGSPEDNEQKQLFVEQHKHYLDEIIEQISEFSKRVILADANLDKVLSAYNKHRDKPIREQAENIIHLFTLTNLGAPAAFKYFDTTIDRKRYTSTKEVLDATLIHQSITGLYETRIDLSQLGGDGGGGSGGSGGSGGSGGSGGMNPLQLLQPLPAEIKGTKLLAHWNSGATITCIPESFLEDEQPIKKTLIKTIHGEKQQNVYYVTFKVKGRKVEAEVIASPYEYILLSPTDVPWLTQQPLQLTILVPLQEYQEKILSKTALPEDQKQQLKTLFVKYDNLWQHWENQVGHRKIRPHNIATGDYPPRPQKQYPINPKAKPSIQIVIDDLLKQGVLTPQNSTMNTPVYPVPKPDGRWRMVLDYREVNKTIPLTAAQNQHSAGILATIVRQKYKTTLDLANGFWAHPITPESYWLTAFTWQGKQYCWTRLPQGFLNSPALFNADVVDLLKEIPNVQVYVDDIYLSHDDPKEHVQQLEKVFQILLQAGYVVSLKKSEIGQKTVEFLGFNITKEGRGLTDTFKTKLLNITPPKDLKQLQSILGKLNFARNFIPNFAELVQPLYNLIAPAKGKYIEWSEENTKQLNMVIEALNTASNLEERLPEQRLVIKVNTSPSAGYVRYYNETGKKPIMYLNYVFSKAELKFSMLEKLLTTMHKALIKAMDLAMGQEILVYSPIVSMTKIQKTPLPERKALPIRWITWMTYLEDPRIQFHYDKTLPELKHIPDVYTSSQSPVKHPSQYEGVFYTDGSAIKSPDPTKSNNAGMGIVHATYKPEYQVLNQWSIPLGNHTAQMAEIAAVEFACKKALKIPGPVLVITDSFYVAESANKELPYWKSNGFVNNKKKPLKHISKWKSIAECLSMKPDITIQHEKGISLQIPVFILKGNALADKLATQGSYVVNAGKRTADGSEFEKRTADGSEFESPKKKAKVE

SEQ ID NO: 6061 - protein, 2098 aa, synthetic construct
MPAAKRVKLDGGDKKYSIGLDIGTNSVGWAVITDEYKVPSKKFKVLGNTDRHSIKKNLIGALLFDSGETAEATRLKRTARRRYTRRKNRICYLQEIFSNEMAKVDDSFFHRLEESFLVEEDKKHERHPIFGNIVDEVAYHEKYPTIYHLRKKLVDSTDKADLRLIYLALAHMIKFRGHFLIEGDLNPDNSDVDKLFIQLVQTYNQLFEENPINASGVDAKAILSARLSKSRRLENLIAQLPGEKKNGLFGNLIALSLGLTPNFKSNFDLAEDAKLQLSKDTYDDDLDNLLAQIGDQYADLFLAAKNLSDAILLSDILRVNTEITKAPLSASMIKRYDEHHQDLTLLKALVRQQLPEKYKEIFFDQSKNGYAGYIDGGASQEEFYKFIKPILEKMDGTEELLVKLNREDLLRKQRTFDNGSIPHQIHLGELHAILRRQEDFYPFLKDNREKIEKILTFRIPYYVGPLARGNSRFAWMTRKSEETITPWNFEEVVDKGASAQSFIERMTNFDKNLPNEKVLPKHSLLYEYFTVYNELTKVKYVTEGMRKPAFLSGEQKKAIVDLLFKTNRKVTVKQLKEDYFKKIECFDSVEISGVEDRFNASLGTYHDLLKIIKDKDFLDNEENEDILEDIVLTLTLFEDREMIEERLKTYAHLFDDKVMKQLKRRRYTGWGRLSRKLINGIRDKQSGKTILDFLKSDGFANRNFMQLIHDDSLTFKEDIQKAQVSGQGDSLHEHIANLAGSPAIKKGILQTVKVVDELVKVMGRHKPENIVIEMARENQTTQKGQKNSRERMKRIEEGIKELGSQILKEHPVENTQLQNEKLYLYYLQNGRDMYVDQELDINRLSDYDVDHIVPQSFLKDDSIDNKVLTRSDKARGKSDNVPSEEVVKKMKNYWRQLLNAKLITQRKFDNLTKAERGGLSELDKAGFIKRQLVETRQITKHVAQILDSRMNTKYDENDKLIREVKVITLKSKLVSDFRKDFQFYKVREINNYHHAHDAYLNAVVGTALIKKYPKLESEFVYGDYKVYDVRKMIAKSEQEIGKATAKYFFYSNIMNFFKTEITLANGEIRKRPLIETNGETGEIVWDKGRDFATVRKVLSMPQVNIVKKTEVQTGGFSKESILPKRNSDKLIARKKDWDPKKYGGFDSPTVAYSVLVVAKVEKGKSKKLKSVKELLGITIMERSSFEKNPIDFLEAKGYKEVKKDLIIKLPKYSLFELENGRKRMLASAGELQKGNELALPSKYVNFLYLASHYEKLKGSPEDNEQKQLFVEQHKHYLDEIIEQISEFSKRVILADANLDKVLSAYNKHRDKPIREQAENIIHLFTLTNLGAPAAFKYFDTTIDRKRYTSTKEVLDATLIHQSITGLYETRIDLSQLGGDGGGGSGGSGGSGGSGGSGGVLNLEEEYRLHEKPVPSSIDPSWLQLFPTVWAERAGMGLANQVPPVVVELRSGASPVAVRQYPMSKEAREGIRPHIQKFLDLGVLVPCRSPWNTPLLPVKKPGTNDYRPVQDLREINKRVQDIHPTVPNPYNLLSSLPPSYTWYSVLDLKDAFFCLRLHPNSQPLFAFEWKDPEKGNTGQLTWTRLPQGFKNSPTLFNEALHRDLAPFRALNPQVVLLQYVDDLLVAAPTYEDCKKGTQKLLQELSKLGYRVSAKKAQLCQREVTYLGYLLKEGKRWLTPARKATVMKIPVPTTPRQVREFLGKAGFCRLFIPGFASLAAPLYPLTKPSIPFIWTEEHQQAFDHIKKALLSAPALALPDLTKPFTLYIDERAGVARGVLTQTLGPWRRPVAYLSKKLDPVASGWPTCLKAVAAVALLLKDADKLTLGQNVTVIASHSLESIVRQPPDRWMTNARMTHYQSLLLNERVSFAPPAVLNPATLLPVESEATPVHRCSEILAEETGTRRDLEDQPLPGVPTWYTDGSSFITEGKRRAGAPIVDGKRTVWASSLPEGTSAQKAELVALTQALRLAEGKNINIYTDSRYAFATAHIHGAIYKQRGWLTSAGKDIKNKEEILALLEAIHLPRRVAIIHCPGHQRGSNPVATGNRRADEAAKQAALSTRVLAGTTKPAGKRTADGSEFEKRTADGSEFESPKKKAKVE

SEQ ID NO: 6062 - protein, 2010 aa, synthetic construct
MPAAKRVKLDGGDKKYSIGLDIGTNSVGWAVITDEYKVPSKKFKVLGNTDRHSIKKNLIGALLFDSGETAEATRLKRTARRRYTRRKNRICYLQEIFSNEMAKVDDSFFHRLEESFLVEEDKKHERHPIFGNIVDEVAYHEKYPTIYHLRKKLVDSTDKADLRLIYLALAHMIKFRGHFLIEGDLNPDNSDVDKLFIQLVQTYNQLFEENPINASGVDAKAILSARLSKSRRLENLIAQLPGEKKNGLFGNLIALSLGLTPNFKSNFDLAEDAKLQLSKDTYDDDLDNLLAQIGDQYADLFLAAKNLSDAILLSDILRVNTEITKAPLSASMIKRYDEHHQDLTLLKALVRQQLPEKYKEIFFDQSKNGYAGYIDGGASQEEFYKFIKPILEKMDGTEELLVKLNREDLLRKQRTFDNGSIPHQIHLGELHAILRRQEDFYPFLKDNREKIEKILTFRIPYYVGPLARGNSRFAWMTRKSEETITPWNFEEVVDKGASAQSFIERMTNFDKNLPNEKVLPKHSLLYEYFTVYNELTKVKYVTEGMRKPAFLSGEQKKAIVDLLFKTNRKVTVKQLKEDYFKKIECFDSVEISGVEDRFNASLGTYHDLLKIIKDKDFLDNEENEDILEDIVLTLTLFEDREMIEERLKTYAHLFDDKVMKQLKRRRYTGWGRLSRKLINGIRDKQSGKTILDFLKSDGFANRNFMQLIHDDSLTFKEDIQKAQVSGQGDSLHEHIANLAGSPAIKKGILQTVKVVDELVKVMGRHKPENIVIEMARENQTTQKGQKNSRERMKRIEEGIKELGSQILKEHPVENTQLQNEKLYLYYLQNGRDMYVDQELDINRLSDYDVDHIVPQSFLKDDSIDNKVLTRSDKARGKSDNVPSEEVVKKMKNYWRQLLNAKLITQRKFDNLTKAERGGLSELDKAGFIKRQLVETRQITKHVAQILDSRMNTKYDENDKLIREVKVITLKSKLVSDFRKDFQFYKVREINNYHHAHDAYLNAVVGTALIKKYPKLESEFVYGDYKVYDVRKMIAKSEQEIGKATAKYFFYSNIMNFFKTEITLANGEIRKRPLIETNGETGEIVWDKGRDFATVRKVLSMPQVNIVKKTEVQTGGFSKESILPKRNSDKLIARKKDWDPKKYGGFDSPTVAYSVLVVAKVEKGKSKKLKSVKELLGITIMERSSFEKNPIDFLEAKGYKEVKKDLIIKLPKYSLFELENGRKRMLASAGELQKGNELALPSKYVNFLYLASHYEKLKGSPEDNEQKQLFVEQHKHYLDEIIEQISEFSKRVILADANLDKVLSAYNKHRDKPIREQAENIIHLFTLTNLGAPAAFKYFDTTIDRKRYTSTKEVLDATLIHQSITGLYETRIDLSQLGGDGGGGSGGSGGSGGSGGSGGPLGTSDSPVTHADPIDWKSEEPVWVDQWPLTQEKLSAAQQLVQEQLRLGHIEPSTSAWNSPIFVIKKKSGKWRLLQDLRKVNETMMHMGALQPGLPTPSAIPDKSYIIVIDLKDCFYTIPLAPQDCKRFAFSLPSVNFKEPMQRYQWRVLPQGMTNSPTLCQKFVATAIAPVRQRFPQLYLVHYMDDILLAHTDEHLLYQAFSILKQHLSLNGLVIADEKIQTHFPYNYLGFSLYPRVYNTQLVKLQTDHLKTLNDFQKLLGDINWIRPYLKLPTYTLQPLFDILKGDSDPASPRTLSLEGRTALQSIEEAIRQQQITYCDYQRSWGLYILPTPRAPTGVLYQDKPLRWIYLSATPTKHLLPYYELVAKIIAKGRHEAIQYFGMEPPFICVPYALEQQDWLFQFSDNWSIAFANYPGQITHHYPSDKLLQFASSHAFIFPKIVRRQPIPEATLIFTDGSSNGTAALIINHQTYYAQTSFSSAQVVELFAVHQALLTVPTSFNLFTDSSYVVGALQMIETVPIIGTTSPEVLNLFTLIQQVLHCRQHPCFFGHIRAHSTLPGALVQGNHTADVLTKQVFFQSAGKRTADGSEFEKRTADGSEFESPKKKAKVE

SEQ ID NO: 6063 - protein, 2131 aa, synthetic construct
MPAAKRVKLDGGDKKYSIGLDIGTNSVGWAVITDEYKVPSKKFKVLGNTDRHSIKKNLIGALLFDSGETAEATRLKRTARRRYTRRKNRICYLQEIFSNEMAKVDDSFFHRLEESFLVEEDKKHERHPIFGNIVDEVAYHEKYPTIYHLRKKLVDSTDKADLRLIYLALAHMIKFRGHFLIEGDLNPDNSDVDKLFIQLVQTYNQLFEENPINASGVDAKAILSARLSKSRRLENLIAQLPGEKKNGLFGNLIALSLGLTPNFKSNFDLAEDAKLQLSKDTYDDDLDNLLAQIGDQYADLFLAAKNLSDAILLSDILRVNTEITKAPLSASMIKRYDEHHQDLTLLKALVRQQLPEKYKEIFFDQSKNGYAGYIDGGASQEEFYKFIKPILEKMDGTEELLVKLNREDLLRKQRTFDNGSIPHQIHLGELHAILRRQEDFYPFLKDNREKIEKILTFRIPYYVGPLARGNSRFAWMTRKSEETITPWNFEEVVDKGASAQSFIERMTNFDKNLPNEKVLPKHSLLYEYFTVYNELTKVKYVTEGMRKPAFLSGEQKKAIVDLLFKTNRKVTVKQLKEDYFKKIECFDSVEISGVEDRFNASLGTYHDLLKIIKDKDFLDNEENEDILEDIVLTLTLFEDREMIEERLKTYAHLFDDKVMKQLKRRRYTGWGRLSRKLINGIRDKQSGKTILDFLKSDGFANRNFMQLIHDDSLTFKEDIQKAQVSGQGDSLHEHIANLAGSPAIKKGILQTVKVVDELVKVMGRHKPENIVIEMARENQTTQKGQKNSRERMKRIEEGIKELGSQILKEHPVENTQLQNEKLYLYYLQNGRDMYVDQELDINRLSDYDVDHIVPQSFLKDDSIDNKVLTRSDKARGKSDNVPSEEVVKKMKNYWRQLLNAKLITQRKFDNLTKAERGGLSELDKAGFIKRQLVETRQITKHVAQILDSRMNTKYDENDKLIREVKVITLKSKLVSDFRKDFQFYKVREINNYHHAHDAYLNAVVGTALIKKYPKLESEFVYGDYKVYDVRKMIAKSEQEIGKATAKYFFYSNIMNFFKTEITLANGEIRKRPLIETNGETGEIVWDKGRDFATVRKVLSMPQVNIVKKTEVQTGGFSKESILPKRNSDKLIARKKDWDPKKYGGFDSPTVAYSVLVVAKVEKGKSKKLKSVKELLGITIMERSSFEKNPIDFLEAKGYKEVKKDLIIKLPKYSLFELENGRKRMLASAGELQKGNELALPSKYVNFLYLASHYEKLKGSPEDNEQKQLFVEQHKHYLDEIIEQISEFSKRVILADANLDKVLSAYNKHRDKPIREQAENIIHLFTLTNLGAPAAFKYFDTTIDRKRYTSTKEVLDATLIHQSITGLYETRIDLSQLGGDGGGGSGGSGGSGGSGGSGGLLGRDLLTKLKAQIQFSTEGPQVTWEDRPAMCLVLNLEEEYRLHEKPVPPSIDPSWLQLFPMVWAEKAGMGLANQVPPVVVELKSDASPVAVRQYPMSKEAREGIRPHIQRFLDLGILVPCQSPWNTPLLPVKKPGTNDYRPVQDLREVNKRVQDIHPTVPNPYNLLSSLPPSHTWYSVLDLKDAFFCLKLHPNSQPLFAFEWRDPEKGNTGQLTWTRLPQGFKNSPTLFNEALHRDLASFRALNPQVVMLQYVDDLLVAAPTYRDCKEGTRRLLQELSKLGYRVSAKKAQLCREEVTYLGYLLKGGKRWLTPARKATVMKIPTPTTPRQVREFLGTAGFCRLWIPGFASLAAPLYPLTRPKVPFTWTEAHQEAFGRIKEALLSAPALALPDLTKPFALYVDEKEGVARGVLTQTLGPWRRPVAYLSKKLDPVASGWPTCLKAIAAVALLLKDADKLTLGQNVLVIAPHNLESIVRQPPDRWMTNARMTHYQSLLLNERVSFAPPAILNPATLLPVESDDTPIHICSEILAEETGTRPDLRDQPLPGVPAWYTDGSSFIMDGRRQAGAAIVDNKRTVWASNLPEGTSAQKAELIALTQALRLAEGKSINIYTDSRYAFATAHVHGAIYKQRGWLTSAGKDIKNKEEILALLEAIHLPKRVAIIHCPGHQRGTDPVATGNRKADEAAKQAAQSTRILTETTKNAGKRTADGSEFEKRTADGSEFESPKKKAKVE

SEQ ID NO: 6064 - protein, 2222 aa, synthetic construct
MPAAKRVKLDGGDKKYSIGLDIGTNSVGWAVITDEYKVPSKKFKVLGNTDRHSIKKNLIGALLFDSGETAEATRLKRTARRRYTRRKNRICYLQEIFSNEMAKVDDSFFHRLEESFLVEEDKKHERHPIFGNIVDEVAYHEKYPTIYHLRKKLVDSTDKADLRLIYLALAHMIKFRGHFLIEGDLNPDNSDVDKLFIQLVQTYNQLFEENPINASGVDAKAILSARLSKSRRLENLIAQLPGEKKNGLFGNLIALSLGLTPNFKSNFDLAEDAKLQLSKDTYDDDLDNLLAQIGDQYADLFLAAKNLSDAILLSDILRVNTEITKAPLSASMIKRYDEHHQDLTLLKALVRQQLPEKYKEIFFDQSKNGYAGYIDGGASQEEFYKFIKPILEKMDGTEELLVKLNREDLLRKQRTFDNGSIPHQIHLGELHAILRRQEDFYPFLKDNREKIEKILTFRIPYYVGPLARGNSRFAWMTRKSEETITPWNFEEVVDKGASAQSFIERMTNFDKNLPNEKVLPKHSLLYEYFTVYNELTKVKYVTEGMRKPAFLSGEQKKAIVDLLFKTNRKVTVKQLKEDYFKKIECFDSVEISGVEDRFNASLGTYHDLLKIIKDKDFLDNEENEDILEDIVLTLTLFEDREMIEERLKTYAHLFDDKVMKQLKRRRYTGWGRLSRKLINGIRDKQSGKTILDFLKSDGFANRNFMQLIHDDSLTFKEDIQKAQVSGQGDSLHEHIANLAGSPAIKKGILQTVKVVDELVKVMGRHKPENIVIEMARENQTTQKGQKNSRERMKRIEEGIKELGSQILKEHPVENTQLQNEKLYLYYLQNGRDMYVDQELDINRLSDYDVDHIVPQSFLKDDSIDNKVLTRSDKARGKSDNVPSEEVVKKMKNYWRQLLNAKLITQRKFDNLTKAERGGLSELDKAGFIKRQLVETRQITKHVAQILDSRMNTKYDENDKLIREVKVITLKSKLVSDFRKDFQFYKVREINNYHHAHDAYLNAVVGTALIKKYPKLESEFVYGDYKVYDVRKMIAKSEQEIGKATAKYFFYSNIMNFFKTEITLANGEIRKRPLIETNGETGEIVWDKGRDFATVRKVLSMPQVNIVKKTEVQTGGFSKESILPKRNSDKLIARKKDWDPKKYGGFDSPTVAYSVLVVAKVEKGKSKKLKSVKELLGITIMERSSFEKNPIDFLEAKGYKEVKKDLIIKLPKYSLFELENGRKRMLASAGELQKGNELALPSKYVNFLYLASHYEKLKGSPEDNEQKQLFVEQHKHYLDEIIEQISEFSKRVILADANLDKVLSAYNKHRDKPIREQAENIIHLFTLTNLGAPAAFKYFDTTIDRKRYTSTKEVLDATLIHQSITGLYETRIDLSQLGGDGGGGSGGSGGSGGSGGSGGTLGDQGSRGSDPLPEPRVTLTVEGIPTEFLVNTGAEHSVLTKPMGKMGSKRTVVAGATGSKVYPWTTKRLLKIGQKQVTHSFLVIPECPAPLLGRDLLTKLKAQIQFSTEGPQVTWEDRPAMCLVLNLEEEYRLHEKPVPPSIDPSWLQLFPMVWAEKAGMGLANQVPPVVVELKSDASPVAVRQYPMSKEAREGIRPHIQRFLDLGILVPCQSPWNTPLLPVKKPGTNDYRPVQDLREVNKRVQDIHPTVPNPYNLLSSLPPSHTWYSVLDLKDAFFCLKLHPNSQPLFAFEWRDPEKGNTGQLTWTRLPQGFKNSPTLFNEALHRDLASFRALNPQVVMLQYVDDLLVAAPTYRDCKEGTRRLLQELSKLGYRVSAKKAQLCREEVTYLGYLLKGGKRWLTPARKATVMKIPTPTTPRQVREFLGTAGFCRLWIPGFASLAAPLYPLTRPKVPFTWTEAHQEAFGRIKEALLSAPALALPDLTKPFALYVDEKEGVARGVLTQTLGPWRRPVAYLSKKLDPVASGWPTCLKAIAAVALLLKDADKLTLGQNVLVIAPHNLESIVRQPPDRWMTNARMTHYQSLLLNERVSFAPPAILNPATLLPVESDDTPIHICSEILAEETGTRPDLRDQPLPGVPAWYTDGSSFIMDGRRQAGAAIVDNKRTVWASNLPEGTSAQKAELIALTQALRLAEGKSINIYTDSRYAFATAHVHGAIYKQRGWLTSAGKDIKNKEEILALLEAIHLPKRVAIIHCPGHQRGTDPVATGNRKADEAAKQAAQSTRILTETTKNAGKRTADGSEFEKRTADGSEFESPKKKAKVE

SEQ ID NO: 6065 - protein, 2222 aa, synthetic construct
MPAAKRVKLDGGDKKYSIGLDIGTNSVGWAVITDEYKVPSKKFKVLGNTDRHSIKKNLIGALLFDSGETAEATRLKRTARRRYTRRKNRICYLQEIFSNEMAKVDDSFFHRLEESFLVEEDKKHERHPIFGNIVDEVAYHEKYPTIYHLRKKLVDSTDKADLRLIYLALAHMIKFRGHFLIEGDLNPDNSDVDKLFIQLVQTYNQLFEENPINASGVDAKAILSARLSKSRRLENLIAQLPGEKKNGLFGNLIALSLGLTPNFKSNFDLAEDAKLQLSKDTYDDDLDNLLAQIGDQYADLFLAAKNLSDAILLSDILRVNTEITKAPLSASMIKRYDEHHQDLTLLKALVRQQLPEKYKEIFFDQSKNGYAGYIDGGASQEEFYKFIKPILEKMDGTEELLVKLNREDLLRKQRTFDNGSIPHQIHLGELHAILRRQEDFYPFLKDNREKIEKILTFRIPYYVGPLARGNSRFAWMTRKSEETITPWNFEEVVDKGASAQSFIERMTNFDKNLPNEKVLPKHSLLYEYFTVYNELTKVKYVTEGMRKPAFLSGEQKKAIVDLLFKTNRKVTVKQLKEDYFKKIECFDSVEISGVEDRFNASLGTYHDLLKIIKDKDFLDNEENEDILEDIVLTLTLFEDREMIEERLKTYAHLFDDKVMKQLKRRRYTGWGRLSRKLINGIRDKQSGKTILDFLKSDGFANRNFMQLIHDDSLTFKEDIQKAQVSGQGDSLHEHIANLAGSPAIKKGILQTVKVVDELVKVMGRHKPENIVIEMARENQTTQKGQKNSRERMKRIEEGIKELGSQILKEHPVENTQLQNEKLYLYYLQNGRDMYVDQELDINRLSDYDVDHIVPQSFLKDDSIDNKVLTRSDKARGKSDNVPSEEVVKKMKNYWRQLLNAKLITQRKFDNLTKAERGGLSELDKAGFIKRQLVETRQITKHVAQILDSRMNTKYDENDKLIREVKVITLKSKLVSDFRKDFQFYKVREINNYHHAHDAYLNAVVGTALIKKYPKLESEFVYGDYKVYDVRKMIAKSEQEIGKATAKYFFYSNIMNFFKTEITLANGEIRKRPLIETNGETGEIVWDKGRDFATVRKVLSMPQVNIVKKTEVQTGGFSKESILPKRNSDKLIARKKDWDPKKYGGFDSPTVAYSVLVVAKVEKGKSKKLKSVKELLGITIMERSSFEKNPIDFLEAKGYKEVKKDLIIKLPKYSLFELENGRKRMLASAGELQKGNELALPSKYVNFLYLASHYEKLKGSPEDNEQKQLFVEQHKHYLDEIIEQISEFSKRVILADANLDKVLSAYNKHRDKPIREQAENIIHLFTLTNLGAPAAFKYFDTTIDRKRYTSTKEVLDATLIHQSITGLYETRIDLSQLGGDGGGGSGGSGGSGGSGGSGGTLGDQGSRGSDPLPEPRVTLTVEGIPTEFLVNTGAEHSVLTKPMGKMGSKRTVVAGATGSKVYPWTTKRLLKIGQKQVTHSFLVIPECPAPLLGRDLLTKLKAQIQFSTEGPQVTWEDRPAMCLVLNLEEEYRLHEKPVPPSIDPSWLQLFPMVWAEKAGMGLANQVPPVVVELKSDASPVAVRQYPMSKEAREGIRPHIQRFLDLGILVPCQSPWNTPLLPVKKPGTNDYRPVQDLREVNKRVQDIHPTVPNPYNLLSSLPPSHTWYSVLDLKDAFFCLKLHPNSQPLFAFEWRDPEKGNTGQLTWTRLPQGFKNSPTLFNEALHRDLASFRALNPQVVMLQYVDDLLVAAPTYRDCKEGTRRLLQELSKLGYRVSAKKAQLCREEVTYLGYLLKGGKRWLTPARKATVMKIPTPTTPRQVREFLGKAGFCRLFIPGFASLAAPLYPLTRPKVPFTWTEAHQEAFGRIKEALLSAPALALPDLTKPFALYVDEKEGVARGVLTQTLGPWRRPVAYLSKKLDPVASGWPTCLKAIAAVALLLKDADKLTLGQNVLVIAPHNLESIVRQPPDRWMTNARMTHYQSLLLNERVSFAPPAILNPATLLPVESDDTPIHICSEILAEETGTRPDLRDQPLPGVPAWYTDGSSFIMDGRRQAGAAIVDNKRTVWASNLPEGTSAQKAELIALTQALRLAEGKSINIYTDSRYAFATAHVHGAIYKQRGWLTSAGKDIKNKEEILALLEAIHLPKRVAIIHCPGHQRGTDPVATGNRKADEAAKQAAQSTRILTETTKNAGKRTADGSEFEKRTADGSEFESPKKKAKVE

SEQ ID NO: 6066 - protein, 2100 aa, synthetic construct
MPAAKRVKLDGGDKKYSIGLDIGTNSVGWAVITDEYKVPSKKFKVLGNTDRHSIKKNLIGALLFDSGETAEATRLKRTARRRYTRRKNRICYLQEIFSNEMAKVDDSFFHRLEESFLVEEDKKHERHPIFGNIVDEVAYHEKYPTIYHLRKKLVDSTDKADLRLIYLALAHMIKFRGHFLIEGDLNPDNSDVDKLFIQLVQTYNQLFEENPINASGVDAKAILSARLSKSRRLENLIAQLPGEKKNGLFGNLIALSLGLTPNFKSNFDLAEDAKLQLSKDTYDDDLDNLLAQIGDQYADLFLAAKNLSDAILLSDILRVNTEITKAPLSASMIKRYDEHHQDLTLLKALVRQQLPEKYKEIFFDQSKNGYAGYIDGGASQEEFYKFIKPILEKMDGTEELLVKLNREDLLRKQRTFDNGSIPHQIHLGELHAILRRQEDFYPFLKDNREKIEKILTFRIPYYVGPLARGNSRFAWMTRKSEETITPWNFEEVVDKGASAQSFIERMTNFDKNLPNEKVLPKHSLLYEYFTVYNELTKVKYVTEGMRKPAFLSGEQKKAIVDLLFKTNRKVTVKQLKEDYFKKIECFDSVEISGVEDRFNASLGTYHDLLKIIKDKDFLDNEENEDILEDIVLTLTLFEDREMIEERLKTYAHLFDDKVMKQLKRRRYTGWGRLSRKLINGIRDKQSGKTILDFLKSDGFANRNFMQLIHDDSLTFKEDIQKAQVSGQGDSLHEHIANLAGSPAIKKGILQTVKVVDELVKVMGRHKPENIVIEMARENQTTQKGQKNSRERMKRIEEGIKELGSQILKEHPVENTQLQNEKLYLYYLQNGRDMYVDQELDINRLSDYDVDHIVPQSFLKDDSIDNKVLTRSDKARGKSDNVPSEEVVKKMKNYWRQLLNAKLITQRKFDNLTKAERGGLSELDKAGFIKRQLVETRQITKHVAQILDSRMNTKYDENDKLIREVKVITLKSKLVSDFRKDFQFYKVREINNYHHAHDAYLNAVVGTALIKKYPKLESEFVYGDYKVYDVRKMIAKSEQEIGKATAKYFFYSNIMNFFKTEITLANGEIRKRPLIETNGETGEIVWDKGRDFATVRKVLSMPQVNIVKKTEVQTGGFSKESILPKRNSDKLIARKKDWDPKKYGGFDSPTVAYSVLVVAKVEKGKSKKLKSVKELLGITIMERSSFEKNPIDFLEAKGYKEVKKDLIIKLPKYSLFELENGRKRMLASAGELQKGNELALPSKYVNFLYLASHYEKLKGSPEDNEQKQLFVEQHKHYLDEIIEQISEFSKRVILADANLDKVLSAYNKHRDKPIREQAENIIHLFTLTNLGAPAAFKYFDTTIDRKRYTSTKEVLDATLIHQSITGLYETRIDLSQLGGDGGGGSGGSGGSGGSGGSGGTLGIEDEYRLHETSTEPDVSLGSTWLSDFPQAWAETGGMGLAVRQAPLIIPLKATSTPVSIQQYPMSHEARLGIKPHIQRLLDQGILVPCQSPWNTPLLPVKKPGTNDYRPVQDLREVNKRVEDIHPTVPNPYNLLSGLPPSHQWYTVLDLKDAFFCLRLHPTSQPLFAFEWRDPGMGISGQLTWTRLPQGFKNSPTLFNEALHRDLADFRIQHPDLILLQYVDDILLAATSELDCQQGTRALLQTLGDLGYRASAKKAQICQKQVKYLGYLLREGQRWLTEARKETVMGQPVPKTPRQLREFLGTAGFCRLWIPGFAEMAAPLYPLTKPGTLFSWGPDQQKAYQEIKQALLTAPALGLPDLTKPFELFVDEKQGYAKGVLTQKLGPWRRPVAYLSKKLDPVAAGWPPCLRMVAAIAVLTKDAGKLTMGQPLVILAPHAVEALVKQPPDRWLSNARMTHYQAMLLDTDRVQFGPVVALNPATLLPLPEEGAPHDCLEILAETHGTRPDLTDQPIPDADHTWYTDGSSFLQEGQRKAGAAVTTETEVIWAGALPAGTSAQRAELIALTQALKMAEGKRLNVYTDSRYAFATAHIHGEIYRRRGWLTSEGREIKNKSEILALLKALFLPKRLSIIHCLGHQKGDSAEARGNRLADQAAREAAIKTPPDTSTLLAGKRTADGSEFEKRTADGSEFESPKKKAKVE

SEQ ID NO: 6067 - protein, 2100 aa, synthetic construct
MPAAKRVKLDGGDKKYSIGLDIGTNSVGWAVITDEYKVPSKKFKVLGNTDRHSIKKNLIGALLFDSGETAEATRLKRTARRRYTRRKNRICYLQEIFSNEMAKVDDSFFHRLEESFLVEEDKKHERHPIFGNIVDEVAYHEKYPTIYHLRKKLVDSTDKADLRLIYLALAHMIKFRGHFLIEGDLNPDNSDVDKLFIQLVQTYNQLFEENPINASGVDAKAILSARLSKSRRLENLIAQLPGEKKNGLFGNLIALSLGLTPNFKSNFDLAEDAKLQLSKDTYDDDLDNLLAQIGDQYADLFLAAKNLSDAILLSDILRVNTEITKAPLSASMIKRYDEHHQDLTLLKALVRQQLPEKYKEIFFDQSKNGYAGYIDGGASQEEFYKFIKPILEKMDGTEELLVKLNREDLLRKQRTFDNGSIPHQIHLGELHAILRRQEDFYPFLKDNREKIEKILTFRIPYYVGPLARGNSRFAWMTRKSEETITPWNFEEVVDKGASAQSFIERMTNFDKNLPNEKVLPKHSLLYEYFTVYNELTKVKYVTEGMRKPAFLSGEQKKAIVDLLFKTNRKVTVKQLKEDYFKKIECFDSVEISGVEDRFNASLGTYHDLLKIIKDKDFLDNEENEDILEDIVLTLTLFEDREMIEERLKTYAHLFDDKVMKQLKRRRYTGWGRLSRKLINGIRDKQSGKTILDFLKSDGFANRNFMQLIHDDSLTFKEDIQKAQVSGQGDSLHEHIANLAGSPAIKKGILQTVKVVDELVKVMGRHKPENIVIEMARENQTTQKGQKNSRERMKRIEEGIKELGSQILKEHPVENTQLQNEKLYLYYLQNGRDMYVDQELDINRLSDYDVDHIVPQSFLKDDSIDNKVLTRSDKARGKSDNVPSEEVVKKMKNYWRQLLNAKLITQRKFDNLTKAERGGLSELDKAGFIKRQLVETRQITKHVAQILDSRMNTKYDENDKLIREVKVITLKSKLVSDFRKDFQFYKVREINNYHHAHDAYLNAVVGTALIKKYPKLESEFVYGDYKVYDVRKMIAKSEQEIGKATAKYFFYSNIMNFFKTEITLANGEIRKRPLIETNGETGEIVWDKGRDFATVRKVLSMPQVNIVKKTEVQTGGFSKESILPKRNSDKLIARKKDWDPKKYGGFDSPTVAYSVLVVAKVEKGKSKKLKSVKELLGITIMERSSFEKNPIDFLEAKGYKEVKKDLIIKLPKYSLFELENGRKRMLASAGELQKGNELALPSKYVNFLYLASHYEKLKGSPEDNEQKQLFVEQHKHYLDEIIEQISEFSKRVILADANLDKVLSAYNKHRDKPIREQAENIIHLFTLTNLGAPAAFKYFDTTIDRKRYTSTKEVLDATLIHQSITGLYETRIDLSQLGGDGGGGSGGSGGSGGSGGSGGTLNIEDEYRLHETSKEPDVSLGSTWLSDFPQAWAETGGMGLAVRQAPLIIPLKATSTPVSIKQYPMSQEARLGIKPHIQRLLDQGILVPCQSPWNTPLLPVKKPGTNDYRPVQDLREVNKRVEDIHPTVPNPYNLLSGLPPSHQWYTVLDLKDAFFCLRLHPTSQPLFAFEWRDPEMGISGQLTWTRLPQGFKNSPTLFNEALHRDLAGFRIQHPDLILLQYVDDLLLAATSELDCQQGTRALLQTLGDLGYRASAKKAQICQKQVKYLGYLLKEGQRWLTEARKETVMGQPIPKTPRQLREFLGTAGFCRLWIPGFAEMAAPLYPLTKPGTLFNWGPDQQKAFQEIKQALLTAPALGLPDLTKPFELFVDEKQGYAKGVLTQKLGPWRRPVAYLSKKLDPVAAGWPPCLRMVAAIAVLTKDAGKLTMGQPLVILAPHAVEALVKQPPDRWLSNARMTHYQALLLDTDRVQFGPVVALNPATLLPLPEEGLQHDCLDILAEAHGTRSDLMDQPLPDADHTWYTDGSSFLQEGQRKAGAAVTTETEVIWARALPAGTSAQRAELIALTQALKMAEGKKLNVYTDSRYAFATAHIHGEIYRRRGWLTSEGKEIKNKDEILALLKALFLPKRLSIIHCPGHQKGNSAEARGNRMADQAAREVATRETPETSTLLAGKRTADGSEFEKRTADGSEFESPKKKAKVE

SEQ ID NO: 6068 - protein, 2100 aa, synthetic construct
MPAAKRVKLDGGDKKYSIGLDIGTNSVGWAVITDEYKVPSKKFKVLGNTDRHSIKKNLIGALLFDSGETAEATRLKRTARRRYTRRKNRICYLQEIFSNEMAKVDDSFFHRLEESFLVEEDKKHERHPIFGNIVDEVAYHEKYPTIYHLRKKLVDSTDKADLRLIYLALAHMIKFRGHFLIEGDLNPDNSDVDKLFIQLVQTYNQLFEENPINASGVDAKAILSARLSKSRRLENLIAQLPGEKKNGLFGNLIALSLGLTPNFKSNFDLAEDAKLQLSKDTYDDDLDNLLAQIGDQYADLFLAAKNLSDAILLSDILRVNTEITKAPLSASMIKRYDEHHQDLTLLKALVRQQLPEKYKEIFFDQSKNGYAGYIDGGASQEEFYKFIKPILEKMDGTEELLVKLNREDLLRKQRTFDNGSIPHQIHLGELHAILRRQEDFYPFLKDNREKIEKILTFRIPYYVGPLARGNSRFAWMTRKSEETITPWNFEEVVDKGASAQSFIERMTNFDKNLPNEKVLPKHSLLYEYFTVYNELTKVKYVTEGMRKPAFLSGEQKKAIVDLLFKTNRKVTVKQLKEDYFKKIECFDSVEISGVEDRFNASLGTYHDLLKIIKDKDFLDNEENEDILEDIVLTLTLFEDREMIEERLKTYAHLFDDKVMKQLKRRRYTGWGRLSRKLINGIRDKQSGKTILDFLKSDGFANRNFMQLIHDDSLTFKEDIQKAQVSGQGDSLHEHIANLAGSPAIKKGILQTVKVVDELVKVMGRHKPENIVIEMARENQTTQKGQKNSRERMKRIEEGIKELGSQILKEHPVENTQLQNEKLYLYYLQNGRDMYVDQELDINRLSDYDVDHIVPQSFLKDDSIDNKVLTRSDKARGKSDNVPSEEVVKKMKNYWRQLLNAKLITQRKFDNLTKAERGGLSELDKAGFIKRQLVETRQITKHVAQILDSRMNTKYDENDKLIREVKVITLKSKLVSDFRKDFQFYKVREINNYHHAHDAYLNAVVGTALIKKYPKLESEFVYGDYKVYDVRKMIAKSEQEIGKATAKYFFYSNIMNFFKTEITLANGEIRKRPLIETNGETGEIVWDKGRDFATVRKVLSMPQVNIVKKTEVQTGGFSKESILPKRNSDKLIARKKDWDPKKYGGFDSPTVAYSVLVVAKVEKGKSKKLKSVKELLGITIMERSSFEKNPIDFLEAKGYKEVKKDLIIKLPKYSLFELENGRKRMLASAGELQKGNELALPSKYVNFLYLASHYEKLKGSPEDNEQKQLFVEQHKHYLDEIIEQISEFSKRVILADANLDKVLSAYNKHRDKPIREQAENIIHLFTLTNLGAPAAFKYFDTTIDRKRYTSTKEVLDATLIHQSITGLYETRIDLSQLGGDGGGGSGGSGGSGGSGGSGGTLNIEDEHRLHETSKEPDVSLGSTWLSDFPQAWAETGGMGLAVRQAPLIIPLKATSTPVSIKQYPMSQEARLGIKPHIQRLLDQGILVPCQSPWNTPLLPVKKPGTNDYRPVQDLREVNKRVEDIHPTVPNPYNLLSGLPPSHQWYTVLDLKDAFFCLRLHPTSQPLFAFEWRDPEMGISGQLTWTRLPQGFKNSPTLFDEALHRDLADFRIQHPDLILLQYVDDLLLAATSELDCQQGTRALLQTLGNLGYRASAKKAQICQKQVKYLGYLLKEGQRWLTEARKETVMGQPTPKTPRQLREFLGTAGFCRLWIPGFAEMAAPLYPLTKTGTLFNWGPDQQKAYQEIKQALLTAPALGLPDLTKPFELFVDEKQGYAKGVLTQKLGPWRRPVAYLSKKLDPVAAGWPPCLRMVAAIAVLTKDAGKLTMGQPLVILAPHAVEALVKQPPDRWLSNARMTHYQALLLDTDRVQFGPVVALNPATLLPLPEEGLQHNCLDILAEAHGTRPDLTDQPLPDADHTWYTDGSSLLQEGQRKAGAAVTTETEVIWAKALPAGTSAQRAELIALTQALKMAEGKKLNVYTDSRYAFATAHIHGEIYRRRGLLTSEGKEIKNKDEILALLKALFLPKRLSIIHCPGHQKGHSAEARGNRMADQAARKAAITETPDTSTLLAGKRTADGSEFEKRTADGSEFESPKKKAKVE

SEQ ID NO: 6069 - protein, 2094 aa, synthetic construct
MPAAKRVKLDGGDKKYSIGLDIGTNSVGWAVITDEYKVPSKKFKVLGNTDRHSIKKNLIGALLFDSGETAEATRLKRTARRRYTRRKNRICYLQEIFSNEMAKVDDSFFHRLEESFLVEEDKKHERHPIFGNIVDEVAYHEKYPTIYHLRKKLVDSTDKADLRLIYLALAHMIKFRGHFLIEGDLNPDNSDVDKLFIQLVQTYNQLFEENPINASGVDAKAILSARLSKSRRLENLIAQLPGEKKNGLFGNLIALSLGLTPNFKSNFDLAEDAKLQLSKDTYDDDLDNLLAQIGDQYADLFLAAKNLSDAILLSDILRVNTEITKAPLSASMIKRYDEHHQDLTLLKALVRQQLPEKYKEIFFDQSKNGYAGYIDGGASQEEFYKFIKPILEKMDGTEELLVKLNREDLLRKQRTFDNGSIPHQIHLGELHAILRRQEDFYPFLKDNREKIEKILTFRIPYYVGPLARGNSRFAWMTRKSEETITPWNFEEVVDKGASAQSFIERMTNFDKNLPNEKVLPKHSLLYEYFTVYNELTKVKYVTEGMRKPAFLSGEQKKAIVDLLFKTNRKVTVKQLKEDYFKKIECFDSVEISGVEDRFNASLGTYHDLLKIIKDKDFLDNEENEDILEDIVLTLTLFEDREMIEERLKTYAHLFDDKVMKQLKRRRYTGWGRLSRKLINGIRDKQSGKTILDFLKSDGFANRNFMQLIHDDSLTFKEDIQKAQVSGQGDSLHEHIANLAGSPAIKKGILQTVKVVDELVKVMGRHKPENIVIEMARENQTTQKGQKNSRERMKRIEEGIKELGSQILKEHPVENTQLQNEKLYLYYLQNGRDMYVDQELDINRLSDYDVDHIVPQSFLKDDSIDNKVLTRSDKARGKSDNVPSEEVVKKMKNYWRQLLNAKLITQRKFDNLTKAERGGLSELDKAGFIKRQLVETRQITKHVAQILDSRMNTKYDENDKLIREVKVITLKSKLVSDFRKDFQFYKVREINNYHHAHDAYLNAVVGTALIKKYPKLESEFVYGDYKVYDVRKMIAKSEQEIGKATAKYFFYSNIMNFFKTEITLANGEIRKRPLIETNGETGEIVWDKGRDFATVRKVLSMPQVNIVKKTEVQTGGFSKESILPKRNSDKLIARKKDWDPKKYGGFDSPTVAYSVLVVAKVEKGKSKKLKSVKELLGITIMERSSFEKNPIDFLEAKGYKEVKKDLIIKLPKYSLFELENGRKRMLASAGELQKGNELALPSKYVNFLYLASHYEKLKGSPEDNEQKQLFVEQHKHYLDEIIEQISEFSKRVILADANLDKVLSAYNKHRDKPIREQAENIIHLFTLTNLGAPAAFKYFDTTIDRKRYTSTKEVLDATLIHQSITGLYETRIDLSQLGGDGGGGSGGSGGSGGSGGSGGTLQLDDEYRLYSPLVKPDQNIQFWLEQFPQAWAETAGMGLAKQVPPQVIQLKASATPVSVRQYPLSKEAQEGIRPHVQRLIQQGILVPVQSPWNTPLLPVRKPGTNDYRPVQDLREVNKRVQDIHPTVPNPYNLLCALPPQRSWYTVLDLKDAFFCLRLHPTSQPLFAFEWRDPGTGRTGQLTWTRLPQGFKNSPTIFDEALHRDLANFRIQHPQVTLLQYVDDLLLAGATKQDCLEGTKALLLELSDLGYRASAKKAQICRREVTYLGYSLRDGQRWLTEARKKTVVQIPAPTTAKQVREFLGTAGFCRLWIPGFATLAAPLYPLTKEKGEFSWAPEHQKAFDAIKKALLSAPALALPDVTKPFTLYVDERKGVARGVLTQTLGPWRRPVAYLSKKLDPVASGWPVCLKAIAAVAILVKDADKLTLGQNITVIAPHALENIVRQPPDRWMTNARMTHYQSLLLTERVTFAPPAALNPATLLPEETDEPVTHDCHQLLIEETGVRKDLTDIPLTGEVLTWFTDGSSYVVEGKRMAGAAVVDGTRTIWASSLPEGTSAQKAELMALTQALRLAEGKSINIYTDSRYAFATAHVHGAIYKQRGLLTSAGREIKNKEEILSLLEALHLPKRLAIIHCPGHQKAKDPISRGNQMADRVAKQAAQGVNLLAGKRTADGSEFEKRTADGSEFESPKKKAKVE

SEQ ID NO: 6070 - protein, 2094 aa, synthetic construct; identical to SEQ ID NO: 6069

SEQ ID NO: 6071 - protein, 2180 aa, synthetic construct
MPAAKRVKLDGGDKKYSIGLDIGTNSVGWAVITDEYKVPSKKFKVLGNTDRHSIKKNLIGALLFDSGETAEATRLKRTARRRYTRRKNRICYLQEIFSNEMAKVDDSFFHRLEESFLVEEDKKHERHPIFGNIVDEVAYHEKYPTIYHLRKKLVDSTDKADLRLIYLALAHMIKFRGHFLIEGDLNPDNSDVDKLFIQLVQTYNQLFEENPINASGVDAKAILSARLSKSRRLENLIAQLPGEKKNGLFGNLIALSLGLTPNFKSNFDLAEDAKLQLSKDTYDDDLDNLLAQIGDQYADLFLAAKNLSDAILLSDILRVNTEITKAPLSASMIKRYDEHHQDLTLLKALVRQQLPEKYKEIFFDQSKNGYAGYIDGGASQEEFYKFIKPILEKMDGTEELLVKLNREDLLRKQRTFDNGSIPHQIHLGELHAILRRQEDFYPFLKDNREKIEKILTFRIPYYVGPLARGNSRFAWMTRKSEETITPWNFEEVVDKGASAQSFIERMTNFDKNLPNEKVLPKHSLLYEYFTVYNELTKVKYVTEGMRKPAFLSGEQKKAIVDLLFKTNRKVTVKQLKEDYFKKIECFDSVEISGVEDRFNASLGTYHDLLKIIKDKDFLDNEENEDILEDIVLTLTLFEDREMIEERLKTYAHLFDDKVMKQLKRRRYTGWGRLSRKLINGIRDKQSGKTILDFLKSDGFANRNFMQLIHDDSLTFKEDIQKAQVSGQGDSLHEHIANLAGSPAIKKGILQTVKVVDELVKVMGRHKPENIVIEMARENQTTQKGQKNSRERMKRIEEGIKELGSQILKEHPVENTQLQNEKLYLYYLQNGRDMYVDQELDINRLSDYDVDHIVPQSFLKDDSIDNKVLTRSDKARGKSDNVPSEEVVKKMKNYWRQLLNAKLITQRKFDNLTKAERGGLSELDKAGFIKRQLVETRQITKHVAQILDSRMNTKYDENDKLIREVKVITLKSKLVSDFRKDFQFYKVREINNYHHAHDAYLNAVVGTALIKKYPKLESEFVYGDYKVYDVRKMIAKSEQEIGKATAKYFFYSNIMNFFKTEITLANGEIRKRPLIETNGETGEIVWDKGRDFATVRKVLSMPQVNIVKKTEVQTGGFSKESILPKRNSDKLIARKKDWDPKKYGGFDSPTVAYSVLVVAKVEKGKSKKLKSVKELLGITIMERSSFEKNPIDFLEAKGYKEVKKDLIIKLPKYSLFELENGRKRMLASAGELQKGNELALPSKYVNFLYLASHYEKLKGSPEDNEQKQLFVEQHKHYLDEIIEQISEFSKRVILADANLDKVLSAYNKHRDKPIREQAENIIHLFTLTNLGAPAAFKYFDTTIDRKRYTSTKEVLDATLIHQSITGLYETRIDLSQLGGDGGGGSGGSGGSGGSGGSGGMDPLQLLQPLEAEIKGTKLKAHWNSGATITCVPQAFLEEEVPIKNIWIKTIHGEKEQPVYYLTFKIQGRKVEAEVISSPYDYILVSPSDIPWLMKKPLQLTTLVPLQEYEERLLKQTMLTGSYKEKLQSLFLKYDALWQHWENQVGHRRIKPHHIATGTVNPRPQKQYPINPKAKASIQTVINDLLKQGVLIQQNSIMNTPVYPVPKPDGKWRMVLDYREVNKTIPLIAAQNQHSAGILSSIFRGKYKTTLDLSNGFWAHSITPESYWLTAFTWLGQQYCWTRLPQGFLNSPALFNADVVDLLKEVPNVQVYVDDIYISHDDPREHLEQLEKVFSLLLNAGYVVSLKKSEIAQHEVEFLGFNITKEGRGLTETFKQKLLNITPPRDLKQLQSILGLLNFARNFIPNFSELVKPLYNIIATAPGKYITWTTDNSQQLQNIISMLNSAENLEERNPEVRLIMKVNTSPSAGYIRFYNEFAKRPIMYLNYVYTKAEVKFTNTEKLLTTIHKGLIKALDLGMGQEILVYSPIVSMTKIQKTPLPERKALPIRWITWMSYLEDPRIQFHYDKTLPELQQVPTVTDDIIAKIKHPSEFSMVFYTDGSAIKHPNVNKSHNAGMGIAQVQFKPEFTVINTWSIPLGDHTAQLAEVAAVEFACKKALKIDGPVLIVTDSFYVAESVNKELPYWQSNGFFNNKKKPLKHVSKWKSIADCIQLKPDIIIIHEKGHQPTASTFHTEGNNLADKLATQGSYVVNAGKRTADGSEFEKRTADGSEFESPKKKAKVE

SEQ ID NO: 6072 - protein, 2180 aa, synthetic construct
MPAAKRVKLDGGDKKYSIGLDIGTNSVGWAVITDEYKVPSKKFKVLGNTDRHSIKKNLIGALLFDSGETAEATRLKRTARRRYTRRKNRICYLQEIFSNEMAKVDDSFFHRLEESFLVEEDKKHERHPIFGNIVDEVAYHEKYPTIYHLRKKLVDSTDKADLRLIYLALAHMIKFRGHFLIEGDLNPDNSDVDKLFIQLVQTYNQLFEENPINASGVDAKAILSARLSKSRRLENLIAQLPGEKKNGLFGNLIALSLGLTPNFKSNFDLAEDAKLQLSKDTYDDDLDNLLAQIGDQYADLFLAAKNLSDAILLSDILRVNTEITKAPLSASMIKRYDEHHQDLTLLKALVRQQLPEKYKEIFFDQSKNGYAGYIDGGASQEEFYKFIKPILEKMDGTEELLVKLNREDLLRKQRTFDNGSIPHQIHLGELHAILRRQEDFYPFLKDNREKIEKILTFRIPYYVGPLARGNSRFAWMTRKSEETITPWNFEEVVDKGASAQSFIERMTNFDKNLPNEKVLPKHSLLYEYFTVYNELTKVKYVTEGMRKPAFLSGEQKKAIVDLLFKTNRKVTVKQLKEDYFKKIECFDSVEISGVEDRFNASLGTYHDLLKIIKDKDFLDNEENEDILEDIVLTLTLFEDREMIEERLKTYAHLFDDKVMKQLKRRRYTGWGRLSRKLINGIRDKQSGKTILDFLKSDGFANRNFMQLIHDDSLTFKEDIQKAQVSGQGDSLHEHIANLAGSPAIKKGILQTVKVVDELVKVMGRHKPENIVIEMARENQTTQKGQKNSRERMKRIEEGIKELGSQILKEHPVENTQLQNEKLYLYYLQNGRDMYVDQELDINRLSDYDVDHIVPQSFLKDDSIDNKVLTRSDKARGKSDNVPSEEVVKKMKNYWRQLLNAKLITQRKFDNLTKAERGGLSELDKAGFIKRQLVETRQITKHVAQILDSRMNTKYDENDKLIREVKVITLKSKLVSDFRKDFQFYKVREINNYHHAHDAYLNAVVGTALIKKYPKLESEFVYGDYKVYDVRKMIAKSEQEIGKATAKYFFYSNIMNFFKTEITLANGEIRKRPLIETNGETGEIVWDKGRDFATVRKVLSMPQVNIVKKTEVQTGGFSKESILPKRNSDKLIARKKDWDPKKYGGFDSPTVAYSVLVVAKVEKGKSKKLKSVKELLGITIMERSSFEKNPIDFLEAKGYKEVKKDLIIKLPKYSLFELENGRKRMLASAGELQKGNELALPSKYVNFLYLASHYEKLKGSPEDNEQKQLFVEQHKHYLDEIIEQISEFSKRVILADANLDKVLSAYNKHRDKPIREQAENIIHLFTLTNLGAPAAFKYFDTTIDRKRYTSTKEVLDATLIHQSITGLYETRIDLSQLGGDGGGGSGGSGGSGGSGGSGGMDPLQLLQPLEAEIKGTKLKAHWNSGATITCVPQAFLEEEVPIKNIWIKTIHGEKEQPVYYLTFKIQGRKVEAEVISSPYDYILVSPSDIPWLMKKPLQLTTLVPLQEYEERLLKQTMLTGSYKEKLQSLFLKYDALWQHWENQVGHRRIKPHHIATGTVNPRPQKQYPINPKAKASIQTVINDLLKQGVLIQQNSIMNTPVYPVPKPDGKWRMVLDYREVNKTIPLIAAQNQHSAGILSSIFRGKYKTTLDLSNGFWAHSITPESYWLTAFTWLGQQYCWTRLPQGFLNSPALFNADVVDLLKEVPNVQVYVDDIYISHDDPREHLEQLEKVFSLLLNAGYVVSLKKSEIAQHEVEFLGFNITKEGRGLTETFKQKLLNITPPRDLKQLQSILGKLNFARNFIPNFSELVKPLYNIIATAPGKYITWTTDNSQQLQNIISMLNSAENLEERNPEVRLIMKVNTSPSAGYIRFYNEFAKRPIMYLNYVYTKAEVKFTNTEKLLTTIHKGLIKALDLGMGQEILVYSPIVSMTKIQKTPLPERKALPIRWITWMSYLEDPRIQFHYDKTLPELQQVPTVTDDIIAKIKHPSEFSMVFYTDGSAIKHPNVNKSHNAGMGIAQVQFKPEFTVINTWSIPLGDHTAQLAEVAAVEFACKKALKIDGPVLIVTDSFYVAESVNKELPYWQSNGFFNNKKKPLKHVSKWKSIADCIQLKPDIIIIHEKGHQPTASTFHTEGNNLADKLATQGSYVVNAGKRTADGSEFEKRTADGSEFESPKKKAKVE

SEQ ID NO: 6073 - protein, 2098 aa, synthetic construct; identical to SEQ ID NO: 4502

SEQ ID NO: 6074 - protein, 2098 aa, synthetic construct
MPAAKRVKLDGGDKKYSIGLDIGTNSVGWAVITDEYKVPSKKFKVLGNTDRHSIKKNLIGALLFDSGETAEATRLKRTARRRYTRRKNRICYLQEIFSNEMAKVDDSFFHRLEESFLVEEDKKHERHPIFGNIVDEVAYHEKYPTIYHLRKKLVDSTDKADLRLIYLALAHMIKFRGHFLIEGDLNPDNSDVDKLFIQLVQTYNQLFEENPINASGVDAKAILSARLSKSRRLENLIAQLPGEKKNGLFGNLIALSLGLTPNFKSNFDLAEDAKLQLSKDTYDDDLDNLLAQIGDQYADLFLAAKNLSDAILLSDILRVNTEITKAPLSASMIKRYDEHHQDLTLLKALVRQQLPEKYKEIFFDQSKNGYAGYIDGGASQEEFYKFIKPILEKMDGTEELLVKLNREDLLRKQRTFDNGSIPHQIHLGELHAILRRQEDFYPFLKDNREKIEKILTFRIPYYVGPLARGNSRFAWMTRKSEETITPWNFEEVVDKGASAQSFIERMTNFDKNLPNEKVLPKHSLLYEYFTVYNELTKVKYVTEGMRKPAFLSGEQKKAIVDLLFKTNRKVTVKQLKEDYFKKIECFDSVEISGVEDRFNASLGTYHDLLKIIKDKDFLDNEENEDILEDIVLTLTLFEDREMIEERLKTYAHLFDDKVMKQLKRRRYTGWGRLSRKLINGIRDKQSGKTILDFLKSDGFANRNFMQLIHDDSLTFKEDIQKAQVSGQGDSLHEHIANLAGSPAIKKGILQTVKVVDELVKVMGRHKPENIVIEMARENQTTQKGQKNSRERMKRIEEGIKELGSQILKEHPVENTQLQNEKLYLYYLQNGRDMYVDQELDINRLSDYDVDHIVPQSFLKDDSIDNKVLTRSDKARGKSDNVPSEEVVKKMKNYWRQLLNAKLITQRKFDNLTKAERGGLSELDKAGFIKRQLVETRQITKHVAQILDSRMNTKYDENDKLIREVKVITLKSKLVSDFRKDFQFYKVREINNYHHAHDAYLNAVVGTALIKKYPKLESEFVYGDYKVYDVRKMIAKSEQEIGKATAKYFFYSNIMNFFKTEITLANGEIRKRPLIETNGETGEIVWDKGRDFATVRKVLSMPQVNIVKKTEVQTGGFSKESILPKRNSDKLIARKKDWDPKKYGGFDSPTVAYSVLVVAKVEKGKSKKLKSVKELLGITIMERSSFEKNPIDFLEAKGYKEVKKDLIIKLPKYSLFELENGRKRMLASAGELQKGNELALPSKYVNFLYLASHYEKLKGSPEDNEQKQLFVEQHKHYLDEIIEQISEFSKRVILADANLDKVLSAYNKHRDKPIREQAENIIHLFTLTNLGAPAAFKYFDTTIDRKRYTSTKEVLDATLIHQSITGLYETRIDLSQLGGDGGGGSGGSGGSGGSGGSGGVLNLEEEYRLHEKPVPSSIDPSWLQLFPTVWAERAGMGLANQVPPVVVELRSGASPVAVRQYPMSKEAREGIRPHIQRFLDLGVLVPCQSPWNTPLLPVKKPGTNDYRPVQDLREINKRVQDIHPTVPNPYNLLSSLPPSHTWYSVLDLKDAFFCLKLHPNSQPLFAFEWRDPEKGNTGQLTWTRLPQGFKNSPTLFNEALHRDLAPFRALNPQVVLLQYVDDLLVAAPTYRDCKEGTQKLLQELSKLGYRVSAKKAQLCQKEVTYLGYLLKEGKRWLTPARKATVMKIPPPTTPRQVREFLGKAGFCRLFIPGFASLAAPLYPLTKPSIPFIWTEEHQKAFDRIKEALLSAPALALPDLTKPFTLYVDERAGVARGVLTQTLGPWRRPVAYLSKKLDPVASGWPTCLKAVAAVALLLKDADKLTLGQNVTVIASHSLESIVRQPPDRWMTNARMTHYQSLLLNERVSFAPPAVLNPATLLPVESEATPVHRCSEILAEETGTRRDLKDQPLPGVPAWYTDGSSFIAEGKRRAGAAIVDGKRTVWASSLPEGTSAQKAELVALTQALRLAEGKDINIYTDSRYAFATAHIHGAIYKQRGWLTSAGKDIKNKEEILALLEAIHLPKRVAIIHCPGHQKGNDPVATGNRRADEAAKQAALSTRVLAETTKPAGKRTADGSEFEKRTADGSEFESPKKKAKVE

SEQ ID NO: 6075 - protein, 2100 aa, synthetic construct
MPAAKRVKLDGGDKKYSIGLDIGTNSVGWAVITDEYKVPSKKFKVLGNTDRHSIKKNLIGALLFDSGETAEATRLKRTARRRYTRRKNRICYLQEIFSNEMAKVDDSFFHRLEESFLVEEDKKHERHPIFGNIVDEVAYHEKYPTIYHLRKKLVDSTDKADLRLIYLALAHMIKFRGHFLIEGDLNPDNSDVDKLFIQLVQTYNQLFEENPINASGVDAKAILSARLSKSRRLENLIAQLPGEKKNGLFGNLIALSLGLTPNFKSNFDLAEDAKLQLSKDTYDDDLDNLLAQIGDQYADLFLAAKNLSDAILLSDILRVNTEITKAPLSASMIKRYDEHHQDLTLLKALVRQQLPEKYKEIFFDQSKNGYAGYIDGGASQEEFYKFIKPILEKMDGTEELLVKLNREDLLRKQRTFDNGSIPHQIHLGELHAILRRQEDFYPFLKDNREKIEKILTFRIPYYVGPLARGNSRFAWMTRKSEETITPWNFEEVVDKGASAQSFIERMTNFDKNLPNEKVLPKHSLLYEYFTVYNELTKVKYVTEGMRKPAFLSGEQKKAIVDLLFKTNRKVTVKQLKEDYFKKIECFDSVEISGVEDRFNASLGTYHDLLKIIKDKDFLDNEENEDILEDIVLTLTLFEDREMIEERLKTYAHLFDDKVMKQLKRRRYTGWGRLSRKLINGIRDKQSGKTILDFLKSDGFANRNFMQLIHDDSLTFKEDIQKAQVSGQGDSLHEHIANLAGSPAIKKGILQTVKVVDELVKVMGRHKPENIVIEMARENQTTQKGQKNSRERMKRIEEGIKELGSQILKEHPVENTQLQNEKLYLYYLQNGRDMYVDQELDINRLSDYDVDHIVPQSFLKDDSIDNKVLTRSDKARGKSDNVPSEEVVKKMKNYWRQLLNAKLITQRKFDNLTKAERGGLSELDKAGFIKRQLVETRQITKHVAQILDSRMNTKYDENDKLIREVKVITLKSKLVSDFRKDFQFYKVREINNYHHAHDAYLNAVVGTALIKKYPKLESEFVYGDYKVYDVRKMIAKSEQEIGKATAKYFFYSNIMNFFKTEITLANGEIRKRPLIETNGETGEIVWDKGRDFATVRKVLSMPQVNIVKKTEVQTGGFSKESILPKRNSDKLIARKKDWDPKKYGGFDSPTVAYSVLVVAKVEKGKSKKLKSVKELLGITIMERSSFEKNPIDFLEAKGYKEVKKDLIIKLPKYSLFELENGRKRMLASAGELQKGNELALPSKYVNFLYLASHYEKLKGSPEDNEQKQLFVEQHKHYLDEIIEQISEFSKRVILADANLDKVLSAYNKHRDKPIREQAENIIHLFTLTNLGAPAAFKYFDTTIDRKRYTSTKEVLDATLIHQSITGLYETRIDLSQLGGDGGGGSGGSGGSGGSGGSGGTLNIEDEYRLHETSKEPDVPLGSTWLSDFPQAWAETGGMGLAVRQAPLIIPLKATSTPVSIKQYPMSQEARLGIKPHIQRLLDQGILVPCQSPWNTPLLPVKKPGTNDYRPVQDLREVNKRVEDIHPTVPNPYNLLSGLPPSHQWYTVLDLKDAFFCLRLHPTSQPLFAFEWRDPEMGISGQLTWTRLPQGFKNSPTLFNEALHRDLADFRIQHPDLILLQYVDDLLLAATSEQDCQRGTRALLQTLGNLGYRASAKKAQICQKQVKYLGYLLKEGQRWLTEARKETVMGQPTPKTPRQLREFLGKAGFCRLFIPGFAEMAAPLYPLTKPGTLFNWGPDQQKAYQEIKQALLTAPALGLPDLTKPFELFVDEKQGYAKGVLTQKLGPWRRPVAYLSKKLDPVAAGWPPCLRMVAAIAVLTKDAGKLTMGQPLVILAPHAVEALVKQPPDRWLSNARMTHYQAMLLDTDRVQFGPVVALNPATLLPLPEKEAPHDCLEILAETHGTRPDLTDQPIPDADYTWYTDGSSFLQEGQRRAGAAVTTETEVIWARALPAGTSAQRAELIALTQALKMAEGKKLNVYTDSRYAFATAHVHGEIYRRRGWLTSEGREIKNKNEILALLKALFLPKRLSIIHCPGHQKGNSAEARGNRMADQAAREAAMKAVLETSTLLAGKRTADGSEFEKRTADGSEFESPKKKAKVE

SEQ ID NO: 6076 - protein, 2105 aa, synthetic construct
MPAAKRVKLDGGDKKYSIGLDIGTNSVGWAVITDEYKVPSKKFKVLGNTDRHSIKKNLIGALLFDSGETAEATRLKRTARRRYTRRKNRICYLQEIFSNEMAKVDDSFFHRLEESFLVEEDKKHERHPIFGNIVDEVAYHEKYPTIYHLRKKLVDSTDKADLRLIYLALAHMIKFRGHFLIEGDLNPDNSDVDKLFIQLVQTYNQLFEENPINASGVDAKAILSARLSKSRRLENLIAQLPGEKKNGLFGNLIALSLGLTPNFKSNFDLAEDAKLQLSKDTYDDDLDNLLAQIGDQYADLFLAAKNLSDAILLSDILRVNTEITKAPLSASMIKRYDEHHQDLTLLKALVRQQLPEKYKEIFFDQSKNGYAGYIDGGASQEEFYKFIKPILEKMDGTEELLVKLNREDLLRKQRTFDNGSIPHQIHLGELHAILRRQEDFYPFLKDNREKIEKILTFRIPYYVGPLARGNSRFAWMTRKSEETITPWNFEEVVDKGASAQSFIERMTNFDKNLPNEKVLPKHSLLYEYFTVYNELTKVKYVTEGMRKPAFLSGEQKKAIVDLLFKTNRKVTVKQLKEDYFKKIECFDSVEISGVEDRFNASLGTYHDLLKIIKDKDFLDNEENEDILEDIVLTLTLFEDREMIEERLKTYAHLFDDKVMKQLKRRRYTGWGRLSRKLINGIRDKQSGKTILDFLKSDGFANRNFMQLIHDDSLTFKEDIQKAQVSGQGDSLHEHIANLAGSPAIKKGILQTVKVVDELVKVMGRHKPENIVIEMARENQTTQKGQKNSRERMKRIEEGIKELGSQILKEHPVENTQLQNEKLYLYYLQNGRDMYVDQELDINRLSDYDVDHIVPQSFLKDDSIDNKVLTRSDKARGKSDNVPSEEVVKKMKNYWRQLLNAKLITQRKFDNLTKAERGGLSELDKAGFIKRQLVETRQITKHVAQILDSRMNTKYDENDKLIREVKVITLKSKLVSDFRKDFQFYKVREINNYHHAHDAYLNAVVGTALIKKYPKLESEFVYGDYKVYDVRKMIAKSEQEIGKATAKYFFYSNIMNFFKTEITLANGEIRKRPLIETNGETGEIVWDKGRDFATVRKVLSMPQVNIVKKTEVQTGGFSKESILPKRNSDKLIARKKDWDPKKYGGFDSPTVAYSVLVVAKVEKGKSKKLKSVKELLGITIMERSSFEKNPIDFLEAKGYKEVKKDLIIKLPKYSLFELENGRKRMLASAGELQKGNELALPSKYVNFLYLASHYEKLKGSPEDNEQKQLFVEQHKHYLDEIIEQISEFSKRVILADANLDKVLSAYNKHRDKPIREQAENIIHLFTLTNLGAPAAFKYFDTTIDRKRYTSTKEVLDATLIHQSITGLYETRIDLSQLGGDGGGGSGGSGGSGGSGGSGGSGGTAPLEEEYRLFLEAPIQNVTLLEQWKREIPKVWAEINPPGLASTQAPIHVQLLSTALPVRVRQYPITLEAKRSLRETIRKFRAAGILRPVHSPWNTPLLPVRKSGTSEYRMVQDLREVNKRVETIHPTVPNPYTLLSLLPPDRIWYSVLDLKDAFFCIPLAPESQLIFAFEWADAEEGESGQLTWTRLPQGFKNSPTLFDEALNRDLQGFRLDHPSVSLLQYVDDLLIAADTQAACLSATRDLLMTLAELGYRVSGKKAQLCQEEVTYLGFKIHKGSRSLSNSRTQAILQIPVPKTKRQVREFLGTIGYCRLWIPGFAELAQPLYAATRGGNDPLVWGEKEEEAFQSLKLALTQPPALALPSLDKPFQLFVEETSGAAKGVLTQALGPWKRPVAYLSKRLDPVAAGWPRCLRAIAAAALLTREASKLTFGQDIEITSSHNLESLLRSPPDKWLTNARITQYQVLLLDPPRVRFKQTAALNPATLLPETDDTLPIHHCLDTLDSLTSTRPDLTDQPLAQAEATLFTDGSSYIRDGKRYAGAAVVTLDSVIWAEPLPIGTSAQKAELIALTKALEWSKDKSVNIYTDSRYAFATLHVHGMIYRERGLLTAGGKAIKNAPEILALLTAVWLPKRVAVMHCKGHQKDDAPTSTGNRRADEVAREVAIRPLSTQATISAGKRTADGSEFEKRTADGSEFESPKKKAKVE

SEQ ID NO: 6077 - protein, 2105 aa, synthetic construct
MPAAKRVKLDGGDKKYSIGLDIGTNSVGWAVITDEYKVPSKKFKVLGNTDRHSIKKNLIGALLFDSGETAEATRLKRTARRRYTRRKNRICYLQEIFSNEMAKVDDSFFHRLEESFLVEEDKKHERHPIFGNIVDEVAYHEKYPTIYHLRKKLVDSTDKADLRLIYLALAHMIKFRGHFLIEGDLNPDNSDVDKLFIQLVQTYNQLFEENPINASGVDAKAILSARLSKSRRLENLIAQLPGEKKNGLFGNLIALSLGLTPNFKSNFDLAEDAKLQLSKDTYDDDLDNLLAQIGDQYADLFLAAKNLSDAILLSDILRVNTEITKAPLSASMIKRYDEHHQDLTLLKALVRQQLPEKYKEIFFDQSKNGYAGYIDGGASQEEFYKFIKPILEKMDGTEELLVKLNREDLLRKQRTFDNGSIPHQIHLGELHAILRRQEDFYPFLKDNREKIEKILTFRIPYYVGPLARGNSRFAWMTRKSEETITPWNFEEVVDKGASAQSFIERMTNFDKNLPNEKVLPKHSLLYEYFTVYNELTKVKYVTEGMRKPAFLSGEQKKAIVDLLFKTNRKVTVKQLKEDYFKKIECFDSVEISGVEDRFNASLGTYHDLLKIIKDKDFLDNEENEDILEDIVLTLTLFEDREMIEERLKTYAHLFDDKVMKQLKRRRYTGWGRLSRKLINGIRDKQSGKTILDFLKSDGFANRNFMQLIHDDSLTFKEDIQKAQVSGQGDSLHEHIANLAGSPAIKKGILQTVKVVDELVKVMGRHKPENIVIEMARENQTTQKGQKNSRERMKRIEEGIKELGSQILKEHPVENTQLQNEKLYLYYLQNGRDMYVDQELDINRLSDYDVDHIVPQSFLKDDSIDNKVLTRSDKARGKSDNVPSEEVVKKMKNYWRQLLNAKLITQRKFDNLTKAERGGLSELDKAGFIKRQLVETRQITKHVAQILDSRMNTKYDENDKLIREVKVITLKSKLVSDFRKDFQFYKVREINNYHHAHDAYLNAVVGTALIKKYPKLESEFVYGDYKVYDVRKMIAKSEQEIGKATAKYFFYSNIMNFFKTEITLANGEIRKRPLIETNGETGEIVWDKGRDFATVRKVLSMPQVNIVKKTEVQTGGFSKESILPKRNSDKLIARKKDWDPKKYGGFDSPTVAYSVLVVAKVEKGKSKKLKSVKELLGITIMERSSFEKNPIDFLEAKGYKEVKKDLIIKLPKYSLFELENGRKRMLASAGELQKGNELALPSKYVNFLYLASHYEKLKGSPEDNEQKQLFVEQHKHYLDEIIEQISEFSKRVILADANLDKVLSAYNKHRDKPIREQAENIIHLFTLTNLGAPAAFKYFDTTIDRKRYTSTKEVLDATLIHQSITGLYETRIDLSQLGGDGGGGSGGSGGSGGSGGSGGSGGTAPLEEEYRLFLEAPIQNVTLLEQWKREIPKVWAEINPPGLASTQAPIHVQLLSTALPVRVRQYPITLEAKRSLRETIRKFRAAGILRPVHSPWNTPLLPVRKSGTSEYRMVQDLREVNKRVETIHPTVPNPYTLLSLLPPDRIWYSVLDLKDAFFCIPLAPESQLIFAFEWADAEEGESGQLTWTRLPQGFKNSPTLFNEALNRDLQGFRLDHPSVSLLQYVDDLLIAADTQAACLSATRDLLMTLAELGYRVSGKKAQLCQEEVTYLGFKIHKGSRSLSNSRTQAILQIPVPKTKRQVREFLGTIGYCRLWIPGFAELAQPLYAATRPGNDPLVWGEKEEEAFQSLKLALTQPPALALPSLDKPFQLFVEETSGAAKGVLTQALGPWKRPVAYLSKRLDPVAAGWPRCLRAIAAAALLTREASKLTFGQDIEITSSHNLESLLRSPPDKWLTNARITQYQVLLLDPPRVRFKQTAALNPATLLPETDDTLPIHHCLDTLDSLTSTRPDLTDQPLAQAEATLFTDGSSYIRDGKRYAGAAVVTLDSVIWAEPLPIGTSAQKAELIALTKALEWSKDKSVNIYTDSRYAFATLHVHGMIYRERGWLTAGGKAIKNAPEILALLTAVWLPKRVAVMHCKGHQKDDAPTSTGNRRADEVAREVAIRPLSTQATISAGKRTADGSEFEKRTADGSEFESPKKKAKVE

SEQ ID NO: 6078 - protein, 2105 aa, synthetic construct
MPAAKRVKLDGGDKKYSIGLDIGTNSVGWAVITDEYKVPSKKFKVLGNTDRHSIKKNLIGALLFDSGETAEATRLKRTARRRYTRRKNRICYLQEIFSNEMAKVDDSFFHRLEESFLVEEDKKHERHPIFGNIVDEVAYHEKYPTIYHLRKKLVDSTDKADLRLIYLALAHMIKFRGHFLIEGDLNPDNSDVDKLFIQLVQTYNQLFEENPINASGVDAKAILSARLSKSRRLENLIAQLPGEKKNGLFGNLIALSLGLTPNFKSNFDLAEDAKLQLSKDTYDDDLDNLLAQIGDQYADLFLAAKNLSDAILLSDILRVNTEITKAPLSASMIKRYDEHHQDLTLLKALVRQQLPEKYKEIFFDQSKNGYAGYIDGGASQEEFYKFIKPILEKMDGTEELLVKLNREDLLRKQRTFDNGSIPHQIHLGELHAILRRQEDFYPFLKDNREKIEKILTFRIPYYVGPLARGNSRFAWMTRKSEETITPWNFEEVVDKGASAQSFIERMTNFDKNLPNEKVLPKHSLLYEYFTVYNELTKVKYVTEGMRKPAFLSGEQKKAIVDLLFKTNRKVTVKQLKEDYFKKIECFDSVEISGVEDRFNASLGTYHDLLKIIKDKDFLDNEENEDILEDIVLTLTLFEDREMIEERLKTYAHLFDDKVMKQLKRRRYTGWGRLSRKLINGIRDKQSGKTILDFLKSDGFANRNFMQLIHDDSLTFKEDIQKAQVSGQGDSLHEHIANLAGSPAIKKGILQTVKVVDELVKVMGRHKPENIVIEMARENQTTQKGQKNSRERMKRIEEGIKELGSQILKEHPVENTQLQNEKLYLYYLQNGRDMYVDQELDINRLSDYDVDHIVPQSFLKDDSIDNKVLTRSDKARGKSDNVPSEEVVKKMKNYWRQLLNAKLITQRKFDNLTKAERGGLSELDKAGFIKRQLVETRQITKHVAQILDSRMNTKYDENDKLIREVKVITLKSKLVSDFRKDFQFYKVREINNYHHAHDAYLNAVVGTALIKKYPKLESEFVYGDYKVYDVRKMIAKSEQEIGKATAKYFFYSNIMNFFKTEITLANGEIRKRPLIETNGETGEIVWDKGRDFATVRKVLSMPQVNIVKKTEVQTGGFSKESILPKRNSDKLIARKKDWDPKKYGGFDSPTVAYSVLVVAKVEKGKSKKLKSVKELLGITIMERSSFEKNPIDFLEAKGYKEVKKDLIIKLPKYSLFELENGRKRMLASAGELQKGNELALPSKYVNFLYLASHYEKLKGSPEDNEQKQLFVEQHKHYLDEIIEQISEFSKRVILADANLDKVLSAYNKHRDKPIREQAENIIHLFTLTNLGAPAAFKYFDTTIDRKRYTSTKEVLDATLIHQSITGLYETRIDLSQLGGDGGGGSGGSGGSGGSGGSGGSGGTAPLEEEYRLFLEAPIQNVTLLEQWKREIPKVWAEINPPGLASTQAPIHVQLLSTALPVRVRQYPITLEAKRSLRETIRKFRAAGILRPVHSPWNTPLLPVRKSGTSEYRMVQDLREVNKRVETIHPTVPNPYTLLSLLPPDRIWYSVLDLKDAFFCIPLAPESQLIFAFEWADAEEGESGQLTWTRLPQGFKNSPTLFNEALNRDLQGFRLDHPSVSLLQYVDDLLIAADTQAACLSATRDLLMTLAELGYRVSGKKAQLCQEEVTYLGFKIHKGSRSLSNSRTQAILQIPVPKTKRQVREFLGKIGYCRLFIPGFAELAQPLYAATRPGNDPLVWGEKEEEAFQSLKLALTQPPALALPSLDKPFQLFVEETSGAAKGVLTQALGPWKRPVAYLSKRLDPVAAGWPRCLRAIAAAALLTREASKLTFGQDIEITSSHNLESLLRSPPDKWLTNARITQYQVLLLDPPRVRFKQTAALNPATLLPETDDTLPIHHCLDTLDSLTSTRPDLTDQPLAQAEATLFTDGSSYIRDGKRYAGAAVVTLDSVIWAEPLPIGTSAQKAELIALTKALEWSKDKSVNIYTDSRYAFATLHVHGMIYRERGWLTAGGKAIKNAPEILALLTAVWLPKRVAVMHCKGHQKDDAPTSTGNRRADEVAREVAIRPLSTQATISAGKRTADGSEFEKRTADGSEFESPKKKAKVE

SEQ ID NO: 6079 - protein, 2109 aa, synthetic construct
MPAAKRVKLDGGDKKYSIGLDIGTNSVGWAVITDEYKVPSKKFKVLGNTDRHSIKKNLIGALLFDSGETAEATRLKRTARRRYTRRKNRICYLQEIFSNEMAKVDDSFFHRLEESFLVEEDKKHERHPIFGNIVDEVAYHEKYPTIYHLRKKLVDSTDKADLRLIYLALAHMIKFRGHFLIEGDLNPDNSDVDKLFIQLVQTYNQLFEENPINASGVDAKAILSARLSKSRRLENLIAQLPGEKKNGLFGNLIALSLGLTPNFKSNFDLAEDAKLQLSKDTYDDDLDNLLAQIGDQYADLFLAAKNLSDAILLSDILRVNTEITKAPLSASMIKRYDEHHQDLTLLKALVRQQLPEKYKEIFFDQSKNGYAGYIDGGASQEEFYKFIKPILEKMDGTEELLVKLNREDLLRKQRTFDNGSIPHQIHLGELHAILRRQEDFYPFLKDNREKIEKILTFRIPYYVGPLARGNSRFAWMTRKSEETITPWNFEEVVDKGASAQSFIERMTNFDKNLPNEKVLPKHSLLYEYFTVYNELTKVKYVTEGMRKPAFLSGEQKKAIVDLLFKTNRKVTVKQLKEDYFKKIECFDSVEISGVEDRFNASLGTYHDLLKIIKDKDFLDNEENEDILEDIVLTLTLFEDREMIEERLKTYAHLFDDKVMKQLKRRRYTGWGRLSRKLINGIRDKQSGKTILDFLKSDGFANRNFMQLIHDDSLTFKEDIQKAQVSGQGDSLHEHIANLAGSPAIKKGILQTVKVVDELVKVMGRHKPENIVIEMARENQTTQKGQKNSRERMKRIEEGIKELGSQILKEHPVENTQLQNEKLYLYYLQNGRDMYVDQELDINRLSDYDVDHIVPQSFLKDDSIDNKVLTRSDKARGKSDNVPSEEVVKKMKNYWRQLLNAKLITQRKFDNLTKAERGGLSELDKAGFIKRQLVETRQITKHVAQILDSRMNTKYDENDKLIREVKVITLKSKLVSDFRKDFQFYKVREINNYHHAHDAYLNAVVGTALIKKYPKLESEFVYGDYKVYDVRKMIAKSEQEIGKATAKYFFYSNIMNFFKTEITLANGEIRKRPLIETNGETGEIVWDKGRDFATVRKVLSMPQVNIVKKTEVQTGGFSKESILPKRNSDKLIARKKDWDPKKYGGFDSPTVAYSVLVVAKVEKGKSKKLKSVKELLGITIMERSSFEKNPIDFLEAKGYKEVKKDLIIKLPKYSLFELENGRKRMLASAGELQKGNELALPSKYVNFLYLASHYEKLKGSPEDNEQKQLFVEQHKHYLDEIIEQISEFSKRVILADANLDKVLSAYNKHRDKPIREQAENIIHLFTLTNLGAPAAFKYFDTTIDRKRYTSTKEVLDATLIHQSITGLYETRIDLSQLGGDGGGGSGGSGGSGGSGGSGGSGGTVSLQDEHRLFDIPVTTSLPDVWLQDFPQAWAETGGLGRAKCQAPIIIDLKPTAVPVSIKQYPMSLEAHMGIRQHIIKFLELGVLRPCRSPWNTPLLPVKKPGTQDYRPVQDLREINKRTVDIHPTVPNPYNLLSTLKPDYSWYTVLDLKDAFFCLPLAPQSQELFAFEWKDPERGISGQLTWTRLPQGFKNSPTLFNEALHRDLTDFRTQHPEVTLLQYVDDLLLAAPTKKACTQGTRHLLQELGEKGYRASAKKAQICQTKVTYLGYILSEGKRWLTPGRIETVARIPPPRNPREVREFLGTAGFCRLWIPGFAELAAPLYALTKPSTPFTWQTEHQLAFEALKKALLSAPALGLPDTSKPFTLFLDERQGIAKGVLTQKLGPWKRPVAYLSKKLDPVAAGWPPCLRIMAATAMLVKDSAKLTLGQPLTVITPHTLEAIVRQPPDRWITNARLTHYQALLLDTDRVQFGPPVTLNPATLLPVPENQPSPHDCRQVLAETHGTREDLKDQELPDADHTWYTDGSSYLDSGTRRAGAAVVDGHNTIWAQSLPPGTSAQKAELIALTKALELSKGKKANIYTDSRYAFATAHTHGSIYERRGWLTSEGKEIKNKAEIIALLKALFLPQEVAIIHCPGHQKGQDPVAVGNRQADRVARQAAMAEVLTLATEPDNTSHITAGKRTADGSEFEKRTADGSEFESPKKKAKVE

SEQ ID NO: 6080 - protein, 2094 aa, synthetic construct
MPAAKRVKLDGGDKKYSIGLDIGTNSVGWAVITDEYKVPSKKFKVLGNTDRHSIKKNLIGALLFDSGETAEATRLKRTARRRYTRRKNRICYLQEIFSNEMAKVDDSFFHRLEESFLVEEDKKHERHPIFGNIVDEVAYHEKYPTIYHLRKKLVDSTDKADLRLIYLALAHMIKFRGHFLIEGDLNPDNSDVDKLFIQLVQTYNQLFEENPINASGVDAKAILSARLSKSRRLENLIAQLPGEKKNGLFGNLIALSLGLTPNFKSNFDLAEDAKLQLSKDTYDDDLDNLLAQIGDQYADLFLAAKNLSDAILLSDILRVNTEITKAPLSASMIKRYDEHHQDLTLLKALVRQQLPEKYKEIFFDQSKNGYAGYIDGGASQEEFYKFIKPILEKMDGTEELLVKLNREDLLRKQRTFDNGSIPHQIHLGELHAILRRQEDFYPFLKDNREKIEKILTFRIPYYVGPLARGNSRFAWMTRKSEETITPWNFEEVVDKGASAQSFIERMTNFDKNLPNEKVLPKHSLLYEYFTVYNELTKVKYVTEGMRKPAFLSGEQKKAIVDLLFKTNRKVTVKQLKEDYFKKIECFDSVEISGVEDRFNASLGTYHDLLKIIKDKDFLDNEENEDILEDIVLTLTLFEDREMIEERLKTYAHLFDDKVMKQLKRRRYTGWGRLSRKLINGIRDKQSGKTILDFLKSDGFANRNFMQLIHDDSLTFKEDIQKAQVSGQGDSLHEHIANLAGSPAIKKGILQTVKVVDELVKVMGRHKPENIVIEMARENQTTQKGQKNSRERMKRIEEGIKELGSQILKEHPVENTQLQNEKLYLYYLQNGRDMYVDQELDINRLSDYDVDHIVPQSFLKDDSIDNKVLTRSDKARGKSDNVPSEEVVKKMKNYWRQLLNAKLITQRKFDNLTKAERGGLSELDKAGFIKRQLVETRQITKHVAQILDSRMNTKYDENDKLIREVKVITLKSKLVSDFRKDFQFYKVREINNYHHAHDAYLNAVVGTALIKKYPKLESEFVYGDYKVYDVRKMIAKSEQEIGKATAKYFFYSNIMNFFKTEITLANGEIRKRPLIETNGETGEIVWDKGRDFATVRKVLSMPQVNIVKKTEVQTGGFSKESILPKRNSDKLIARKKDWDPKKYGGFDSPTVAYSVLVVAKVEKGKSKKLKSVKELLGITIMERSSFEKNPIDFLEAKGYKEVKKDLIIKLPKYSLFELENGRKRMLASAGELQKGNELALPSKYVNFLYLASHYEKLKGSPEDNEQKQLFVEQHKHYLDEIIEQISEFSKRVILADANLDKVLSAYNKHRDKPIREQAENIIHLFTLTNLGAPAAFKYFDTTIDRKRYTSTKEVLDATLIHQSITGLYETRIDLSQLGGDGGGGSGGSGGSGGSGGSGGSGGVPWILKKPLELTIKLDLEEQQGTLLNNSILSKKGKEELKQLFEKYSALWQSWENQVGHRRIRPHKIATGTVKPTPQKQYHINPKAKPDIQIVINDLLKQGVLIQKESTMNTPVYPVPKPNGRWRMVLDYRAVNKVTPLIAVQNQHSYGILGSLFKGRYKTTIDLSNGFWAHPIVPEDYWITAFTWQGKQYCWTVLPQGFLNSPGLFTGDVVDLLQGIPNVEVYVDDVYISHDSEKEHLEYLDILFNRLKEAGYIISLKKSNIANSIVDFLGFQITNEGRGLTDTFKEKLENITAPTTLKQLQSILGLLNFARNFIPDFTELIAPLYALIPKSTKNYVPWQIEHSTTLETLITKLNGAEYLQGRKGDKTLIMKVNASYTTGYIRYYNEGEKKPISYVSIVFSKTELKFTELEKLLTTVHKGLLKALDLSMGQNIHVYSPIVSMQNIQKTPQTAKKALASRWLSWLSYLEDPRIRFFYDPQMPALKDLPAVDTGKDNKKHPSNFQHIFYTDGSAITSPTKEGHLNAGMGIVYFINKDGNLQKQQEWSISLGNHTAQFAEIAAFEFALKKCLPLGGNILVVTDSNYVAKAYNEELDVWASNGFVNNRKKPLKHISKWKSVADLKRLRPDVVVTHEPGHQKLDSSPHAYGNNLADQLATQASFKVHAGKRTADGSEFEKRTADGSEFESPKKKAKVE

SEQ ID NO: 6081 - protein, 2180 aa, synthetic construct
MPAAKRVKLDGGDKKYSIGLDIGTNSVGWAVITDEYKVPSKKFKVLGNTDRHSIKKNLIGALLFDSGETAEATRLKRTARRRYTRRKNRICYLQEIFSNEMAKVDDSFFHRLEESFLVEEDKKHERHPIFGNIVDEVAYHEKYPTIYHLRKKLVDSTDKADLRLIYLALAHMIKFRGHFLIEGDLNPDNSDVDKLFIQLVQTYNQLFEENPINASGVDAKAILSARLSKSRRLENLIAQLPGEKKNGLFGNLIALSLGLTPNFKSNFDLAEDAKLQLSKDTYDDDLDNLLAQIGDQYADLFLAAKNLSDAILLSDILRVNTEITKAPLSASMIKRYDEHHQDLTLLKALVRQQLPEKYKEIFFDQSKNGYAGYIDGGASQEEFYKFIKPILEKMDGTEELLVKLNREDLLRKQRTFDNGSIPHQIHLGELHAILRRQEDFYPFLKDNREKIEKILTFRIPYYVGPLARGNSRFAWMTRKSEETITPWNFEEVVDKGASAQSFIERMTNFDKNLPNEKVLPKHSLLYEYFTVYNELTKVKYVTEGMRKPAFLSGEQKKAIVDLLFKTNRKVTVKQLKEDYFKKIECFDSVEISGVEDRFNASLGTYHDLLKIIKDKDFLDNEENEDILEDIVLTLTLFEDREMIEERLKTYAHLFDDKVMKQLKRRRYTGWGRLSRKLINGIRDKQSGKTILDFLKSDGFANRNFMQLIHDDSLTFKEDIQKAQVSGQGDSLHEHIANLAGSPAIKKGILQTVKVVDELVKVMGRHKPENIVIEMARENQTTQKGQKNSRERMKRIEEGIKELGSQILKEHPVENTQLQNEKLYLYYLQNGRDMYVDQELDINRLSDYDVDHIVPQSFLKDDSIDNKVLTRSDKARGKSDNVPSEEVVKKMKNYWRQLLNAKLITQRKFDNLTKAERGGLSELDKAGFIKRQLVETRQITKHVAQILDSRMNTKYDENDKLIREVKVITLKSKLVSDFRKDFQFYKVREINNYHHAHDAYLNAVVGTALIKKYPKLESEFVYGDYKVYDVRKMIAKSEQEIGKATAKYFFYSNIMNFFKTEITLANGEIRKRPLIETNGETGEIVWDKGRDFATVRKVLSMPQVNIVKKTEVQTGGFSKESILPKRNSDKLIARKKDWDPKKYGGFDSPTVAYSVLVVAKVEKGKSKKLKSVKELLGITIMERSSFEKNPIDFLEAKGYKEVKKDLIIKLPKYSLFELENGRKRMLASAGELQKGNELALPSKYVNFLYLASHYEKLKGSPEDNEQKQLFVEQHKHYLDEIIEQISEFSKRVILADANLDKVLSAYNKHRDKPIREQAENIIHLFTLTNLGAPAAFKYFDTTIDRKRYTSTKEVLDATLIHQSITGLYETRIDLSQLGGDGGGGSGGSGGSGGSGGSGGSGGMDLLKPLTVERKGVKIKGYWNSQADITCVPKDLLQGEEPVRQQNVTTIHGTQEGDVYYVNLKIDGRRINTEVIGTTLDYAIITPGDVPWILKKPLELTIKLDLEEQQGTLLNNSILSKKGKEELKQLFEKYSALWQSWENQVGHRRIRPHKIATGTVKPTPQKQYHINPKAKPDIQIVINDLLKQGVLIQKESTMNTPVYPVPKPNGRWRMVLDYRAVNKVTPLIAVQNQHSYGILGSLFKGRYKTTIDLSNGFWAHPIVPEDYWITAFTWQGKQYCWTVLPQGFLNSPGLFNGDVVDLLQGIPNVEVYVDDVYISHDSEKEHLEYLDILFNRLKEAGYIISLKKSNIANSIVDFLGFQITNEGRGLTDTFKEKLENITAPTTLKQLQSILGLLNFARNFIPDFTELIAPLYALIPKSPKNYVPWQIEHSTTLETLITKLNGAEYLQGRKGDKTLIMKVNASYTTGYIRYYNEGEKKPISYVSIVFSKTELKFTELEKLLTTVHKGLLKALDLSMGQNIHVYSPIVSMQNIQKTPQTAKKALASRWLSWLSYLEDPRIRFFYDPQMPALKDLPAVDTGKDNKKHPSNFQHIFYTDGSAITSPTKEGHLNAGMGIVYFINKDGNLQKQQEWSISLGNHTAQFAEIAAFEFALKKCLPLGGNILVVTDSNYVAKAYNEELDVWASNGFVNNRKKPLKHISKWKSVADLKRLRPDVVVTHEPGHQKLDSSPHAYGNNLADQLATQASFKVHAGKRTADGSEFEKRTADGSEFESPKKKAKVE

SEQ ID NO: 6082 - protein, 2102 aa, synthetic construct
MPAAKRVKLDGGDKKYSIGLDIGTNSVGWAVITDEYKVPSKKFKVLGNTDRHSIKKNLIGALLFDSGETAEATRLKRTARRRYTRRKNRICYLQEIFSNEMAKVDDSFFHRLEESFLVEEDKKHERHPIFGNIVDEVAYHEKYPTIYHLRKKLVDSTDKADLRLIYLALAHMIKFRGHFLIEGDLNPDNSDVDKLFIQLVQTYNQLFEENPINASGVDAKAILSARLSKSRRLENLIAQLPGEKKNGLFGNLIALSLGLTPNFKSNFDLAEDAKLQLSKDTYDDDLDNLLAQIGDQYADLFLAAKNLSDAILLSDILRVNTEITKAPLSASMIKRYDEHHQDLTLLKALVRQQLPEKYKEIFFDQSKNGYAGYIDGGASQEEFYKFIKPILEKMDGTEELLVKLNREDLLRKQRTFDNGSIPHQIHLGELHAILRRQEDFYPFLKDNREKIEKILTFRIPYYVGPLARGNSRFAWMTRKSEETITPWNFEEVVDKGASAQSFIERMTNFDKNLPNEKVLPKHSLLYEYFTVYNELTKVKYVTEGMRKPAFLSGEQKKAIVDLLFKTNRKVTVKQLKEDYFKKIECFDSVEISGVEDRFNASLGTYHDLLKIIKDKDFLDNEENEDILEDIVLTLTLFEDREMIEERLKTYAHLFDDKVMKQLKRRRYTGWGRLSRKLINGIRDKQSGKTILDFLKSDGFANRNFMQLIHDDSLTFKEDIQKAQVSGQGDSLHEHIANLAGSPAIKKGILQTVKVVDELVKVMGRHKPENIVIEMARENQTTQKGQKNSRERMKRIEEGIKELGSQILKEHPVENTQLQNEKLYLYYLQNGRDMYVDQELDINRLSDYDVDHIVPQSFLKDDSIDNKVLTRSDKARGKSDNVPSEEVVKKMKNYWRQLLNAKLITQRKFDNLTKAERGGLSELDKAGFIKRQLVETRQITKHVAQILDSRMNTKYDENDKLIREVKVITLKSKLVSDFRKDFQFYKVREINNYHHAHDAYLNAVVGTALIKKYPKLESEFVYGDYKVYDVRKMIAKSEQEIGKATAKYFFYSNIMNFFKTEITLANGEIRKRPLIETNGETGEIVWDKGRDFATVRKVLSMPQVNIVKKTEVQTGGFSKESILPKRNSDKLIARKKDWDPKKYGGFDSPTVAYSVLVVAKVEKGKSKKLKSVKELLGITIMERSSFEKNPIDFLEAKGYKEVKKDLIIKLPKYSLFELENGRKRMLASAGELQKGNELALPSKYVNFLYLASHYEKLKGSPEDNEQKQLFVEQHKHYLDEIIEQISEFSKRVILADANLDKVLSAYNKHRDKPIREQAENIIHLFTLTNLGAPAAFKYFDTTIDRKRYTSTKEVLDATLIHQSITGLYETRIDLSQLGGDGGGGSGGSGGSGGSGGSGGSGGTLQLEEEYRLFEPESTQKQEMDIWLKNFPQAWAETGGMGTAHCQAPVLIQLKATATPISIRQYPMPHEAYQGIKPHIRRMLDQGILKPCQSPWNTPLLPVKKPGTEDYRPVQDLREVNKRVEDIHPTVPNPYNLLSTLPPSHPWYTVLDLKDAFFCLRLHSESQLLFAFEWRDPEIGLSGQLTWTRLPQGFKNSPTLFNEALHSDLADFRVRYPALVLLQYVDDLLLAAATRTECLEGTKALLETLGNKGYRASAKKAQICLQEVTYLGYSLKDGQRWLTKARKEAILSIPVPKNSRQVREFLGKAGYCRLFIPGFAELAAPLYPLTRPGTLFQWGTEQQLAFEDIKKALLSSPALGLPDITKPFELFIDENSGFAKGVLVQKLGPWKRPVAYLSKKLDTVASGWPPCLRMVAAIAILVKDAGKLTLGQPLTILTSHPVEALVRQPPNKWLSNARMTHYQAMLLDAERVHFGPTVSLNPATLLPLPSGGNHHDCLQILAETHGTRPDLTDQPLPDADLTWYTDGSSFIRNGEREAGAAVTTESEVIWAAPLPPGTSAQRAELIALTQALKMAEGKKLTVYTDSRYAFATTHVHGEIYRRRGWLTSEGKEIKNKNEILALLEALFLPKRLSIIHCPGHQKGDSPQAKGNRLADDTAKKAATETHSSLTVLPAGKRTADGSEFEKRTADGSEFESPKKKAKVE

SEQ ID NO: 6083 - protein, 2094 aa, synthetic construct
MPAAKRVKLDGGDKKYSIGLDIGTNSVGWAVITDEYKVPSKKFKVLGNTDRHSIKKNLIGALLFDSGETAEATRLKRTARRRYTRRKNRICYLQEIFSNEMAKVDDSFFHRLEESFLVEEDKKHERHPIFGNIVDEVAYHEKYPTIYHLRKKLVDSTDKADLRLIYLALAHMIKFRGHFLIEGDLNPDNSDVDKLFIQLVQTYNQLFEENPINASGVDAKAILSARLSKSRRLENLIAQLPGEKKNGLFGNLIALSLGLTPNFKSNFDLAEDAKLQLSKDTYDDDLDNLLAQIGDQYADLFLAAKNLSDAILLSDILRVNTEITKAPLSASMIKRYDEHHQDLTLLKALVRQQLPEKYKEIFFDQSKNGYAGYIDGGASQEEFYKFIKPILEKMDGTEELLVKLNREDLLRKQRTFDNGSIPHQIHLGELHAILRRQEDFYPFLKDNREKIEKILTFRIPYYVGPLARGNSRFAWMTRKSEETITPWNFEEVVDKGASAQSFIERMTNFDKNLPNEKVLPKHSLLYEYFTVYNELTKVKYVTEGMRKPAFLSGEQKKAIVDLLFKTNRKVTVKQLKEDYFKKIECFDSVEISGVEDRFNASLGTYHDLLKIIKDKDFLDNEENEDILEDIVLTLTLFEDREMIEERLKTYAHLFDDKVMKQLKRRRYTGWGRLSRKLINGIRDKQSGKTILDFLKSDGFANRNFMQLIHDDSLTFKEDIQKAQVSGQGDSLHEHIANLAGSPAIKKGILQTVKVVDELVKVMGRHKPENIVIEMARENQTTQKGQKNSRERMKRIEEGIKELGSQILKEHPVENTQLQNEKLYLYYLQNGRDMYVDQELDINRLSDYDVDHIVPQSFLKDDSIDNKVLTRSDKARGKSDNVPSEEVVKKMKNYWRQLLNAKLITQRKFDNLTKAERGGLSELDKAGFIKRQLVETRQITKHVAQILDSRMNTKYDENDKLIREVKVITLKSKLVSDFRKDFQFYKVREINNYHHAHDAYLNAVVGTALIKKYPKLESEFVYGDYKVYDVRKMIAKSEQEIGKATAKYFFYSNIMNFFKTEITLANGEIRKRPLIETNGETGEIVWDKGRDFATVRKVLSMPQVNIVKKTEVQTGGFSKESILPKRNSDKLIARKKDWDPKKYGGFDSPTVAYSVLVVAKVEKGKSKKLKSVKELLGITIMERSSFEKNPIDFLEAKGYKEVKKDLIIKLPKYSLFELENGRKRMLASAGELQKGNELALPSKYVNFLYLASHYEKLKGSPEDNEQKQLFVEQHKHYLDEIIEQISEFSKRVILADANLDKVLSAYNKHRDKPIREQAENIIHLFTLTNLGAPAAFKYFDTTIDRKRYTSTKEVLDATLIHQSITGLYETRIDLSQLGGDGGGGSGGSGGSGGSGGSGGSGGVPWLTQQPLQLTILVPLQEYQEKILSKTALPEDQKQQLKTLFVKYDNLWQHWENQVGHRKIRPHNIATGDYPPRPQKQYPINPKAKPSIQIVIDDLLKQGVLTPQNSTMNTPVYPVPKPDGRWRMVLDYREVNKTIPLTAAQNQHSAGILATIVRQKYKTTLDLANGFWAHPITPESYWLTAFTWQGKQYCWTRLPQGFLNSPALFNADVVDLLKEIPNVQVYVDDIYLSHDDPKEHVQQLEKVFQILLQAGYVVSLKKSEIGQKTVEFLGFNITKEGRGLTDTFKTKLLNITPPKDLKQLQSILGLLNFARNFIPNFAELVQPLYNLIAPAKGKYIEWSEENTKQLNMVIEALNTASNLEERLPEQRLVIKVNTSPSAGYVRYYNETGKKPIMYLNYVFSKAELKFSMLEKLLTTMHKALIKAMDLAMGQEILVYSPIVSMTKIQKTPLPERKALPIRWITWMTYLEDPRIQFHYDKTLPELKHIPDVYTSSQSPVKHPSQYEGVFYTDGSAIKSPDPTKSNNAGMGIVHATYKPEYQVLNQWSIPLGNHTAQMAEIAAVEFACKKALKIPGPVLVITDSFYVAESANKELPYWKSNGFVNNKKKPLKHISKWKSIAECLSMKPDITIQHEKGISLQIPVFILKGNALADKLATQGSYVVNAGKRTADGSEFEKRTADGSEFESPKKKAKVE

SEQ ID NO: 6084 - protein, 2101 aa, synthetic construct
MPAAKRVKLDGGDKKYSIGLDIGTNSVGWAVITDEYKVPSKKFKVLGNTDRHSIKKNLIGALLFDSGETAEATRLKRTARRRYTRRKNRICYLQEIFSNEMAKVDDSFFHRLEESFLVEEDKKHERHPIFGNIVDEVAYHEKYPTIYHLRKKLVDSTDKADLRLIYLALAHMIKFRGHFLIEGDLNPDNSDVDKLFIQLVQTYNQLFEENPINASGVDAKAILSARLSKSRRLENLIAQLPGEKKNGLFGNLIALSLGLTPNFKSNFDLAEDAKLQLSKDTYDDDLDNLLAQIGDQYADLFLAAKNLSDAILLSDILRVNTEITKAPLSASMIKRYDEHHQDLTLLKALVRQQLPEKYKEIFFDQSKNGYAGYIDGGASQEEFYKFIKPILEKMDGTEELLVKLNREDLLRKQRTFDNGSIPHQIHLGELHAILRRQEDFYPFLKDNREKIEKILTFRIPYYVGPLARGNSRFAWMTRKSEETITPWNFEEVVDKGASAQSFIERMTNFDKNLPNEKVLPKHSLLYEYFTVYNELTKVKYVTEGMRKPAFLSGEQKKAIVDLLFKTNRKVTVKQLKEDYFKKIECFDSVEISGVEDRFNASLGTYHDLLKIIKDKDFLDNEENEDILEDIVLTLTLFEDREMIEERLKTYAHLFDDKVMKQLKRRRYTGWGRLSRKLINGIRDKQSGKTILDFLKSDGFANRNFMQLIHDDSLTFKEDIQKAQVSGQGDSLHEHIANLAGSPAIKKGILQTVKVVDELVKVMGRHKPENIVIEMARENQTTQKGQKNSRERMKRIEEGIKELGSQILKEHPVENTQLQNEKLYLYYLQNGRDMYVDQELDINRLSDYDVDHIVPQSFLKDDSIDNKVLTRSDKARGKSDNVPSEEVVKKMKNYWRQLLNAKLITQRKFDNLTKAERGGLSELDKAGFIKRQLVETRQITKHVAQILDSRMNTKYDENDKLIREVKVITLKSKLVSDFRKDFQFYKVREINNYHHAHDAYLNAVVGTALIKKYPKLESEFVYGDYKVYDVRKMIAKSEQEIGKATAKYFFYSNIMNFFKTEITLANGEIRKRPLIETNGETGEIVWDKGRDFATVRKVLSMPQVNIVKKTEVQTGGFSKESILPKRNSDKLIARKKDWDPKKYGGFDSPTVAYSVLVVAKVEKGKSKKLKSVKELLGITIMERSSFEKNPIDFLEAKGYKEVKKDLIIKLPKYSLFELENGRKRMLASAGELQKGNELALPSKYVNFLYLASHYEKLKGSPEDNEQKQLFVEQHKHYLDEIIEQISEFSKRVILADANLDKVLSAYNKHRDKPIREQAENIIHLFTLTNLGAPAAFKYFDTTIDRKRYTSTKEVLDATLIHQSITGLYETRIDLSQLGGDGGGGSGGSGGSGGSGGSGGSGGVLNLEEEYRLHEKPVPSSIDPSWLQLFPTVWAERAGMGLANQVPPVVVELRSGASPVAVRQYPMSKEAREGIRPHIQKFLDLGVLVPCRSPWNTPLLPVKKPGTNDYRPVQDLREINKRVQDIHPTVPNPYNLLSSLPPSYTWYSVLDLKDAFFCLRLHPNSQPLFAFEWKDPEKGNTGQLTWTRLPQGFKNSPTLFNEALHRDLAPFRALNPQVVLLQYVDDLLVAAPTYEDCKKGTQKLLQELSKLGYRVSAKKAQLCQREVTYLGYLLKEGKRWLTPARKATVMKIPVPTTPRQVREFLGKAGFCRLFIPGFASLAAPLYPLTKPSIPFIWTEEHQQAFDHIKKALLSAPALALPDLTKPFTLYIDERAGVARGVLTQTLGPWRRPVAYLSKKLDPVASGWPTCLKAVAAVALLLKDADKLTLGQNVTVIASHSLESIVRQPPDRWMTNARMTHYQSLLLNERVSFAPPAVLNPATLLPVESEATPVHRCSEILAEETGTRRDLEDQPLPGVPTWYTDGSSFITEGKRRAGAPIVDGKRTVWASSLPEGTSAQKAELVALTQALRLAEGKNINIYTDSRYAFATAHIHGAIYKQRGWLTSAGKDIKNKEEILALLEAIHLPRRVAIIHCPGHQRGSNPVATGNRRADEAAKQAALSTRVLAGTTKPAGKRTADGSEFEKRTADGSEFESPKKKAKVE

SEQ ID NO: 6085 - protein, 2020 aa, synthetic construct
MPAAKRVKLDGGDKKYSIGLDIGTNSVGWAVITDEYKVPSKKFKVLGNTDRHSIKKNLIGALLFDSGETAEATRLKRTARRRYTRRKNRICYLQEIFSNEMAKVDDSFFHRLEESFLVEEDKKHERHPIFGNIVDEVAYHEKYPTIYHLRKKLVDSTDKADLRLIYLALAHMIKFRGHFLIEGDLNPDNSDVDKLFIQLVQTYNQLFEENPINASGVDAKAILSARLSKSRRLENLIAQLPGEKKNGLFGNLIALSLGLTPNFKSNFDLAEDAKLQLSKDTYDDDLDNLLAQIGDQYADLFLAAKNLSDAILLSDILRVNTEITKAPLSASMIKRYDEHHQDLTLLKALVRQQLPEKYKEIFFDQSKNGYAGYIDGGASQEEFYKFIKPILEKMDGTEELLVKLNREDLLRKQRTFDNGSIPHQIHLGELHAILRRQEDFYPFLKDNREKIEKILTFRIPYYVGPLARGNSRFAWMTRKSEETITPWNFEEVVDKGASAQSFIERMTNFDKNLPNEKVLPKHSLLYEYFTVYNELTKVKYVTEGMRKPAFLSGEQKKAIVDLLFKTNRKVTVKQLKEDYFKKIECFDSVEISGVEDRFNASLGTYHDLLKIIKDKDFLDNEENEDILEDIVLTLTLFEDREMIEERLKTYAHLFDDKVMKQLKRRRYTGWGRLSRKLINGIRDKQSGKTILDFLKSDGFANRNFMQLIHDDSLTFKEDIQKAQVSGQGDSLHEHIANLAGSPAIKKGILQTVKVVDELVKVMGRHKPENIVIEMARENQTTQKGQKNSRERMKRIEEGIKELGSQILKEHPVENTQLQNEKLYLYYLQNGRDMYVDQELDINRLSDYDVDHIVPQSFLKDDSIDNKVLTRSDKARGKSDNVPSEEVVKKMKNYWRQLLNAKLITQRKFDNLTKAERGGLSELDKAGFIKRQLVETRQITKHVAQILDSRMNTKYDENDKLIREVKVITLKSKLVSDFRKDFQFYKVREINNYHHAHDAYLNAVVGTALIKKYPKLESEFVYGDYKVYDVRKMIAKSEQEIGKATAKYFFYSNIMNFFKTEITLANGEIRKRPLIETNGETGEIVWDKGRDFATVRKVLSMPQVNIVKKTEVQTGGFSKESILPKRNSDKLIARKKDWDPKKYGGFDSPTVAYSVLVVAKVEKGKSKKLKSVKELLGITIMERSSFEKNPIDFLEAKGYKEVKKDLIIKLPKYSLFELENGRKRMLASAGELQKGNELALPSKYVNFLYLASHYEKLKGSPEDNEQKQLFVEQHKHYLDEIIEQISEFSKRVILADANLDKVLSAYNKHRDKPIREQAENIIHLFTLTNLGAPAAFKYFDTTIDRKRYTSTKEVLDATLIHQSITGLYETRIDLSQLGGDGGGGSGGSGGSGGSGGSGGSGGAVLGLEHLPRPPQISQFPLNPERLQALQHLVRKALEAGHIEPYTGPGNNPVFPVKKANGTWRFIHDLRATNSLTIDLSSSSPGPPDLSSLPTTLAHLQTIDLRDAFFQIPLPKQFQPYFAFTVPQQCNYGPGTRYAWKVLPQGFKNSPTLFEMQLAHILQPIRQAFPQCTILQYMDDILLASPSHEDLLLLSEATMASLISHGLPVSENKTQQTPGTIKFLGQIISPNHLTYDAVPTVPIRSRWALPELQALLGEIQWVSKGTPTLRQPLHSLYCALQRHTDPRDQIYLNPSQVQSLVQLRQALSQNCRSRLVQTLPLLGAIMLTLTGTTTVVFQSKEQWPLVWLHAPLPHTSQCPWGQLLASAVLLLDKYTLQSYGLLCQTIHHNISTQTFNQFIQTSDHPSVPILLHHSHRFKNLGAQTGELWNTFLKTAAPLAPVKALMPVFTLSPVIINTAPCLFSDGSTSRAAYILWDKQILSQRSFPLPPPHKSAQRAELLGLLHGLSSARSWRCLNIFLDSKYLYHYLRTLALGTFQGRSSQAPFQALLPRLLSRKVVYLHHVRSHTNLPDPISRLNALTDALLITPVLQLAGKRTADGSEFEKRTADGSEFESPKKKAKVE

SEQ ID NO: 6086 - protein, 2016 aa, synthetic construct
MPAAKRVKLDGGDKKYSIGLDIGTNSVGWAVITDEYKVPSKKFKVLGNTDRHSIKKNLIGALLFDSGETAEATRLKRTARRRYTRRKNRICYLQEIFSNEMAKVDDSFFHRLEESFLVEEDKKHERHPIFGNIVDEVAYHEKYPTIYHLRKKLVDSTDKADLRLIYLALAHMIKFRGHFLIEGDLNPDNSDVDKLFIQLVQTYNQLFEENPINASGVDAKAILSARLSKSRRLENLIAQLPGEKKNGLFGNLIALSLGLTPNFKSNFDLAEDAKLQLSKDTYDDDLDNLLAQIGDQYADLFLAAKNLSDAILLSDILRVNTEITKAPLSASMIKRYDEHHQDLTLLKALVRQQLPEKYKEIFFDQSKNGYAGYIDGGASQEEFYKFIKPILEKMDGTEELLVKLNREDLLRKQRTFDNGSIPHQIHLGELHAILRRQEDFYPFLKDNREKIEKILTFRIPYYVGPLARGNSRFAWMTRKSEETITPWNFEEVVDKGASAQSFIERMTNFDKNLPNEKVLPKHSLLYEYFTVYNELTKVKYVTEGMRKPAFLSGEQKKAIVDLLFKTNRKVTVKQLKEDYFKKIECFDSVEISGVEDRFNASLGTYHDLLKIIKDKDFLDNEENEDILEDIVLTLTLFEDREMIEERLKTYAHLFDDKVMKQLKRRRYTGWGRLSRKLINGIRDKQSGKTILDFLKSDGFANRNFMQLIHDDSLTFKEDIQKAQVSGQGDSLHEHIANLAGSPAIKKGILQTVKVVDELVKVMGRHKPENIVIEMARENQTTQKGQKNSRERMKRIEEGIKELGSQILKEHPVENTQLQNEKLYLYYLQNGRDMYVDQELDINRLSDYDVDHIVPQSFLKDDSIDNKVLTRSDKARGKSDNVPSEEVVKKMKNYWRQLLNAKLITQRKFDNLTKAERGGLSELDKAGFIKRQLVETRQITKHVAQILDSRMNTKYDENDKLIREVKVITLKSKLVSDFRKDFQFYKVREINNYHHAHDAYLNAVVGTALIKKYPKLESEFVYGDYKVYDVRKMIAKSEQEIGKATAKYFFYSNIMNFFKTEITLANGEIRKRPLIETNGETGEIVWDKGRDFATVRKVLSMPQVNIVKKTEVQTGGFSKESILPKRNSDKLIARKKDWDPKKYGGFDSPTVAYSVLVVAKVEKGKSKKLKSVKELLGITIMERSSFEKNPIDFLEAKGYKEVKKDLIIKLPKYSLFELENGRKRMLASAGELQKGNELALPSKYVNFLYLASHYEKLKGSPEDNEQKQLFVEQHKHYLDEIIEQISEFSKRVILADANLDKVLSAYNKHRDKPIREQAENIIHLFTLTNLGAPAAFKYFDTTIDRKRYTSTKEVLDATLIHQSITGLYETRIDLSQLGGDGGGGSGGSGGSGGSGGSGGSGGGLEHLPPPPEVSQFPLNPERLQALTDLVSRALEAKHIEPYQGPGNNPIFPVKKPNGKWRFIHDLRATNSLTRDLASPSPGPPDLTSPPQDLPHLRTIDLTDAFFQIPLPAVFQPYFAFTLPQPNNHGPGTRYSWRVLPQGFKNSPTLFQQQLSHILAPVRKAFPNSLIIQYMDDILLASPALRELTALTDKVTNALTKEGLPMSLEKTQATPGSIHFLGQVISPDCITYETLPSIHVKSIWSLAELQSMLGELQWVSKGTPVLRSSLHQLYLALRGHRDPRDTIELTSTQVQALKTIQKALALNCRSRLVSQLPILALIILRPTGTTAVLFQTKQKWPLVWLHTPHPATSLRPWGQLLANAIITLDKYSLQHYGQICKSFHHNISNQALTYYLHTSDQSSVAILLQHSHRFHNLGAQPSGPWRSLLQVPQIFQNIDVLRPPFIISPVVIDHAPCLFSDGATSKAAFILWDKQVIHQQVLPLPSTCSAQAGELFGLLAGLQKSKPWPALNIFLDSKFLIGHLRRMAWGAFLGPSTQCDLHARLFPLLQGKTVYVHHVRSHTLLQDPISRLNEATDALMLAPLLPLAGKRTADGSEFEKRTADGSEFESPKKKAKVE

SEQ ID NO: 6087 - protein, 2013 aa, synthetic construct
MPAAKRVKLDGGDKKYSIGLDIGTNSVGWAVITDEYKVPSKKFKVLGNTDRHSIKKNLIGALLFDSGETAEATRLKRTARRRYTRRKNRICYLQEIFSNEMAKVDDSFFHRLEESFLVEEDKKHERHPIFGNIVDEVAYHEKYPTIYHLRKKLVDSTDKADLRLIYLALAHMIKFRGHFLIEGDLNPDNSDVDKLFIQLVQTYNQLFEENPINASGVDAKAILSARLSKSRRLENLIAQLPGEKKNGLFGNLIALSLGLTPNFKSNFDLAEDAKLQLSKDTYDDDLDNLLAQIGDQYADLFLAAKNLSDAILLSDILRVNTEITKAPLSASMIKRYDEHHQDLTLLKALVRQQLPEKYKEIFFDQSKNGYAGYIDGGASQEEFYKFIKPILEKMDGTEELLVKLNREDLLRKQRTFDNGSIPHQIHLGELHAILRRQEDFYPFLKDNREKIEKILTFRIPYYVGPLARGNSRFAWMTRKSEETITPWNFEEVVDKGASAQSFIERMTNFDKNLPNEKVLPKHSLLYEYFTVYNELTKVKYVTEGMRKPAFLSGEQKKAIVDLLFKTNRKVTVKQLKEDYFKKIECFDSVEISGVEDRFNASLGTYHDLLKIIKDKDFLDNEENEDILEDIVLTLTLFEDREMIEERLKTYAHLFDDKVMKQLKRRRYTGWGRLSRKLINGIRDKQSGKTILDFLKSDGFANRNFMQLIHDDSLTFKEDIQKAQVSGQGDSLHEHIANLAGSPAIKKGILQTVKVVDELVKVMGRHKPENIVIEMARENQTTQKGQKNSRERMKRIEEGIKELGSQILKEHPVENTQLQNEKLYLYYLQNGRDMYVDQELDINRLSDYDVDHIVPQSFLKDDSIDNKVLTRSDKARGKSDNVPSEEVVKKMKNYWRQLLNAKLITQRKFDNLTKAERGGLSELDKAGFIKRQLVETRQITKHVAQILDSRMNTKYDENDKLIREVKVITLKSKLVSDFRKDFQFYKVREINNYHHAHDAYLNAVVGTALIKKYPKLESEFVYGDYKVYDVRKMIAKSEQEIGKATAKYFFYSNIMNFFKTEITLANGEIRKRPLIETNGETGEIVWDKGRDFATVRKVLSMPQVNIVKKTEVQTGGFSKESILPKRNSDKLIARKKDWDPKKYGGFDSPTVAYSVLVVAKVEKGKSKKLKSVKELLGITIMERSSFEKNPIDFLEAKGYKEVKKDLIIKLPKYSLFELENGRKRMLASAGELQKGNELALPSKYVNFLYLASHYEKLKGSPEDNEQKQLFVEQHKHYLDEIIEQISEFSKRVILADANLDKVLSAYNKHRDKPIREQAENIIHLFTLTNLGAPAAFKYFDTTIDRKRYTSTKEVLDATLIHQSITGLYETRIDLSQLGGDGGGGSGGSGGSGGSGGSGGSGGPLGTSDSPVTHADPIDWKSEEPVWVDQWPLTQEKLSAAQQLVQEQLRLGHIEPSTSAWNSPIFVIKKKSGKWRLLQDLRKVNETMMHMGALQPGLPTPSPIPDKSYIIVIDLKDCFYTIPLAPQDCKRFAFSLPSVNFKEPMQRYQWRVLPQGMTNSPTLCQKFVATAIAPVRQRFPQLYLVHYMDDILLAHTDEHLLYQAFSILKQHLSLNGLVIADEKIQTHFPYNYLGFSLYPRVYNTQLVKLQTDHLKTLNDFQKLLGDINWIRPYLKLPTYTLQPLFDILKGDSDPASPRTLSLEGRTALQSIEEAIRQQQITYCDYQRSWGLYILPTPRAPTGVLYQDKPLRWIYLSATPTKHLLPYYELVAKIIAKGRHEAIQYFGMEPPFICVPYALEQQDWLFQFSDNWSIAFANYPGQITHHYPSDKLLQFASSHAFIFPKIVRRQPIPEATLIFTDGSSNGTAALIINHQTYYAQTSFSSAQVVELFAVHQALLTVPTSFNLFTDSSYVVGALQMIETVPIIGTTSPEVLNLFTLIQQVLHCRQHPCFFGHIRAHSTLPGALVQGNHTADVLTKQVFFQSAGKRTADGSEFEKRTADGSEFESPKKKAKVE

SEQ ID NO: 6088 - protein, 2134 aa, synthetic construct
MPAAKRVKLDGGDKKYSIGLDIGTNSVGWAVITDEYKVPSKKFKVLGNTDRHSIKKNLIGALLFDSGETAEATRLKRTARRRYTRRKNRICYLQEIFSNEMAKVDDSFFHRLEESFLVEEDKKHERHPIFGNIVDEVAYHEKYPTIYHLRKKLVDSTDKADLRLIYLALAHMIKFRGHFLIEGDLNPDNSDVDKLFIQLVQTYNQLFEENPINASGVDAKAILSARLSKSRRLENLIAQLPGEKKNGLFGNLIALSLGLTPNFKSNFDLAEDAKLQLSKDTYDDDLDNLLAQIGDQYADLFLAAKNLSDAILLSDILRVNTEITKAPLSASMIKRYDEHHQDLTLLKALVRQQLPEKYKEIFFDQSKNGYAGYIDGGASQEEFYKFIKPILEKMDGTEELLVKLNREDLLRKQRTFDNGSIPHQIHLGELHAILRRQEDFYPFLKDNREKIEKILTFRIPYYVGPLARGNSRFAWMTRKSEETITPWNFEEVVDKGASAQSFIERMTNFDKNLPNEKVLPKHSLLYEYFTVYNELTKVKYVTEGMRKPAFLSGEQKKAIVDLLFKTNRKVTVKQLKEDYFKKIECFDSVEISGVEDRFNASLGTYHDLLKIIKDKDFLDNEENEDILEDIVLTLTLFEDREMIEERLKTYAHLFDDKVMKQLKRRRYTGWGRLSRKLINGIRDKQSGKTILDFLKSDGFANRNFMQLIHDDSLTFKEDIQKAQVSGQGDSLHEHIANLAGSPAIKKGILQTVKVVDELVKVMGRHKPENIVIEMARENQTTQKGQKNSRERMKRIEEGIKELGSQILKEHPVENTQLQNEKLYLYYLQNGRDMYVDQELDINRLSDYDVDHIVPQSFLKDDSIDNKVLTRSDKARGKSDNVPSEEVVKKMKNYWRQLLNAKLITQRKFDNLTKAERGGLSELDKAGFIKRQLVETRQITKHVAQILDSRMNTKYDENDKLIREVKVITLKSKLVSDFRKDFQFYKVREINNYHHAHDAYLNAVVGTALIKKYPKLESEFVYGDYKVYDVRKMIAKSEQEIGKATAKYFFYSNIMNFFKTEITLANGEIRKRPLIETNGETGEIVWDKGRDFATVRKVLSMPQVNIVKKTEVQTGGFSKESILPKRNSDKLIARKKDWDPKKYGGFDSPTVAYSVLVVAKVEKGKSKKLKSVKELLGITIMERSSFEKNPIDFLEAKGYKEVKKDLIIKLPKYSLFELENGRKRMLASAGELQKGNELALPSKYVNFLYLASHYEKLKGSPEDNEQKQLFVEQHKHYLDEIIEQISEFSKRVILADANLDKVLSAYNKHRDKPIREQAENIIHLFTLTNLGAPAAFKYFDTTIDRKRYTSTKEVLDATLIHQSITGLYETRIDLSQLGGDGGGGSGGSGGSGGSGGSGGSGGLLGRDLLTKLKAQIQFSTEGPQVTWEDRPAMCLVLNLEEEYRLHEKPVPPSIDPSWLQLFPMVWAEKAGMGLANQVPPVVVELKSDASPVAVRQYPMSKEAREGIRPHIQRFLDLGILVPCQSPWNTPLLPVKKPGTNDYRPVQDLREVNKRVQDIHPTVPNPYNLLSSLPPSHTWYSVLDLKDAFFCLKLHPNSQPLFAFEWRDPEKGNTGQLTWTRLPQGFKNSPTLFNEALHRDLASFRALNPQVVMLQYVDDLLVAAPTYRDCKEGTRRLLQELSKLGYRVSAKKAQLCREEVTYLGYLLKGGKRWLTPARKATVMKIPTPTTPRQVREFLGKAGFCRLFIPGFASLAAPLYPLTRPKVPFTWTEAHQEAFGRIKEALLSAPALALPDLTKPFALYVDEKEGVARGVLTQTLGPWRRPVAYLSKKLDPVASGWPTCLKAIAAVALLLKDADKLTLGQNVLVIAPHNLESIVRQPPDRWMTNARMTHYQSLLLNERVSFAPPAILNPATLLPVESDDTPIHICSEILAEETGTRPDLRDQPLPGVPAWYTDGSSFIMDGRRQAGAAIVDNKRTVWASNLPEGTSAQKAELIALTQALRLAEGKSINIYTDSRYAFATAHVHGAIYKQRGWLTSAGKDIKNKEEILALLEAIHLPKRVAIIHCPGHQRGTDPVATGNRKADEAAKQAAQSTRILTETTKNAGKRTADGSEFEKRTADGSEFESPKKKAKVE

SEQ ID NO: 6089 - protein, 2225 aa, synthetic construct
MPAAKRVKLDGGDKKYSIGLDIGTNSVGWAVITDEYKVPSKKFKVLGNTDRHSIKKNLIGALLFDSGETAEATRLKRTARRRYTRRKNRICYLQEIFSNEMAKVDDSFFHRLEESFLVEEDKKHERHPIFGNIVDEVAYHEKYPTIYHLRKKLVDSTDKADLRLIYLALAHMIKFRGHFLIEGDLNPDNSDVDKLFIQLVQTYNQLFEENPINASGVDAKAILSARLSKSRRLENLIAQLPGEKKNGLFGNLIALSLGLTPNFKSNFDLAEDAKLQLSKDTYDDDLDNLLAQIGDQYADLFLAAKNLSDAILLSDILRVNTEITKAPLSASMIKRYDEHHQDLTLLKALVRQQLPEKYKEIFFDQSKNGYAGYIDGGASQEEFYKFIKPILEKMDGTEELLVKLNREDLLRKQRTFDNGSIPHQIHLGELHAILRRQEDFYPFLKDNREKIEKILTFRIPYYVGPLARGNSRFAWMTRKSEETITPWNFEEVVDKGASAQSFIERMTNFDKNLPNEKVLPKHSLLYEYFTVYNELTKVKYVTEGMRKPAFLSGEQKKAIVDLLFKTNRKVTVKQLKEDYFKKIECFDSVEISGVEDRFNASLGTYHDLLKIIKDKDFLDNEENEDILEDIVLTLTLFEDREMIEERLKTYAHLFDDKVMKQLKRRRYTGWGRLSRKLINGIRDKQSGKTILDFLKSDGFANRNFMQLIHDDSLTFKEDIQKAQVSGQGDSLHEHIANLAGSPAIKKGILQTVKVVDELVKVMGRHKPENIVIEMARENQTTQKGQKNSRERMKRIEEGIKELGSQILKEHPVENTQLQNEKLYLYYLQNGRDMYVDQELDINRLSDYDVDHIVPQSFLKDDSIDNKVLTRSDKARGKSDNVPSEEVVKKMKNYWRQLLNAKLITQRKFDNLTKAERGGLSELDKAGFIKRQLVETRQITKHVAQILDSRMNTKYDENDKLIREVKVITLKSKLVSDFRKDFQFYKVREINNYHHAHDAYLNAVVGTALIKKYPKLESEFVYGDYKVYDVRKMIAKSEQEIGKATAKYFFYSNIMNFFKTEITLANGEIRKRPLIETNGETGEIVWDKGRDFATVRKVLSMPQVNIVKKTEVQTGGFSKESILPKRNSDKLIARKKDWDPKKYGGFDSPTVAYSVLVVAKVEKGKSKKLKSVKELLGITIMERSSFEKNPIDFLEAKGYKEVKKDLIIKLPKYSLFELENGRKRMLASAGELQKGNELALPSKYVNFLYLASHYEKLKGSPEDNEQKQLFVEQHKHYLDEIIEQISEFSKRVILADANLDKVLSAYNKHRDKPIREQAENIIHLFTLTNLGAPAAFKYFDTTIDRKRYTSTKEVLDATLIHQSITGLYETRIDLSQLGGDGGGGSGGSGGSGGSGGSGGSGGTLGDQGSRGSDPLPEPRVTLTVEGIPTEFLVNTGAEHSVLTKPMGKMGSKRTVVAGATGSKVYPWTTKRLLKIGQKQVTHSFLVIPECPAPLLGRDLLTKLKAQIQFSTEGPQVTWEDRPAMCLVLNLEEEYRLHEKPVPPSIDPSWLQLFPMVWAEKAGMGLANQVPPVVVELKSDASPVAVRQYPMSKEAREGIRPHIQRFLDLGILVPCQSPWNTPLLPVKKPGTNDYRPVQDLREVNKRVQDIHPTVPNPYNLLSSLPPSHTWYSVLDLKDAFFCLKLHPNSQPLFAFEWRDPEKGNTGQLTWTRLPQGFKNSPTLFNEALHRDLASFRALNPQVVMLQYVDDLLVAAPTYRDCKEGTRRLLQELSKLGYRVSAKKAQLCREEVTYLGYLLKGGKRWLTPARKATVMKIPTPTTPRQVREFLGKAGFCRLFIPGFASLAAPLYPLTRPKVPFTWTEAHQEAFGRIKEALLSAPALALPDLTKPFALYVDEKEGVARGVLTQTLGPWRRPVAYLSKKLDPVASGWPTCLKAIAAVALLLKDADKLTLGQNVLVIAPHNLESIVRQPPDRWMTNARMTHYQSLLLNERVSFAPPAILNPATLLPVESDDTPIHICSEILAEETGTRPDLRDQPLPGVPAWYTDGSSFIMDGRRQAGAAIVDNKRTVWASNLPEGTSAQKAELIALTQALRLAEGKSINIYTDSRYAFATAHVHGAIYKQRGWLTSAGKDIKNKEEILALLEAIHLPKRVAIIHCPGHQRGTDPVATGNRKADEAAKQAAQSTRILTETTKNAGKRTADGSEFEKRTADGSEFESPKKKAKVE

SEQ ID NO: 6090 - protein, 2103 aa, synthetic construct; identical to SEQ ID NO: 4503

SEQ ID NO: 6091 - protein, 2103 aa, synthetic construct; identical to SEQ ID NO: 4503

SEQ ID NO: 6092 - protein, 2103 aa, synthetic construct
MPAAKRVKLDGGDKKYSIGLDIGTNSVGWAVITDEYKVPSKKFKVLGNTDRHSIKKNLIGALLFDSGETAEATRLKRTARRRYTRRKNRICYLQEIFSNEMAKVDDSFFHRLEESFLVEEDKKHERHPIFGNIVDEVAYHEKYPTIYHLRKKLVDSTDKADLRLIYLALAHMIKFRGHFLIEGDLNPDNSDVDKLFIQLVQTYNQLFEENPINASGVDAKAILSARLSKSRRLENLIAQLPGEKKNGLFGNLIALSLGLTPNFKSNFDLAEDAKLQLSKDTYDDDLDNLLAQIGDQYADLFLAAKNLSDAILLSDILRVNTEITKAPLSASMIKRYDEHHQDLTLLKALVRQQLPEKYKEIFFDQSKNGYAGYIDGGASQEEFYKFIKPILEKMDGTEELLVKLNREDLLRKQRTFDNGSIPHQIHLGELHAILRRQEDFYPFLKDNREKIEKILTFRIPYYVGPLARGNSRFAWMTRKSEETITPWNFEEVVDKGASAQSFIERMTNFDKNLPNEKVLPKHSLLYEYFTVYNELTKVKYVTEGMRKPAFLSGEQKKAIVDLLFKTNRKVTVKQLKEDYFKKIECFDSVEISGVEDRFNASLGTYHDLLKIIKDKDFLDNEENEDILEDIVLTLTLFEDREMIEERLKTYAHLFDDKVMKQLKRRRYTGWGRLSRKLINGIRDKQSGKTILDFLKSDGFANRNFMQLIHDDSLTFKEDIQKAQVSGQGDSLHEHIANLAGSPAIKKGILQTVKVVDELVKVMGRHKPENIVIEMARENQTTQKGQKNSRERMKRIEEGIKELGSQILKEHPVENTQLQNEKLYLYYLQNGRDMYVDQELDINRLSDYDVDHIVPQSFLKDDSIDNKVLTRSDKARGKSDNVPSEEVVKKMKNYWRQLLNAKLITQRKFDNLTKAERGGLSELDKAGFIKRQLVETRQITKHVAQILDSRMNTKYDENDKLIREVKVITLKSKLVSDFRKDFQFYKVREINNYHHAHDAYLNAVVGTALIKKYPKLESEFVYGDYKVYDVRKMIAKSEQEIGKATAKYFFYSNIMNFFKTEITLANGEIRKRPLIETNGETGEIVWDKGRDFATVRKVLSMPQVNIVKKTEVQTGGFSKESILPKRNSDKLIARKKDWDPKKYGGFDSPTVAYSVLVVAKVEKGKSKKLKSVKELLGITIMERSSFEKNPIDFLEAKGYKEVKKDLIIKLPKYSLFELENGRKRMLASAGELQKGNELALPSKYVNFLYLASHYEKLKGSPEDNEQKQLFVEQHKHYLDEIIEQISEFSKRVILADANLDKVLSAYNKHRDKPIREQAENIIHLFTLTNLGAPAAFKYFDTTIDRKRYTSTKEVLDATLIHQSITGLYETRIDLSQLGGDGGGGSGGSGGSGGSGGSGGSGGTLGIEDEYRLHETSTEPDVSLGSTWLSDFPQAWAETGGMGLAVRQAPLIIPLKATSTPVSIQQYPMSHEARLGIKPHIQRLLDQGILVPCQSPWNTPLLPVKKPGTNDYRPVQDLREVNKRVEDIHPTVPNPYNLLSGLPPSHQWYTVLDLKDAFFCLRLHPTSQPLFAFEWRDPGMGISGQLTWTRLPQGFKNSPTLFDEALHRDLADFRIQHPDLILLQYVDDILLAATSELDCQQGTRALLQTLGDLGYRASAKKAQICQKQVKYLGYLLREGQRWLTEARKETVMGQPVPKTPRQLREFLGTAGFCRLWIPGFAEMAAPLYPLTKTGTLFSWGPDQQKAYQEIKQALLTAPALGLPDLTKPFELFVDEKQGYAKGVLTQKLGPWRRPVAYLSKKLDPVAAGWPPCLRMVAAIAVLTKDAGKLTMGQPLVILAPHAVEALVKQPPDRWLSNARMTHYQAMLLDTDRVQFGPVVALNPATLLPLPEEGAPHDCLEILAETHGTRPDLTDQPIPDADHTWYTDGSSFLQEGQRKAGAAVTTETEVIWAGALPAGTSAQRAELIALTQALKMAEGKRLNVYTDSRYAFATAHIHGEIYRRRGLLTSEGREIKNKSEILALLKALFLPKRLSIIHCLGHQKGDSAEARGNRLADQAAREAAIKTPPDTSTLLAGKRTADGSEFEKRTADGSEFESPKKKAKVE

SEQ ID NO: 6093 - protein, 2103 aa, synthetic construct
MPAAKRVKLDGGDKKYSIGLDIGTNSVGWAVITDEYKVPSKKFKVLGNTDRHSIKKNLIGALLFDSGETAEATRLKRTARRRYTRRKNRICYLQEIFSNEMAKVDDSFFHRLEESFLVEEDKKHERHPIFGNIVDEVAYHEKYPTIYHLRKKLVDSTDKADLRLIYLALAHMIKFRGHFLIEGDLNPDNSDVDKLFIQLVQTYNQLFEENPINASGVDAKAILSARLSKSRRLENLIAQLPGEKKNGLFGNLIALSLGLTPNFKSNFDLAEDAKLQLSKDTYDDDLDNLLAQIGDQYADLFLAAKNLSDAILLSDILRVNTEITKAPLSASMIKRYDEHHQDLTLLKALVRQQLPEKYKEIFFDQSKNGYAGYIDGGASQEEFYKFIKPILEKMDGTEELLVKLNREDLLRKQRTFDNGSIPHQIHLGELHAILRRQEDFYPFLKDNREKIEKILTFRIPYYVGPLARGNSRFAWMTRKSEETITPWNFEEVVDKGASAQSFIERMTNFDKNLPNEKVLPKHSLLYEYFTVYNELTKVKYVTEGMRKPAFLSGEQKKAIVDLLFKTNRKVTVKQLKEDYFKKIECFDSVEISGVEDRFNASLGTYHDLLKIIKDKDFLDNEENEDILEDIVLTLTLFEDREMIEERLKTYAHLFDDKVMKQLKRRRYTGWGRLSRKLINGIRDKQSGKTILDFLKSDGFANRNFMQLIHDDSLTFKEDIQKAQVSGQGDSLHEHIANLAGSPAIKKGILQTVKVVDELVKVMGRHKPENIVIEMARENQTTQKGQKNSRERMKRIEEGIKELGSQILKEHPVENTQLQNEKLYLYYLQNGRDMYVDQELDINRLSDYDVDHIVPQSFLKDDSIDNKVLTRSDKARGKSDNVPSEEVVKKMKNYWRQLLNAKLITQRKFDNLTKAERGGLSELDKAGFIKRQLVETRQITKHVAQILDSRMNTKYDENDKLIREVKVITLKSKLVSDFRKDFQFYKVREINNYHHAHDAYLNAVVGTALIKKYPKLESEFVYGDYKVYDVRKMIAKSEQEIGKATAKYFFYSNIMNFFKTEITLANGEIRKRPLIETNGETGEIVWDKGRDFATVRKVLSMPQVNIVKKTEVQTGGFSKESILPKRNSDKLIARKKDWDPKKYGGFDSPTVAYSVLVVAKVEKGKSKKLKSVKELLGITIMERSSFEKNPIDFLEAKGYKEVKKDLIIKLPKYSLFELENGRKRMLASAGELQKGNELALPSKYVNFLYLASHYEKLKGSPEDNEQKQLFVEQHKHYLDEIIEQISEFSKRVILADANLDKVLSAYNKHRDKPIREQAENIIHLFTLTNLGAPAAFKYFDTTIDRKRYTSTKEVLDATLIHQSITGLYETRIDLSQLGGDGGGGSGGSGGSGGSGGSGGSGGTLGIEDEYRLHETSTEPDVSLGSTWLSDFPQAWAETGGMGLAVRQAPLIIPLKATSTPVSIQQYPMSHEARLGIKPHIQRLLDQGILVPCQSPWNTPLLPVKKPGTNDYRPVQDLREVNKRVEDIHPTVPNPYNLLSGLPPSHQWYTVLDLKDAFFCLRLHPTSQPLFAFEWRDPGMGISGQLTWTRLPQGFKNSPTLFNEALHRDLADFRIQHPDLILLQYVDDILLAATSELDCQQGTRALLQTLGDLGYRASAKKAQICQKQVKYLGYLLREGQRWLTEARKETVMGQPVPKTPRQLREFLGTAGFCRLWIPGFAEMAAPLYPLTKPGTLFSWGPDQQKAYQEIKQALLTAPALGLPDLTKPFELFVDEKQGYAKGVLTQKLGPWRRPVAYLSKKLDPVAAGWPPCLRMVAAIAVLTKDAGKLTMGQPLVILAPHAVEALVKQPPDRWLSNARMTHYQAMLLDTDRVQFGPVVALNPATLLPLPEEGAPHDCLEILAETHGTRPDLTDQPIPDADHTWYTDGSSFLQEGQRKAGAAVTTETEVIWAGALPAGTSAQRAELIALTQALKMAEGKRLNVYTDSRYAFATAHIHGEIYRRRGWLTSEGREIKNKSEILALLKALFLPKRLSIIHCLGHQKGDSAEARGNRLADQAAREAAIKTPPDTSTLLAGKRTADGSEFEKRTADGSEFESPKKKAKVE

SEQ ID NO: 6094 - protein, 2103 aa, synthetic construct
MPAAKRVKLDGGDKKYSIGLDIGTNSVGWAVITDEYKVPSKKFKVLGNTDRHSIKKNLIGALLFDSGETAEATRLKRTARRRYTRRKNRICYLQEIFSNEMAKVDDSFFHRLEESFLVEEDKKHERHPIFGNIVDEVAYHEKYPTIYHLRKKLVDSTDKADLRLIYLALAHMIKFRGHFLIEGDLNPDNSDVDKLFIQLVQTYNQLFEENPINASGVDAKAILSARLSKSRRLENLIAQLPGEKKNGLFGNLIALSLGLTPNFKSNFDLAEDAKLQLSKDTYDDDLDNLLAQIGDQYADLFLAAKNLSDAILLSDILRVNTEITKAPLSASMIKRYDEHHQDLTLLKALVRQQLPEKYKEIFFDQSKNGYAGYIDGGASQEEFYKFIKPILEKMDGTEELLVKLNREDLLRKQRTFDNGSIPHQIHLGELHAILRRQEDFYPFLKDNREKIEKILTFRIPYYVGPLARGNSRFAWMTRKSEETITPWNFEEVVDKGASAQSFIERMTNFDKNLPNEKVLPKHSLLYEYFTVYNELTKVKYVTEGMRKPAFLSGEQKKAIVDLLFKTNRKVTVKQLKEDYFKKIECFDSVEISGVEDRFNASLGTYHDLLKIIKDKDFLDNEENEDILEDIVLTLTLFEDREMIEERLKTYAHLFDDKVMKQLKRRRYTGWGRLSRKLINGIRDKQSGKTILDFLKSDGFANRNFMQLIHDDSLTFKEDIQKAQVSGQGDSLHEHIANLAGSPAIKKGILQTVKVVDELVKVMGRHKPENIVIEMARENQTTQKGQKNSRERMKRIEEGIKELGSQILKEHPVENTQLQNEKLYLYYLQNGRDMYVDQELDINRLSDYDVDHIVPQSFLKDDSIDNKVLTRSDKARGKSDNVPSEEVVKKMKNYWRQLLNAKLITQRKFDNLTKAERGGLSELDKAGFIKRQLVETRQITKHVAQILDSRMNTKYDENDKLIREVKVITLKSKLVSDFRKDFQFYKVREINNYHHAHDAYLNAVVGTALIKKYPKLESEFVYGDYKVYDVRKMIAKSEQEIGKATAKYFFYSNIMNFFKTEITLANGEIRKRPLIETNGETGEIVWDKGRDFATVRKVLSMPQVNIVKKTEVQTGGFSKESILPKRNSDKLIARKKDWDPKKYGGFDSPTVAYSVLVVAKVEKGKSKKLKSVKELLGITIMERSSFEKNPIDFLEAKGYKEVKKDLIIKLPKYSLFELENGRKRMLASAGELQKGNELALPSKYVNFLYLASHYEKLKGSPEDNEQKQLFVEQHKHYLDEIIEQISEFSKRVILADANLDKVLSAYNKHRDKPIREQAENIIHLFTLTNLGAPAAFKYFDTTIDRKRYTSTKEVLDATLIHQSITGLYETRIDLSQLGGDGGGGSGGSGGSGGSGGSGGSGGTLNIEDEYRLHETSKEPDVSLGSTWLSDFPQAWAETGGMGLAVRQAPLIIPLKATSTPVSIKQYPMSQEARLGIKPHIQRLLDQGILVPCQSPWNTPLLPVKKPGTNDYRPVQDLREVNKRVEDIHPTVPNPYNLLSGLPPSHQWYTVLDLKDAFFCLRLHPTSQPLFAFEWRDPEMGISGQLTWTRLPQGFKNSPTLFNEALHRDLAGFRIQHPDLILLQYVDDLLLAATSELDCQQGTRALLQTLGDLGYRASAKKAQICQKQVKYLGYLLKEGQRWLTEARKETVMGQPIPKTPRQLREFLGTAGFCRLWIPGFAEMAAPLYPLTKPGTLFNWGPDQQKAFQEIKQALLTAPALGLPDLTKPFELFVDEKQGYAKGVLTQKLGPWRRPVAYLSKKLDPVAAGWPPCLRMVAAIAVLTKDAGKLTMGQPLVILAPHAVEALVKQPPDRWLSNARMTHYQALLLDTDRVQFGPVVALNPATLLPLPEEGLQHDCLDILAEAHGTRSDLMDQPLPDADHTWYTDGSSFLQEGQRKAGAAVTTETEVIWARALPAGTSAQRAELIALTQALKMAEGKKLNVYTDSRYAFATAHIHGEIYRRRGWLTSEGKEIKNKDEILALLKALFLPKRLSIIHCPGHQKGNSAEARGNRMADQAAREVATRETPETSTLLAGKRTADGSEFEKRTADGSEFESPKKKAKVE

SEQ ID NO: 6095 - protein, 2103 aa, synthetic construct
MPAAKRVKLDGGDKKYSIGLDIGTNSVGWAVITDEYKVPSKKFKVLGNTDRHSIKKNLIGALLFDSGETAEATRLKRTARRRYTRRKNRICYLQEIFSNEMAKVDDSFFHRLEESFLVEEDKKHERHPIFGNIVDEVAYHEKYPTIYHLRKKLVDSTDKADLRLIYLALAHMIKFRGHFLIEGDLNPDNSDVDKLFIQLVQTYNQLFEENPINASGVDAKAILSARLSKSRRLENLIAQLPGEKKNGLFGNLIALSLGLTPNFKSNFDLAEDAKLQLSKDTYDDDLDNLLAQIGDQYADLFLAAKNLSDAILLSDILRVNTEITKAPLSASMIKRYDEHHQDLTLLKALVRQQLPEKYKEIFFDQSKNGYAGYIDGGASQEEFYKFIKPILEKMDGTEELLVKLNREDLLRKQRTFDNGSIPHQIHLGELHAILRRQEDFYPFLKDNREKIEKILTFRIPYYVGPLARGNSRFAWMTRKSEETITPWNFEEVVDKGASAQSFIERMTNFDKNLPNEKVLPKHSLLYEYFTVYNELTKVKYVTEGMRKPAFLSGEQKKAIVDLLFKTNRKVTVKQLKEDYFKKIECFDSVEISGVEDRFNASLGTYHDLLKIIKDKDFLDNEENEDILEDIVLTLTLFEDREMIEERLKTYAHLFDDKVMKQLKRRRYTGWGRLSRKLINGIRDKQSGKTILDFLKSDGFANRNFMQLIHDDSLTFKEDIQKAQVSGQGDSLHEHIANLAGSPAIKKGILQTVKVVDELVKVMGRHKPENIVIEMARENQTTQKGQKNSRERMKRIEEGIKELGSQILKEHPVENTQLQNEKLYLYYLQNGRDMYVDQELDINRLSDYDVDHIVPQSFLKDDSIDNKVLTRSDKARGKSDNVPSEEVVKKMKNYWRQLLNAKLITQRKFDNLTKAERGGLSELDKAGFIKRQLVETRQITKHVAQILDSRMNTKYDENDKLIREVKVITLKSKLVSDFRKDFQFYKVREINNYHHAHDAYLNAVVGTALIKKYPKLESEFVYGDYKVYDVRKMIAKSEQEIGKATAKYFFYSNIMNFFKTEITLANGEIRKRPLIETNGETGEIVWDKGRDFATVRKVLSMPQVNIVKKTEVQTGGFSKESILPKRNSDKLIARKKDWDPKKYGGFDSPTVAYSVLVVAKVEKGKSKKLKSVKELLGITIMERSSFEKNPIDFLEAKGYKEVKKDLIIKLPKYSLFELENGRKRMLASAGELQKGNELALPSKYVNFLYLASHYEKLKGSPEDNEQKQLFVEQHKHYLDEIIEQISEFSKRVILADANLDKVLSAYNKHRDKPIREQAENIIHLFTLTNLGAPAAFKYFDTTIDRKRYTSTKEVLDATLIHQSITGLYETRIDLSQLGGDGGGGSGGSGGSGGSGGSGGSGGTLNIEDEYRLHETSKGPDVPLGSTWLSDFPQAWAETGGMGLAFRQAPLIISLKATSTPVSIKQYPMSQEARLGIKPHIQRLLDQGILVPCQSPWNTPLLPVKKPGTNDYRPVQDLREVNKRVEDIHPTVPNPYNLLSGLPPSHQWYTVLDLKDAFFCLRLHPTSQSLFAFEWKDPEMGISGQLTWTRLPQGFKNSPTLFNEALHRDLADFRIQHPDLILLQYVDDLLLAATSELDCQQGTRALLQTLGDLGYRASAKKAQICQKQVKYLGYLLKEGQRWLTEARKETVMGQPTPKTPRQLREFLGKAGLCRLFIPGFAEMAAPLYPLTKPGTLFKWGPDQQKAYQEIKQALLTAPALGLPDLTKPFELFVDEKQGYAKGVLTQKLGPWRRPVAYLSKKLDPVAAGWPPCLRMVAAIAVLTKDVGKLTMGQPLVILAPHAVEALVKQPPDRWLSNARMTHYQALLLDTDRVQFGPIVALNPATLLPLPEEGLQHDCLDILAEAHGTRPDLTDQPLPDADHTWYTDGSSFLQEGQRRAGAAVTTETEVIWAKALPAGTSAQRAELIALTQALKMAAGKKLNVYTDSRYAFATAHIHGEIYRRRGWLTSEGKEIKNKDEILALLKALFLPKRLSIIHCPGHQKGNHAEARGNRMADQAAREVATRETPETSTLLAGKRTADGSEFEKRTADGSEFESPKKKAKVE

SEQ ID NO: 6096 - protein, 2103 aa, synthetic construct
MPAAKRVKLDGGDKKYSIGLDIGTNSVGWAVITDEYKVPSKKFKVLGNTDRHSIKKNLIGALLFDSGETAEATRLKRTARRRYTRRKNRICYLQEIFSNEMAKVDDSFFHRLEESFLVEEDKKHERHPIFGNIVDEVAYHEKYPTIYHLRKKLVDSTDKADLRLIYLALAHMIKFRGHFLIEGDLNPDNSDVDKLFIQLVQTYNQLFEENPINASGVDAKAILSARLSKSRRLENLIAQLPGEKKNGLFGNLIALSLGLTPNFKSNFDLAEDAKLQLSKDTYDDDLDNLLAQIGDQYADLFLAAKNLSDAILLSDILRVNTEITKAPLSASMIKRYDEHHQDLTLLKALVRQQLPEKYKEIFFDQSKNGYAGYIDGGASQEEFYKFIKPILEKMDGTEELLVKLNREDLLRKQRTFDNGSIPHQIHLGELHAILRRQEDFYPFLKDNREKIEKILTFRIPYYVGPLARGNSRFAWMTRKSEETITPWNFEEVVDKGASAQSFIERMTNFDKNLPNEKVLPKHSLLYEYFTVYNELTKVKYVTEGMRKPAFLSGEQKKAIVDLLFKTNRKVTVKQLKEDYFKKIECFDSVEISGVEDRFNASLGTYHDLLKIIKDKDFLDNEENEDILEDIVLTLTLFEDREMIEERLKTYAHLFDDKVMKQLKRRRYTGWGRLSRKLINGIRDKQSGKTILDFLKSDGFANRNFMQLIHDDSLTFKEDIQKAQVSGQGDSLHEHIANLAGSPAIKKGILQTVKVVDELVKVMGRHKPENIVIEMARENQTTQKGQKNSRERMKRIEEGIKELGSQILKEHPVENTQLQNEKLYLYYLQNGRDMYVDQELDINRLSDYDVDHIVPQSFLKDDSIDNKVLTRSDKARGKSDNVPSEEVVKKMKNYWRQLLNAKLITQRKFDNLTKAERGGLSELDKAGFIKRQLVETRQITKHVAQILDSRMNTKYDENDKLIREVKVITLKSKLVSDFRKDFQFYKVREINNYHHAHDAYLNAVVGTALIKKYPKLESEFVYGDYKVYDVRKMIAKSEQEIGKATAKYFFYSNIMNFFKTEITLANGEIRKRPLIETNGETGEIVWDKGRDFATVRKVLSMPQVNIVKKTEVQTGGFSKESILPKRNSDKLIARKKDWDPKKYGGFDSPTVAYSVLVVAKVEKGKSKKLKSVKELLGITIMERSSFEKNPIDFLEAKGYKEVKKDLIIKLPKYSLFELENGRKRMLASAGELQKGNELALPSKYVNFLYLASHYEKLKGSPEDNEQKQLFVEQHKHYLDEIIEQISEFSKRVILADANLDKVLSAYNKHRDKPIREQAENIIHLFTLTNLGAPAAFKYFDTTIDRKRYTSTKEVLDATLIHQSITGLYETRIDLSQLGGDGGGGSGGSGGSGGSGGSGGSGGTLNIEDEYRLHETSKGPDVPLGSTWLSDFPQAWAETGGMGLAVRQAPLIIPLKATSTPVSIKQYPMSQEARLGIKPHIQRLLDQGILVPCQSPWNTPLLPVKKPGTNDYRPVQDLREVNKRVEDIHPTVPNPYNLLSGLPPSHQWYTVLDLKDAFFCLRLHPTSQSLFAFEWRDPEMGISGQLTWTRLPQGFKNSPTLFNEALHRDLADFRIQHPDLILLQYVDDLLLAATSELDCQQGTRALLQTLGDLGYRASAKKAQICQKQVKYLGYLLKEGQRWLTEARKETVMGQPTPKTPRQLREFLGTAGFCRLWIPGFAEMAAPLYPLTKPGTLFEWGPDQQKAYQEIKQALLTAPALGLPDLTKPFELFVDEKQGYAKGVLTQKLGPWRRPVAYLSKKLDPVAAGWPPCLRMVAAIAVLTKDAGKLTMGQPLVILAPHAVEALVKQPPDRWLSNARMTHYQALLLDTDRVQFGPIVALNPATLLPLPEEGLQHDCLDILAEAHGTRPDLTDQPLPDADHTWYTDGSSFLQEGQRKAGAAVTTETEVVWAKALPAGTSAQRAELIALTQALKMAEGKKLNVYTDSRYAFATAHIHGEIYRRRGWLTSEGKEIKNKDEILALLKALFLPKRLSIIHCPGHQKGNRAEARGNRMADQAAREVATRETPETSTLLAGKRTADGSEFEKRTADGSEFESPKKKAKVE

SEQ ID NO: 6097 - protein, 2103 aa, synthetic construct
MPAAKRVKLDGGDKKYSIGLDIGTNSVGWAVITDEYKVPSKKFKVLGNTDRHSIKKNLIGALLFDSGETAEATRLKRTARRRYTRRKNRICYLQEIFSNEMAKVDDSFFHRLEESFLVEEDKKHERHPIFGNIVDEVAYHEKYPTIYHLRKKLVDSTDKADLRLIYLALAHMIKFRGHFLIEGDLNPDNSDVDKLFIQLVQTYNQLFEENPINASGVDAKAILSARLSKSRRLENLIAQLPGEKKNGLFGNLIALSLGLTPNFKSNFDLAEDAKLQLSKDTYDDDLDNLLAQIGDQYADLFLAAKNLSDAILLSDILRVNTEITKAPLSASMIKRYDEHHQDLTLLKALVRQQLPEKYKEIFFDQSKNGYAGYIDGGASQEEFYKFIKPILEKMDGTEELLVKLNREDLLRKQRTFDNGSIPHQIHLGELHAILRRQEDFYPFLKDNREKIEKILTFRIPYYVGPLARGNSRFAWMTRKSEETITPWNFEEVVDKGASAQSFIERMTNFDKNLPNEKVLPKHSLLYEYFTVYNELTKVKYVTEGMRKPAFLSGEQKKAIVDLLFKTNRKVTVKQLKEDYFKKIECFDSVEISGVEDRFNASLGTYHDLLKIIKDKDFLDNEENEDILEDIVLTLTLFEDREMIEERLKTYAHLFDDKVMKQLKRRRYTGWGRLSRKLINGIRDKQSGKTILDFLKSDGFANRNFMQLIHDDSLTFKEDIQKAQVSGQGDSLHEHIANLAGSPAIKKGILQTVKVVDELVKVMGRHKPENIVIEMARENQTTQKGQKNSRERMKRIEEGIKELGSQILKEHPVENTQLQNEKLYLYYLQNGRDMYVDQELDINRLSDYDVDHIVPQSFLKDDSIDNKVLTRSDKARGKSDNVPSEEVVKKMKNYWRQLLNAKLITQRKFDNLTKAERGGLSELDKAGFIKRQLVETRQITKHVAQILDSRMNTKYDENDKLIREVKVITLKSKLVSDFRKDFQFYKVREINNYHHAHDAYLNAVVGTALIKKYPKLESEFVYGDYKVYDVRKMIAKSEQEIGKATAKYFFYSNIMNFFKTEITLANGEIRKRPLIETNGETGEIVWDKGRDFATVRKVLSMPQVNIVKKTEVQTGGFSKESILPKRNSDKLIARKKDWDPKKYGGFDSPTVAYSVLVVAKVEKGKSKKLKSVKELLGITIMERSSFEKNPIDFLEAKGYKEVKKDLIIKLPKYSLFELENGRKRMLASAGELQKGNELALPSKYVNFLYLASHYEKLKGSPEDNEQKQLFVEQHKHYLDEIIEQISEFSKRVILADANLDKVLSAYNKHRDKPIREQAENIIHLFTLTNLGAPAAFKYFDTTIDRKRYTSTKEVLDATLIHQSITGLYETRIDLSQLGGDGGGGSGGSGGSGGSGGSGGSGGTLNIEDEHRLHETSKEPDVSLGSTWLSDFPQAWAETGGMGLAVRQAPLIIPLKATSTPVSIKQYPMSQEARLGIKPHIQRLLDQGILVPCQSPWNTPLLPVKKPGTNDYRPVQDLREVNKRVEDIHPTVPNPYNLLSGLPPSHQWYTVLDLKDAFFCLRLHPTSQPLFAFEWRDPEMGISGQLTWTRLPQGFKNSPTLFDEALHRDLADFRIQHPDLILLQYVDDLLLAATSELDCQQGTRALLQTLGNLGYRASAKKAQICQKQVKYLGYLLKEGQRWLTEARKETVMGQPTPKTPRQLREFLGTAGFCRLWIPGFAEMAAPLYPLTKTGTLFNWGPDQQKAYQEIKQALLTAPALGLPDLTKPFELFVDEKQGYAKGVLTQKLGPWRRPVAYLSKKLDPVAAGWPPCLRMVAAIAVLTKDAGKLTMGQPLVILAPHAVEALVKQPPDRWLSNARMTHYQALLLDTDRVQFGPVVALNPATLLPLPEEGLQHNCLDILAEAHGTRPDLTDQPLPDADHTWYTDGSSLLQEGQRKAGAAVTTETEVIWAKALPAGTSAQRAELIALTQALKMAEGKKLNVYTDSRYAFATAHIHGEIYRRRGLLTSEGKEIKNKDEILALLKALFLPKRLSIIHCPGHQKGHSAEARGNRMADQAARKAAITETPDTSTLLAGKRTADGSEFEKRTADGSEFESPKKKAKVE

SEQ ID NO: 6098 - protein, 2103 aa, synthetic construct
MPAAKRVKLDGGDKKYSIGLDIGTNSVGWAVITDEYKVPSKKFKVLGNTDRHSIKKNLIGALLFDSGETAEATRLKRTARRRYTRRKNRICYLQEIFSNEMAKVDDSFFHRLEESFLVEEDKKHERHPIFGNIVDEVAYHEKYPTIYHLRKKLVDSTDKADLRLIYLALAHMIKFRGHFLIEGDLNPDNSDVDKLFIQLVQTYNQLFEENPINASGVDAKAILSARLSKSRRLENLIAQLPGEKKNGLFGNLIALSLGLTPNFKSNFDLAEDAKLQLSKDTYDDDLDNLLAQIGDQYADLFLAAKNLSDAILLSDILRVNTEITKAPLSASMIKRYDEHHQDLTLLKALVRQQLPEKYKEIFFDQSKNGYAGYIDGGASQEEFYKFIKPILEKMDGTEELLVKLNREDLLRKQRTFDNGSIPHQIHLGELHAILRRQEDFYPFLKDNREKIEKILTFRIPYYVGPLARGNSRFAWMTRKSEETITPWNFEEVVDKGASAQSFIERMTNFDKNLPNEKVLPKHSLLYEYFTVYNELTKVKYVTEGMRKPAFLSGEQKKAIVDLLFKTNRKVTVKQLKEDYFKKIECFDSVEISGVEDRFNASLGTYHDLLKIIKDKDFLDNEENEDILEDIVLTLTLFEDREMIEERLKTYAHLFDDKVMKQLKRRRYTGWGRLSRKLINGIRDKQSGKTILDFLKSDGFANRNFMQLIHDDSLTFKEDIQKAQVSGQGDSLHEHIANLAGSPAIKKGILQTVKVVDELVKVMGRHKPENIVIEMARENQTTQKGQKNSRERMKRIEEGIKELGSQILKEHPVENTQLQNEKLYLYYLQNGRDMYVDQELDINRLSDYDVDHIVPQSFLKDDSIDNKVLTRSDKARGKSDNVPSEEVVKKMKNYWRQLLNAKLITQRKFDNLTKAERGGLSELDKAGFIKRQLVETRQITKHVAQILDSRMNTKYDENDKLIREVKVITLKSKLVSDFRKDFQFYKVREINNYHHAHDAYLNAVVGTALIKKYPKLESEFVYGDYKVYDVRKMIAKSEQEIGKATAKYFFYSNIMNFFKTEITLANGEIRKRPLIETNGETGEIVWDKGRDFATVRKVLSMPQVNIVKKTEVQTGGFSKESILPKRNSDKLIARKKDWDPKKYGGFDSPTVAYSVLVVAKVEKGKSKKLKSVKELLGITIMERSSFEKNPIDFLEAKGYKEVKKDLIIKLPKYSLFELENGRKRMLASAGELQKGNELALPSKYVNFLYLASHYEKLKGSPEDNEQKQLFVEQHKHYLDEIIEQISEFSKRVILADANLDKVLSAYNKHRDKPIREQAENIIHLFTLTNLGAPAAFKYFDTTIDRKRYTSTKEVLDATLIHQSITGLYETRIDLSQLGGDGGGGSGGSGGSGGSGGSGGSGGTLNIEDEHRLHETSKEPDVSLGSTWLSDFPQAWAETGGMGLAVRQAPLIIPLKATSTPVSIKQYPMSQEARLGIKPHIQRLLDQGILVPCQSPWNTPLLPVKKPGTNDYRPVQDLREVNKRVEDIHPTVPNPYNLLSGLPPSHQWYTVLDLKDAFFCLRLHPTSQPLFAFEWRDPEMGISGQLTWTRLPQGFKNSPTLFNEALHRDLADFRIQHPDLILLQYVDDLLLAATSELDCQQGTRALLQTLGNLGYRASAKKAQICQKQVKYLGYLLKEGQRWLTEARKETVMGQPTPKTPRQLREFLGTAGFCRLWIPGFAEMAAPLYPLTKPGTLFNWGPDQQKAYQEIKQALLTAPALGLPDLTKPFELFVDEKQGYAKGVLTQKLGPWRRPVAYLSKKLDPVAAGWPPCLRMVAAIAVLTKDAGKLTMGQPLVILAPHAVEALVKQPPDRWLSNARMTHYQALLLDTDRVQFGPVVALNPATLLPLPEEGLQHNCLDILAEAHGTRPDLTDQPLPDADHTWYTDGSSLLQEGQRKAGAAVTTETEVIWAKALPAGTSAQRAELIALTQALKMAEGKKLNVYTDSRYAFATAHIHGEIYRRRGWLTSEGKEIKNKDEILALLKALFLPKRLSIIHCPGHQKGHSAEARGNRMADQAARKAAITETPDTSTLLAGKRTADGSEFEKRTADGSEFESPKKKAKVE

SEQ ID NO: 6099 - protein, 2103 aa, synthetic construct; identical to SEQ ID NO: 6098

SEQ ID NO: 6100 - protein, 2017 aa, synthetic construct
MPAAKRVKLDGGDKKYSIGLDIGTNSVGWAVITDEYKVPSKKFKVLGNTDRHSIKKNLIGALLFDSGETAEATRLKRTARRRYTRRKNRICYLQEIFSNEMAKVDDSFFHRLEESFLVEEDKKHERHPIFGNIVDEVAYHEKYPTIYHLRKKLVDSTDKADLRLIYLALAHMIKFRGHFLIEGDLNPDNSDVDKLFIQLVQTYNQLFEENPINASGVDAKAILSARLSKSRRLENLIAQLPGEKKNGLFGNLIALSLGLTPNFKSNFDLAEDAKLQLSKDTYDDDLDNLLAQIGDQYADLFLAAKNLSDAILLSDILRVNTEITKAPLSASMIKRYDEHHQDLTLLKALVRQQLPEKYKEIFFDQSKNGYAGYIDGGASQEEFYKFIKPILEKMDGTEELLVKLNREDLLRKQRTFDNGSIPHQIHLGELHAILRRQEDFYPFLKDNREKIEKILTFRIPYYVGPLARGNSRFAWMTRKSEETITPWNFEEVVDKGASAQSFIERMTNFDKNLPNEKVLPKHSLLYEYFTVYNELTKVKYVTEGMRKPAFLSGEQKKAIVDLLFKTNRKVTVKQLKEDYFKKIECFDSVEISGVEDRFNASLGTYHDLLKIIKDKDFLDNEENEDILEDIVLTLTLFEDREMIEERLKTYAHLFDDKVMKQLKRRRYTGWGRLSRKLINGIRDKQSGKTILDFLKSDGFANRNFMQLIHDDSLTFKEDIQKAQVSGQGDSLHEHIANLAGSPAIKKGILQTVKVVDELVKVMGRHKPENIVIEMARENQTTQKGQKNSRERMKRIEEGIKELGSQILKEHPVENTQLQNEKLYLYYLQNGRDMYVDQELDINRLSDYDVDHIVPQSFLKDDSIDNKVLTRSDKARGKSDNVPSEEVVKKMKNYWRQLLNAKLITQRKFDNLTKAERGGLSELDKAGFIKRQLVETRQITKHVAQILDSRMNTKYDENDKLIREVKVITLKSKLVSDFRKDFQFYKVREINNYHHAHDAYLNAVVGTALIKKYPKLESEFVYGDYKVYDVRKMIAKSEQEIGKATAKYFFYSNIMNFFKTEITLANGEIRKRPLIETNGETGEIVWDKGRDFATVRKVLSMPQVNIVKKTEVQTGGFSKESILPKRNSDKLIARKKDWDPKKYGGFDSPTVAYSVLVVAKVEKGKSKKLKSVKELLGITIMERSSFEKNPIDFLEAKGYKEVKKDLIIKLPKYSLFELENGRKRMLASAGELQKGNELALPSKYVNFLYLASHYEKLKGSPEDNEQKQLFVEQHKHYLDEIIEQISEFSKRVILADANLDKVLSAYNKHRDKPIREQAENIIHLFTLTNLGAPAAFKYFDTTIDRKRYTSTKEVLDATLIHQSITGLYETRIDLSQLGGDGGGGSGGSGGSGGSGGSGGSGGLTAAIDILAPQQCAEPITWKSDEPVWVDQWPLTNDKLAAAQQLVQEQLEAGHITESSSPWNTPIFVIKKKSGKWRLLQDLRAVNATMVLMGALQPGLPSPVAPPQGYLKIIIDLKDCFFSIPLHPSDQKRFAFSLPSTNFKEPMQRFQWKVLPQGMANSPTLCQKYVATAIHKVRHAWKQMYIIHYMDDILIAGKDGQQVLQCFDQLKQELTAAGLHIAPEKVQLQDPYTYLGFELNGPKITNQKAVIRKDKLQTLNDFQKLLGDINWLRPYLKLTTGDLKPLFDTLKPDSDPNSHRSLSKEALASLEKVETAIAEQFVTHINYSLPLIFLIFNTALTPTGLFWQDNPIMWIHLPASPKKVLLPYYDAIADLIILGRDHSKKYFGIEPSTIIQPYSKSQIDWLMQNTEMWPIACASFVGILDNHYPPNKLIQFCKLHTFVFPQIISKTPLNNALLVFTDGSSTGMAAYTLTDTTIKFQTNLNSAQLVELQALIAVLSAFPNQPLNIYTDSAYLAHSIPLLETVAQIKHISETAKLFLQCQQLIYNRSIPFYIGHVRAHSGLPGPIAQGNQRADLATKIVASNINTAGKRTADGSEFEKRTADGSEFESPKKKAKVE

SEQ ID NO: 6101 - protein, 2183 aa, synthetic construct
MPAAKRVKLDGGDKKYSIGLDIGTNSVGWAVITDEYKVPSKKFKVLGNTDRHSIKKNLIGALLFDSGETAEATRLKRTARRRYTRRKNRICYLQEIFSNEMAKVDDSFFHRLEESFLVEEDKKHERHPIFGNIVDEVAYHEKYPTIYHLRKKLVDSTDKADLRLIYLALAHMIKFRGHFLIEGDLNPDNSDVDKLFIQLVQTYNQLFEENPINASGVDAKAILSARLSKSRRLENLIAQLPGEKKNGLFGNLIALSLGLTPNFKSNFDLAEDAKLQLSKDTYDDDLDNLLAQIGDQYADLFLAAKNLSDAILLSDILRVNTEITKAPLSASMIKRYDEHHQDLTLLKALVRQQLPEKYKEIFFDQSKNGYAGYIDGGASQEEFYKFIKPILEKMDGTEELLVKLNREDLLRKQRTFDNGSIPHQIHLGELHAILRRQEDFYPFLKDNREKIEKILTFRIPYYVGPLARGNSRFAWMTRKSEETITPWNFEEVVDKGASAQSFIERMTNFDKNLPNEKVLPKHSLLYEYFTVYNELTKVKYVTEGMRKPAFLSGEQKKAIVDLLFKTNRKVTVKQLKEDYFKKIECFDSVEISGVEDRFNASLGTYHDLLKIIKDKDFLDNEENEDILEDIVLTLTLFEDREMIEERLKTYAHLFDDKVMKQLKRRRYTGWGRLSRKLINGIRDKQSGKTILDFLKSDGFANRNFMQLIHDDSLTFKEDIQKAQVSGQGDSLHEHIANLAGSPAIKKGILQTVKVVDELVKVMGRHKPENIVIEMARENQTTQKGQKNSRERMKRIEEGIKELGSQILKEHPVENTQLQNEKLYLYYLQNGRDMYVDQELDINRLSDYDVDHIVPQSFLKDDSIDNKVLTRSDKARGKSDNVPSEEVVKKMKNYWRQLLNAKLITQRKFDNLTKAERGGLSELDKAGFIKRQLVETRQITKHVAQILDSRMNTKYDENDKLIREVKVITLKSKLVSDFRKDFQFYKVREINNYHHAHDAYLNAVVGTALIKKYPKLESEFVYGDYKVYDVRKMIAKSEQEIGKATAKYFFYSNIMNFFKTEITLANGEIRKRPLIETNGETGEIVWDKGRDFATVRKVLSMPQVNIVKKTEVQTGGFSKESILPKRNSDKLIARKKDWDPKKYGGFDSPTVAYSVLVVAKVEKGKSKKLKSVKELLGITIMERSSFEKNPIDFLEAKGYKEVKKDLIIKLPKYSLFELENGRKRMLASAGELQKGNELALPSKYVNFLYLASHYEKLKGSPEDNEQKQLFVEQHKHYLDEIIEQISEFSKRVILADANLDKVLSAYNKHRDKPIREQAENIIHLFTLTNLGAPAAFKYFDTTIDRKRYTSTKEVLDATLIHQSITGLYETRIDLSQLGGDGGGGSGGSGGSGGSGGSGGSGGMDPLQLLQPLEAEIKGTKLKAHWNSGATITCVPQAFLEEEVPIKNIWIKTIHGEKEQPVYYLTFKIQGRKVEAEVISSPYDYILVSPSDIPWLMKKPLQLTTLVPLQEYEERLLKQTMLTGSYKEKLQSLFLKYDALWQHWENQVGHRRIKPHHIATGTVNPRPQKQYPINPKAKASIQTVINDLLKQGVLIQQNSIMNTPVYPVPKPDGKWRMVLDYREVNKTIPLIAAQNQHSAGILSSIFRGKYKTTLDLSNGFWAHSITPESYWLTAFTWLGQQYCWTRLPQGFLNSPALFTADVVDLLKEVPNVQVYVDDIYISHDDPREHLEQLEKVFSLLLNAGYVVSLKKSEIAQHEVEFLGFNITKEGRGLTETFKQKLLNITPPRDLKQLQSILGLLNFARNFIPNFSELVKPLYNIIATANGKYITWTTDNSQQLQNIISMLNSAENLEERNPEVRLIMKVNTSPSAGYIRFYNEFAKRPIMYLNYVYTKAEVKFTNTEKLLTTIHKGLIKALDLGMGQEILVYSPIVSMTKIQKTPLPERKALPIRWITWMSYLEDPRIQFHYDKTLPELQQVPTVTDDIIAKIKHPSEFSMVFYTDGSAIKHPNVNKSHNAGMGIAQVQFKPEFTVINTWSIPLGDHTAQLAEVAAVEFACKKALKIDGPVLIVTDSFYVAESVNKELPYWQSNGFFNNKKKPLKHVSKWKSIADCIQLKPDIIIIHEKGHQPTASTFHTEGNNLADKLATQGSYVVNAGKRTADGSEFEKRTADGSEFESPKKKAKVE

SEQ ID NO: 6102 - protein, 2094 aa, synthetic construct
MPAAKRVKLDGGDKKYSIGLDIGTNSVGWAVITDEYKVPSKKFKVLGNTDRHSIKKNLIGALLFDSGETAEATRLKRTARRRYTRRKNRICYLQEIFSNEMAKVDDSFFHRLEESFLVEEDKKHERHPIFGNIVDEVAYHEKYPTIYHLRKKLVDSTDKADLRLIYLALAHMIKFRGHFLIEGDLNPDNSDVDKLFIQLVQTYNQLFEENPINASGVDAKAILSARLSKSRRLENLIAQLPGEKKNGLFGNLIALSLGLTPNFKSNFDLAEDAKLQLSKDTYDDDLDNLLAQIGDQYADLFLAAKNLSDAILLSDILRVNTEITKAPLSASMIKRYDEHHQDLTLLKALVRQQLPEKYKEIFFDQSKNGYAGYIDGGASQEEFYKFIKPILEKMDGTEELLVKLNREDLLRKQRTFDNGSIPHQIHLGELHAILRRQEDFYPFLKDNREKIEKILTFRIPYYVGPLARGNSRFAWMTRKSEETITPWNFEEVVDKGASAQSFIERMTNFDKNLPNEKVLPKHSLLYEYFTVYNELTKVKYVTEGMRKPAFLSGEQKKAIVDLLFKTNRKVTVKQLKEDYFKKIECFDSVEISGVEDRFNASLGTYHDLLKIIKDKDFLDNEENEDILEDIVLTLTLFEDREMIEERLKTYAHLFDDKVMKQLKRRRYTGWGRLSRKLINGIRDKQSGKTILDFLKSDGFANRNFMQLIHDDSLTFKEDIQKAQVSGQGDSLHEHIANLAGSPAIKKGILQTVKVVDELVKVMGRHKPENIVIEMARENQTTQKGQKNSRERMKRIEEGIKELGSQILKEHPVENTQLQNEKLYLYYLQNGRDMYVDQELDINRLSDYDVDHIVPQSFLKDDSIDNKVLTRSDKARGKSDNVPSEEVVKKMKNYWRQLLNAKLITQRKFDNLTKAERGGLSELDKAGFIKRQLVETRQITKHVAQILDSRMNTKYDENDKLIREVKVITLKSKLVSDFRKDFQFYKVREINNYHHAHDAYLNAVVGTALIKKYPKLESEFVYGDYKVYDVRKMIAKSEQEIGKATAKYFFYSNIMNFFKTEITLANGEIRKRPLIETNGETGEIVWDKGRDFATVRKVLSMPQVNIVKKTEVQTGGFSKESILPKRNSDKLIARKKDWDPKKYGGFDSPTVAYSVLVVAKVEKGKSKKLKSVKELLGITIMERSSFEKNPIDFLEAKGYKEVKKDLIIKLPKYSLFELENGRKRMLASAGELQKGNELALPSKYVNFLYLASHYEKLKGSPEDNEQKQLFVEQHKHYLDEIIEQISEFSKRVILADANLDKVLSAYNKHRDKPIREQAENIIHLFTLTNLGAPAAFKYFDTTIDRKRYTSTKEVLDATLIHQSITGLYETRIDLSQLGGDGGGGSGGSGGSGGSGGSGGSGGIPWLMKKPLQLTTLVPLQEYEERLLKQTMLTGSYKEKLQSLFLKYDALWQHWENQVGHRRIKPHHIATGTVNPRPQKQYPINPKAKASIQTVINDLLKQGVLIQQNSIMNTPVYPVPKPDGKWRMVLDYREVNKTIPLIAAQNQHSAGILSSIFRGKYKTTLDLSNGFWAHSITPESYWLTAFTWLGQQYCWTRLPQGFLNSPALFNADVVDLLKEVPNVQVYVDDIYISHDDPREHLEQLEKVFSLLLNAGYVVSLKKSEIAQHEVEFLGFNITKEGRGLTETFKQKLLNITPPRDLKQLQSILGLLNFARNFIPNFSELVKPLYNIIATAPGKYITWTTDNSQQLQNIISMLNSAENLEERNPEVRLIMKVNTSPSAGYIRFYNEFAKRPIMYLNYVYTKAEVKFTNTEKLLTTIHKGLIKALDLGMGQEILVYSPIVSMTKIQKTPLPERKALPIRWITWMSYLEDPRIQFHYDKTLPELQQVPTVTDDIIAKIKHPSEFSMVFYTDGSAIKHPNVNKSHNAGMGIAQVQFKPEFTVINTWSIPLGDHTAQLAEVAAVEFACKKALKIDGPVLIVTDSFYVAESVNKELPYWQSNGFFNNKKKPLKHVSKWKSIADCIQLKPDIIIIHEKGHQPTASTFHTEGNNLADKLATQGSYVVNAGKRTADGSEFEKRTADGSEFESPKKKAKVE

SEQ ID NO: 6103 - protein, 2094 aa, synthetic construct
MPAAKRVKLDGGDKKYSIGLDIGTNSVGWAVITDEYKVPSKKFKVLGNTDRHSIKKNLIGALLFDSGETAEATRLKRTARRRYTRRKNRICYLQEIFSNEMAKVDDSFFHRLEESFLVEEDKKHERHPIFGNIVDEVAYHEKYPTIYHLRKKLVDSTDKADLRLIYLALAHMIKFRGHFLIEGDLNPDNSDVDKLFIQLVQTYNQLFEENPINASGVDAKAILSARLSKSRRLENLIAQLPGEKKNGLFGNLIALSLGLTPNFKSNFDLAEDAKLQLSKDTYDDDLDNLLAQIGDQYADLFLAAKNLSDAILLSDILRVNTEITKAPLSASMIKRYDEHHQDLTLLKALVRQQLPEKYKEIFFDQSKNGYAGYIDGGASQEEFYKFIKPILEKMDGTEELLVKLNREDLLRKQRTFDNGSIPHQIHLGELHAILRRQEDFYPFLKDNREKIEKILTFRIPYYVGPLARGNSRFAWMTRKSEETITPWNFEEVVDKGASAQSFIERMTNFDKNLPNEKVLPKHSLLYEYFTVYNELTKVKYVTEGMRKPAFLSGEQKKAIVDLLFKTNRKVTVKQLKEDYFKKIECFDSVEISGVEDRFNASLGTYHDLLKIIKDKDFLDNEENEDILEDIVLTLTLFEDREMIEERLKTYAHLFDDKVMKQLKRRRYTGWGRLSRKLINGIRDKQSGKTILDFLKSDGFANRNFMQLIHDDSLTFKEDIQKAQVSGQGDSLHEHIANLAGSPAIKKGILQTVKVVDELVKVMGRHKPENIVIEMARENQTTQKGQKNSRERMKRIEEGIKELGSQILKEHPVENTQLQNEKLYLYYLQNGRDMYVDQELDINRLSDYDVDHIVPQSFLKDDSIDNKVLTRSDKARGKSDNVPSEEVVKKMKNYWRQLLNAKLITQRKFDNLTKAERGGLSELDKAGFIKRQLVETRQITKHVAQILDSRMNTKYDENDKLIREVKVITLKSKLVSDFRKDFQFYKVREINNYHHAHDAYLNAVVGTALIKKYPKLESEFVYGDYKVYDVRKMIAKSEQEIGKATAKYFFYSNIMNFFKTEITLANGEIRKRPLIETNGETGEIVWDKGRDFATVRKVLSMPQVNIVKKTEVQTGGFSKESILPKRNSDKLIARKKDWDPKKYGGFDSPTVAYSVLVVAKVEKGKSKKLKSVKELLGITIMERSSFEKNPIDFLEAKGYKEVKKDLIIKLPKYSLFELENGRKRMLASAGELQKGNELALPSKYVNFLYLASHYEKLKGSPEDNEQKQLFVEQHKHYLDEIIEQISEFSKRVILADANLDKVLSAYNKHRDKPIREQAENIIHLFTLTNLGAPAAFKYFDTTIDRKRYTSTKEVLDATLIHQSITGLYETRIDLSQLGGDGGGGSGGSGGSGGSGGSGGSGGIPWLMKKPLQLTTLVPLQEYEERLLKQTMLTGSYKEKLQSLFLKYDALWQHWENQVGHRRIKPHHIATGTVNPRPQKQYPINPKAKASIQTVINDLLKQGVLIQQNSIMNTPVYPVPKPDGKWRMVLDYREVNKTIPLIAAQNQHSAGILSSIFRGKYKTTLDLSNGFWAHSITPESYWLTAFTWLGQQYCWTRLPQGFLNSPALFNADVVDLLKEVPNVQVYVDDIYISHDDPREHLEQLEKVFSLLLNAGYVVSLKKSEIAQHEVEFLGFNITKEGRGLTETFKQKLLNITPPRDLKQLQSILGKLNFARNFIPNFSELVKPLYNIIATAPGKYITWTTDNSQQLQNIISMLNSAENLEERNPEVRLIMKVNTSPSAGYIRFYNEFAKRPIMYLNYVYTKAEVKFTNTEKLLTTIHKGLIKALDLGMGQEILVYSPIVSMTKIQKTPLPERKALPIRWITWMSYLEDPRIQFHYDKTLPELQQVPTVTDDIIAKIKHPSEFSMVFYTDGSAIKHPNVNKSHNAGMGIAQVQFKPEFTVINTWSIPLGDHTAQLAEVAAVEFACKKALKIDGPVLIVTDSFYVAESVNKELPYWQSNGFFNNKKKPLKHVSKWKSIADCIQLKPDIIIIHEKGHQPTASTFHTEGNNLADKLATQGSYVVNAGKRTADGSEFEKRTADGSEFESPKKKAKVE

SEQ ID NO: 6104 - protein, 2024 aa, synthetic construct
MPAAKRVKLDGGDKKYSIGLDIGTNSVGWAVITDEYKVPSKKFKVLGNTDRHSIKKNLIGALLFDSGETAEATRLKRTARRRYTRRKNRICYLQEIFSNEMAKVDDSFFHRLEESFLVEEDKKHERHPIFGNIVDEVAYHEKYPTIYHLRKKLVDSTDKADLRLIYLALAHMIKFRGHFLIEGDLNPDNSDVDKLFIQLVQTYNQLFEENPINASGVDAKAILSARLSKSRRLENLIAQLPGEKKNGLFGNLIALSLGLTPNFKSNFDLAEDAKLQLSKDTYDDDLDNLLAQIGDQYADLFLAAKNLSDAILLSDILRVNTEITKAPLSASMIKRYDEHHQDLTLLKALVRQQLPEKYKEIFFDQSKNGYAGYIDGGASQEEFYKFIKPILEKMDGTEELLVKLNREDLLRKQRTFDNGSIPHQIHLGELHAILRRQEDFYPFLKDNREKIEKILTFRIPYYVGPLARGNSRFAWMTRKSEETITPWNFEEVVDKGASAQSFIERMTNFDKNLPNEKVLPKHSLLYEYFTVYNELTKVKYVTEGMRKPAFLSGEQKKAIVDLLFKTNRKVTVKQLKEDYFKKIECFDSVEISGVEDRFNASLGTYHDLLKIIKDKDFLDNEENEDILEDIVLTLTLFEDREMIEERLKTYAHLFDDKVMKQLKRRRYTGWGRLSRKLINGIRDKQSGKTILDFLKSDGFANRNFMQLIHDDSLTFKEDIQKAQVSGQGDSLHEHIANLAGSPAIKKGILQTVKVVDELVKVMGRHKPENIVIEMARENQTTQKGQKNSRERMKRIEEGIKELGSQILKEHPVENTQLQNEKLYLYYLQNGRDMYVDQELDINRLSDYDVDHIVPQSFLKDDSIDNKVLTRSDKARGKSDNVPSEEVVKKMKNYWRQLLNAKLITQRKFDNLTKAERGGLSELDKAGFIKRQLVETRQITKHVAQILDSRMNTKYDENDKLIREVKVITLKSKLVSDFRKDFQFYKVREINNYHHAHDAYLNAVVGTALIKKYPKLESEFVYGDYKVYDVRKMIAKSEQEIGKATAKYFFYSNIMNFFKTEITLANGEIRKRPLIETNGETGEIVWDKGRDFATVRKVLSMPQVNIVKKTEVQTGGFSKESILPKRNSDKLIARKKDWDPKKYGGFDSPTVAYSVLVVAKVEKGKSKKLKSVKELLGITIMERSSFEKNPIDFLEAKGYKEVKKDLIIKLPKYSLFELENGRKRMLASAGELQKGNELALPSKYVNFLYLASHYEKLKGSPEDNEQKQLFVEQHKHYLDEIIEQISEFSKRVILADANLDKVLSAYNKHRDKPIREQAENIIHLFTLTNLGAPAAFKYFDTTIDRKRYTSTKEVLDATLIHQSITGLYETRIDLSQLGGDGGGGSGGSGGSGGSGGSGGSGGPRSRAIDIPVPHADKISWKITDPVWVDQWPLTYEKTLAAIALVQEQLAAGHIEPTNSPWNTPIFIIKKKSGSWRLLQDLRAVNKVMVPMGALQPGLPSPVAIPLNYHKIVIDLKDCFFTIPLHPEDRPYFAFSVPQINFQSPMPRYQWKVLPQGMANSPTLCQKFVAAAIAPVRSQWPEAYILHYMDDILLACDSAEAAKACYAHIISCLTSYGLKIAPDKVQVSEPFSYLGFELHHQQVFTPRVCLKTDHLKTLNDFQKLLGDIQWLRPYLKLPTSALVPLNNILKGDPNPLSVRALTPEAKQSLALINKAIQNQSVQQISYNLPLVLLLLPTPHTPTAVFWQPNGTDPTKNGSPLLWLHLPASPSKVLLTYPSLLAMLIIKGRYTGRQLFGRDPHSIIIPYTQDQLTWLLQTSDEWAIALSSFTGDIDNHYPSDPVIQFAKLHQFIFPKITKCAPIPQATLVFTDGSSNGIAAYVIDNQPISIKSPYLSAQLVELYAILQVFTVLAHQPFNLYTDSAYIAQSVPLLETVPFIKSSTNATPLFSKLQQLILNRQHPFFIGHLRAHLNLPGPLAEGNALADAATQIFPIISDAGKRTADGSEFEKRTADGSEFESPKKKAKVE

SEQ ID NO: 6105 - protein, 2101 aa, synthetic construct
MPAAKRVKLDGGDKKYSIGLDIGTNSVGWAVITDEYKVPSKKFKVLGNTDRHSIKKNLIGALLFDSGETAEATRLKRTARRRYTRRKNRICYLQEIFSNEMAKVDDSFFHRLEESFLVEEDKKHERHPIFGNIVDEVAYHEKYPTIYHLRKKLVDSTDKADLRLIYLALAHMIKFRGHFLIEGDLNPDNSDVDKLFIQLVQTYNQLFEENPINASGVDAKAILSARLSKSRRLENLIAQLPGEKKNGLFGNLIALSLGLTPNFKSNFDLAEDAKLQLSKDTYDDDLDNLLAQIGDQYADLFLAAKNLSDAILLSDILRVNTEITKAPLSASMIKRYDEHHQDLTLLKALVRQQLPEKYKEIFFDQSKNGYAGYIDGGASQEEFYKFIKPILEKMDGTEELLVKLNREDLLRKQRTFDNGSIPHQIHLGELHAILRRQEDFYPFLKDNREKIEKILTFRIPYYVGPLARGNSRFAWMTRKSEETITPWNFEEVVDKGASAQSFIERMTNFDKNLPNEKVLPKHSLLYEYFTVYNELTKVKYVTEGMRKPAFLSGEQKKAIVDLLFKTNRKVTVKQLKEDYFKKIECFDSVEISGVEDRFNASLGTYHDLLKIIKDKDFLDNEENEDILEDIVLTLTLFEDREMIEERLKTYAHLFDDKVMKQLKRRRYTGWGRLSRKLINGIRDKQSGKTILDFLKSDGFANRNFMQLIHDDSLTFKEDIQKAQVSGQGDSLHEHIANLAGSPAIKKGILQTVKVVDELVKVMGRHKPENIVIEMARENQTTQKGQKNSRERMKRIEEGIKELGSQILKEHPVENTQLQNEKLYLYYLQNGRDMYVDQELDINRLSDYDVDHIVPQSFLKDDSIDNKVLTRSDKARGKSDNVPSEEVVKKMKNYWRQLLNAKLITQRKFDNLTKAERGGLSELDKAGFIKRQLVETRQITKHVAQILDSRMNTKYDENDKLIREVKVITLKSKLVSDFRKDFQFYKVREINNYHHAHDAYLNAVVGTALIKKYPKLESEFVYGDYKVYDVRKMIAKSEQEIGKATAKYFFYSNIMNFFKTEITLANGEIRKRPLIETNGETGEIVWDKGRDFATVRKVLSMPQVNIVKKTEVQTGGFSKESILPKRNSDKLIARKKDWDPKKYGGFDSPTVAYSVLVVAKVEKGKSKKLKSVKELLGITIMERSSFEKNPIDFLEAKGYKEVKKDLIIKLPKYSLFELENGRKRMLASAGELQKGNELALPSKYVNFLYLASHYEKLKGSPEDNEQKQLFVEQHKHYLDEIIEQISEFSKRVILADANLDKVLSAYNKHRDKPIREQAENIIHLFTLTNLGAPAAFKYFDTTIDRKRYTSTKEVLDATLIHQSITGLYETRIDLSQLGGDGGGGSGGSGGSGGSGGSGGSGGVLNLEEEYRLHEKPVPSSIDPSWLQLFPTVWAERAGMGLANQVPPVVVELRSGASPVAVRQYPMSKEAREGIRPHIQRFLDLGVLVPCQSPWNTPLLPVKKPGTNDYRPVQDLREINKRVQDIHPTVPNPYNLLSSLPPSHTWYSVLDLKDAFFCLKLHPNSQPLFAFEWRDPEKGNTGQLTWTRLPQGFKNSPTLFDEALHRDLAPFRALNPQVVLLQYVDDLLVAAPTYRDCKEGTQKLLQELSKLGYRVSAKKAQLCQKEVTYLGYLLKEGKRWLTPARKATVMKIPPPTTPRQVREFLGTAGFCRLWIPGFASLAAPLYPLTKESIPFIWTEEHQKAFDRIKEALLSAPALALPDLTKPFTLYVDERAGVARGVLTQTLGPWRRPVAYLSKKLDPVASGWPTCLKAVAAVALLLKDADKLTLGQNVTVIASHSLESIVRQPPDRWMTNARMTHYQSLLLNERVSFAPPAVLNPATLLPVESEATPVHRCSEILAEETGTRRDLKDQPLPGVPAWYTDGSSFIAEGKRRAGAAIVDGKRTVWASSLPEGTSAQKAELVALTQALRLAEGKDINIYTDSRYAFATAHIHGAIYKQRGLLTSAGKDIKNKEEILALLEAIHLPKRVAIIHCPGHQKGNDPVATGNRRADEAAKQAALSTRVLAETTKPAGKRTADGSEFEKRTADGSEFESPKKKAKVE

SEQ ID NO: 6106 - protein, 2101 aa, synthetic construct
MPAAKRVKLDGGDKKYSIGLDIGTNSVGWAVITDEYKVPSKKFKVLGNTDRHSIKKNLIGALLFDSGETAEATRLKRTARRRYTRRKNRICYLQEIFSNEMAKVDDSFFHRLEESFLVEEDKKHERHPIFGNIVDEVAYHEKYPTIYHLRKKLVDSTDKADLRLIYLALAHMIKFRGHFLIEGDLNPDNSDVDKLFIQLVQTYNQLFEENPINASGVDAKAILSARLSKSRRLENLIAQLPGEKKNGLFGNLIALSLGLTPNFKSNFDLAEDAKLQLSKDTYDDDLDNLLAQIGDQYADLFLAAKNLSDAILLSDILRVNTEITKAPLSASMIKRYDEHHQDLTLLKALVRQQLPEKYKEIFFDQSKNGYAGYIDGGASQEEFYKFIKPILEKMDGTEELLVKLNREDLLRKQRTFDNGSIPHQIHLGELHAILRRQEDFYPFLKDNREKIEKILTFRIPYYVGPLARGNSRFAWMTRKSEETITPWNFEEVVDKGASAQSFIERMTNFDKNLPNEKVLPKHSLLYEYFTVYNELTKVKYVTEGMRKPAFLSGEQKKAIVDLLFKTNRKVTVKQLKEDYFKKIECFDSVEISGVEDRFNASLGTYHDLLKIIKDKDFLDNEENEDILEDIVLTLTLFEDREMIEERLKTYAHLFDDKVMKQLKRRRYTGWGRLSRKLINGIRDKQSGKTILDFLKSDGFANRNFMQLIHDDSLTFKEDIQKAQVSGQGDSLHEHIANLAGSPAIKKGILQTVKVVDELVKVMGRHKPENIVIEMARENQTTQKGQKNSRERMKRIEEGIKELGSQILKEHPVENTQLQNEKLYLYYLQNGRDMYVDQELDINRLSDYDVDHIVPQSFLKDDSIDNKVLTRSDKARGKSDNVPSEEVVKKMKNYWRQLLNAKLITQRKFDNLTKAERGGLSELDKAGFIKRQLVETRQITKHVAQILDSRMNTKYDENDKLIREVKVITLKSKLVSDFRKDFQFYKVREINNYHHAHDAYLNAVVGTALIKKYPKLESEFVYGDYKVYDVRKMIAKSEQEIGKATAKYFFYSNIMNFFKTEITLANGEIRKRPLIETNGETGEIVWDKGRDFATVRKVLSMPQVNIVKKTEVQTGGFSKESILPKRNSDKLIARKKDWDPKKYGGFDSPTVAYSVLVVAKVEKGKSKKLKSVKELLGITIMERSSFEKNPIDFLEAKGYKEVKKDLIIKLPKYSLFELENGRKRMLASAGELQKGNELALPSKYVNFLYLASHYEKLKGSPEDNEQKQLFVEQHKHYLDEIIEQISEFSKRVILADANLDKVLSAYNKHRDKPIREQAENIIHLFTLTNLGAPAAFKYFDTTIDRKRYTSTKEVLDATLIHQSITGLYETRIDLSQLGGDGGGGSGGSGGSGGSGGSGGSGGVLNLEEEYRLHEKPVPSSIDPSWLQLFPTVWAERAGMGLANQVPPVVVELRSGASPVAVRQYPMSKEAREGIRPHIQRFLDLGVLVPCQSPWNTPLLPVKKPGTNDYRPVQDLREINKRVQDIHPTVPNPYNLLSSLPPSHTWYSVLDLKDAFFCLKLHPNSQPLFAFEWRDPEKGNTGQLTWTRLPQGFKNSPTLFNEALHRDLAPFRALNPQVVLLQYVDDLLVAAPTYRDCKEGTQKLLQELSKLGYRVSAKKAQLCQKEVTYLGYLLKEGKRWLTPARKATVMKIPPPTTPRQVREFLGTAGFCRLWIPGFASLAAPLYPLTKPSIPFIWTEEHQKAFDRIKEALLSAPALALPDLTKPFTLYVDERAGVARGVLTQTLGPWRRPVAYLSKKLDPVASGWPTCLKAVAAVALLLKDADKLTLGQNVTVIASHSLESIVRQPPDRWMTNARMTHYQSLLLNERVSFAPPAVLNPATLLPVESEATPVHRCSEILAEETGTRRDLKDQPLPGVPAWYTDGSSFIAEGKRRAGAAIVDGKRTVWASSLPEGTSAQKAELVALTQALRLAEGKDINIYTDSRYAFATAHIHGAIYKQRGWLTSAGKDIKNKEEILALLEAIHLPKRVAIIHCPGHQKGNDPVATGNRRADEAAKQAALSTRVLAETTKPAGKRTADGSEFEKRTADGSEFESPKKKAKVE

SEQ ID NO: 6107 - protein, 2103 aa, synthetic construct
MPAAKRVKLDGGDKKYSIGLDIGTNSVGWAVITDEYKVPSKKFKVLGNTDRHSIKKNLIGALLFDSGETAEATRLKRTARRRYTRRKNRICYLQEIFSNEMAKVDDSFFHRLEESFLVEEDKKHERHPIFGNIVDEVAYHEKYPTIYHLRKKLVDSTDKADLRLIYLALAHMIKFRGHFLIEGDLNPDNSDVDKLFIQLVQTYNQLFEENPINASGVDAKAILSARLSKSRRLENLIAQLPGEKKNGLFGNLIALSLGLTPNFKSNFDLAEDAKLQLSKDTYDDDLDNLLAQIGDQYADLFLAAKNLSDAILLSDILRVNTEITKAPLSASMIKRYDEHHQDLTLLKALVRQQLPEKYKEIFFDQSKNGYAGYIDGGASQEEFYKFIKPILEKMDGTEELLVKLNREDLLRKQRTFDNGSIPHQIHLGELHAILRRQEDFYPFLKDNREKIEKILTFRIPYYVGPLARGNSRFAWMTRKSEETITPWNFEEVVDKGASAQSFIERMTNFDKNLPNEKVLPKHSLLYEYFTVYNELTKVKYVTEGMRKPAFLSGEQKKAIVDLLFKTNRKVTVKQLKEDYFKKIECFDSVEISGVEDRFNASLGTYHDLLKIIKDKDFLDNEENEDILEDIVLTLTLFEDREMIEERLKTYAHLFDDKVMKQLKRRRYTGWGRLSRKLINGIRDKQSGKTILDFLKSDGFANRNFMQLIHDDSLTFKEDIQKAQVSGQGDSLHEHIANLAGSPAIKKGILQTVKVVDELVKVMGRHKPENIVIEMARENQTTQKGQKNSRERMKRIEEGIKELGSQILKEHPVENTQLQNEKLYLYYLQNGRDMYVDQELDINRLSDYDVDHIVPQSFLKDDSIDNKVLTRSDKARGKSDNVPSEEVVKKMKNYWRQLLNAKLITQRKFDNLTKAERGGLSELDKAGFIKRQLVETRQITKHVAQILDSRMNTKYDENDKLIREVKVITLKSKLVSDFRKDFQFYKVREINNYHHAHDAYLNAVVGTALIKKYPKLESEFVYGDYKVYDVRKMIAKSEQEIGKATAKYFFYSNIMNFFKTEITLANGEIRKRPLIETNGETGEIVWDKGRDFATVRKVLSMPQVNIVKKTEVQTGGFSKESILPKRNSDKLIARKKDWDPKKYGGFDSPTVAYSVLVVAKVEKGKSKKLKSVKELLGITIMERSSFEKNPIDFLEAKGYKEVKKDLIIKLPKYSLFELENGRKRMLASAGELQKGNELALPSKYVNFLYLASHYEKLKGSPEDNEQKQLFVEQHKHYLDEIIEQISEFSKRVILADANLDKVLSAYNKHRDKPIREQAENIIHLFTLTNLGAPAAFKYFDTTIDRKRYTSTKEVLDATLIHQSITGLYETRIDLSQLGGDGGGGSGGSGGSGGSGGSGGSGGTLNIEDEYRLHETSKEPDVPLGSTWLSDFPQAWAETGGMGLAVRQAPLIIPLKATSTPVSIKQYPMSQEARLGIKPHIQRLLDQGILVPCQSPWNTPLLPVKKPGTNDYRPVQDLREVNKRVEDIHPTVPNPYNLLSGLPPSHQWYTVLDLKDAFFCLRLHPTSQPLFAFEWRDPEMGISGQLTWTRLPQGFKNSPTLFNEALHRDLADFRIQHPDLILLQYVDDLLLAATSEQDCQRGTRALLQTLGNLGYRASAKKAQICQKQVKYLGYLLKEGQRWLTEARKETVMGQPTPKTPRQLREFLGKAGFCRLFIPGFAEMAAPLYPLTKPGTLFNWGPDQQKAYQEIKQALLTAPALGLPDLTKPFELFVDEKQGYAKGVLTQKLGPWRRPVAYLSKKLDPVAAGWPPCLRMVAAIAVLTKDAGKLTMGQPLVILAPHAVEALVKQPPDRWLSNARMTHYQAMLLDTDRVQFGPVVALNPATLLPLPEKEAPHDCLEILAETHGTRPDLTDQPIPDADYTWYTDGSSFLQEGQRRAGAAVTTETEVIWARALPAGTSAQRAELIALTQALKMAEGKKLNVYTDSRYAFATAHVHGEIYRRRGWLTSEGREIKNKNEILALLKALFLPKRLSIIHCPGHQKGNSAEARGNRMADQAAREAAMKAVLETSTLLAGKRTADGSEFEKRTADGSEFESPKKKAKVE

SEQ ID NO: 6108 - protein, 2092 aa, synthetic construct
MPAAKRVKLDGGDKKYSIGLDIGTNSVGWAVITDEYKVPSKKFKVLGNTDRHSIKKNLIGALLFDSGETAEATRLKRTARRRYTRRKNRICYLQEIFSNEMAKVDDSFFHRLEESFLVEEDKKHERHPIFGNIVDEVAYHEKYPTIYHLRKKLVDSTDKADLRLIYLALAHMIKFRGHFLIEGDLNPDNSDVDKLFIQLVQTYNQLFEENPINASGVDAKAILSARLSKSRRLENLIAQLPGEKKNGLFGNLIALSLGLTPNFKSNFDLAEDAKLQLSKDTYDDDLDNLLAQIGDQYADLFLAAKNLSDAILLSDILRVNTEITKAPLSASMIKRYDEHHQDLTLLKALVRQQLPEKYKEIFFDQSKNGYAGYIDGGASQEEFYKFIKPILEKMDGTEELLVKLNREDLLRKQRTFDNGSIPHQIHLGELHAILRRQEDFYPFLKDNREKIEKILTFRIPYYVGPLARGNSRFAWMTRKSEETITPWNFEEVVDKGASAQSFIERMTNFDKNLPNEKVLPKHSLLYEYFTVYNELTKVKYVTEGMRKPAFLSGEQKKAIVDLLFKTNRKVTVKQLKEDYFKKIECFDSVEISGVEDRFNASLGTYHDLLKIIKDKDFLDNEENEDILEDIVLTLTLFEDREMIEERLKTYAHLFDDKVMKQLKRRRYTGWGRLSRKLINGIRDKQSGKTILDFLKSDGFANRNFMQLIHDDSLTFKEDIQKAQVSGQGDSLHEHIANLAGSPAIKKGILQTVKVVDELVKVMGRHKPENIVIEMARENQTTQKGQKNSRERMKRIEEGIKELGSQILKEHPVENTQLQNEKLYLYYLQNGRDMYVDQELDINRLSDYDVDHIVPQSFLKDDSIDNKVLTRSDKARGKSDNVPSEEVVKKMKNYWRQLLNAKLITQRKFDNLTKAERGGLSELDKAGFIKRQLVETRQITKHVAQILDSRMNTKYDENDKLIREVKVITLKSKLVSDFRKDFQFYKVREINNYHHAHDAYLNAVVGTALIKKYPKLESEFVYGDYKVYDVRKMIAKSEQEIGKATAKYFFYSNIMNFFKTEITLANGEIRKRPLIETNGETGEIVWDKGRDFATVRKVLSMPQVNIVKKTEVQTGGFSKESILPKRNSDKLIARKKDWDPKKYGGFDSPTVAYSVLVVAKVEKGKSKKLKSVKELLGITIMERSSFEKNPIDFLEAKGYKEVKKDLIIKLPKYSLFELENGRKRMLASAGELQKGNELALPSKYVNFLYLASHYEKLKGSPEDNEQKQLFVEQHKHYLDEIIEQISEFSKRVILADANLDKVLSAYNKHRDKPIREQAENIIHLFTLTNLGAPAAFKYFDTTIDRKRYTSTKEVLDATLIHQSITGLYETRIDLSQLGGDGGGGGGSGGTAPLEEEYRLFLEAPIQNVTLLEQWKREIPKVWAEINPPGLASTQAPIHVQLLSTALPVRVRQYPITLEAKRSLRETIRKFRAAGILRPVHSPWNTPLLPVRKSGTSEYRMVQDLREVNKRVETIHPTVPNPYTLLSLLPPDRIWYSVLDLKDAFFCIPLAPESQLIFAFEWADAEEGESGQLTWTRLPQGFKNSPTLFNEALNRDLQGFRLDHPSVSLLQYVDDLLIAADTQAACLSATRDLLMTLAELGYRVSGKKAQLCQEEVTYLGFKIHKGSRSLSNSRTQAILQIPVPKTKRQVREFLGKIGYCRLFIPGFAELAQPLYAATRPGNDPLVWGEKEEEAFQSLKLALTQPPALALPSLDKPFQLFVEETSGAAKGVLTQALGPWKRPVAYLSKRLDPVAAGWPRCLRAIAAAALLTREASKLTFGQDIEITSSHNLESLLRSPPDKWLTNARITQYQVLLLDPPRVRFKQTAALNPATLLPETDDTLPIHHCLDTLDSLTSTRPDLTDQPLAQAEATLFTDGSSYIRDGKRYAGAAVVTLDSVIWAEPLPIGTSAQKAELIALTKALEWSKDKSVNIYTDSRYAFATLHVHGMIYRERGWLTAGGKAIKNAPEILALLTAVWLPKRVAVMHCKGHQKDDAPTSTGNRRADEVAREVAIRPLSTQATISAGKRTADGSEFEKRTADGSEFESPKKKAKVE

SEQ ID NO: 6109 - protein, 2081 aa, synthetic construct
MPAAKRVKLDGGDKKYSIGLDIGTNSVGWAVITDEYKVPSKKFKVLGNTDRHSIKKNLIGALLFDSGETAEATRLKRTARRRYTRRKNRICYLQEIFSNEMAKVDDSFFHRLEESFLVEEDKKHERHPIFGNIVDEVAYHEKYPTIYHLRKKLVDSTDKADLRLIYLALAHMIKFRGHFLIEGDLNPDNSDVDKLFIQLVQTYNQLFEENPINASGVDAKAILSARLSKSRRLENLIAQLPGEKKNGLFGNLIALSLGLTPNFKSNFDLAEDAKLQLSKDTYDDDLDNLLAQIGDQYADLFLAAKNLSDAILLSDILRVNTEITKAPLSASMIKRYDEHHQDLTLLKALVRQQLPEKYKEIFFDQSKNGYAGYIDGGASQEEFYKFIKPILEKMDGTEELLVKLNREDLLRKQRTFDNGSIPHQIHLGELHAILRRQEDFYPFLKDNREKIEKILTFRIPYYVGPLARGNSRFAWMTRKSEETITPWNFEEVVDKGASAQSFIERMTNFDKNLPNEKVLPKHSLLYEYFTVYNELTKVKYVTEGMRKPAFLSGEQKKAIVDLLFKTNRKVTVKQLKEDYFKKIECFDSVEISGVEDRFNASLGTYHDLLKIIKDKDFLDNEENEDILEDIVLTLTLFEDREMIEERLKTYAHLFDDKVMKQLKRRRYTGWGRLSRKLINGIRDKQSGKTILDFLKSDGFANRNFMQLIHDDSLTFKEDIQKAQVSGQGDSLHEHIANLAGSPAIKKGILQTVKVVDELVKVMGRHKPENIVIEMARENQTTQKGQKNSRERMKRIEEGIKELGSQILKEHPVENTQLQNEKLYLYYLQNGRDMYVDQELDINRLSDYDVDHIVPQSFLKDDSIDNKVLTRSDKARGKSDNVPSEEVVKKMKNYWRQLLNAKLITQRKFDNLTKAERGGLSELDKAGFIKRQLVETRQITKHVAQILDSRMNTKYDENDKLIREVKVITLKSKLVSDFRKDFQFYKVREINNYHHAHDAYLNAVVGTALIKKYPKLESEFVYGDYKVYDVRKMIAKSEQEIGKATAKYFFYSNIMNFFKTEITLANGEIRKRPLIETNGETGEIVWDKGRDFATVRKVLSMPQVNIVKKTEVQTGGFSKESILPKRNSDKLIARKKDWDPKKYGGFDSPTVAYSVLVVAKVEKGKSKKLKSVKELLGITIMERSSFEKNPIDFLEAKGYKEVKKDLIIKLPKYSLFELENGRKRMLASAGELQKGNELALPSKYVNFLYLASHYEKLKGSPEDNEQKQLFVEQHKHYLDEIIEQISEFSKRVILADANLDKVLSAYNKHRDKPIREQAENIIHLFTLTNLGAPAAFKYFDTTIDRKRYTSTKEVLDATLIHQSITGLYETRIDLSQLGGDGGGGGGSGGVPWILKKPLELTIKLDLEEQQGTLLNNSILSKKGKEELKQLFEKYSALWQSWENQVGHRRIRPHKIATGTVKPTPQKQYHINPKAKPDIQIVINDLLKQGVLIQKESTMNTPVYPVPKPNGRWRMVLDYRAVNKVTPLIAVQNQHSYGILGSLFKGRYKTTIDLSNGFWAHPIVPEDYWITAFTWQGKQYCWTVLPQGFLNSPGLFTGDVVDLLQGIPNVEVYVDDVYISHDSEKEHLEYLDILFNRLKEAGYIISLKKSNIANSIVDFLGFQITNEGRGLTDTFKEKLENITAPTTLKQLQSILGLLNFARNFIPDFTELIAPLYALIPKSTKNYVPWQIEHSTTLETLITKLNGAEYLQGRKGDKTLIMKVNASYTTGYIRYYNEGEKKPISYVSIVFSKTELKFTELEKLLTTVHKGLLKALDLSMGQNIHVYSPIVSMQNIQKTPQTAKKALASRWLSWLSYLEDPRIRFFYDPQMPALKDLPAVDTGKDNKKHPSNFQHIFYTDGSAITSPTKEGHLNAGMGIVYFINKDGNLQKQQEWSISLGNHTAQFAEIAAFEFALKKCLPLGGNILVVTDSNYVAKAYNEELDVWASNGFVNNRKKPLKHISKWKSVADLKRLRPDVVVTHEPGHQKLDSSPHAYGNNLADQLATQASFKVHAGKRTADGSEFEKRTADGSEFESPKKKAKVE

SEQ ID NO: 6110 - protein, 2088 aa, synthetic construct
MPAAKRVKLDGGDKKYSIGLDIGTNSVGWAVITDEYKVPSKKFKVLGNTDRHSIKKNLIGALLFDSGETAEATRLKRTARRRYTRRKNRICYLQEIFSNEMAKVDDSFFHRLEESFLVEEDKKHERHPIFGNIVDEVAYHEKYPTIYHLRKKLVDSTDKADLRLIYLALAHMIKFRGHFLIEGDLNPDNSDVDKLFIQLVQTYNQLFEENPINASGVDAKAILSARLSKSRRLENLIAQLPGEKKNGLFGNLIALSLGLTPNFKSNFDLAEDAKLQLSKDTYDDDLDNLLAQIGDQYADLFLAAKNLSDAILLSDILRVNTEITKAPLSASMIKRYDEHHQDLTLLKALVRQQLPEKYKEIFFDQSKNGYAGYIDGGASQEEFYKFIKPILEKMDGTEELLVKLNREDLLRKQRTFDNGSIPHQIHLGELHAILRRQEDFYPFLKDNREKIEKILTFRIPYYVGPLARGNSRFAWMTRKSEETITPWNFEEVVDKGASAQSFIERMTNFDKNLPNEKVLPKHSLLYEYFTVYNELTKVKYVTEGMRKPAFLSGEQKKAIVDLLFKTNRKVTVKQLKEDYFKKIECFDSVEISGVEDRFNASLGTYHDLLKIIKDKDFLDNEENEDILEDIVLTLTLFEDREMIEERLKTYAHLFDDKVMKQLKRRRYTGWGRLSRKLINGIRDKQSGKTILDFLKSDGFANRNFMQLIHDDSLTFKEDIQKAQVSGQGDSLHEHIANLAGSPAIKKGILQTVKVVDELVKVMGRHKPENIVIEMARENQTTQKGQKNSRERMKRIEEGIKELGSQILKEHPVENTQLQNEKLYLYYLQNGRDMYVDQELDINRLSDYDVDHIVPQSFLKDDSIDNKVLTRSDKARGKSDNVPSEEVVKKMKNYWRQLLNAKLITQRKFDNLTKAERGGLSELDKAGFIKRQLVETRQITKHVAQILDSRMNTKYDENDKLIREVKVITLKSKLVSDFRKDFQFYKVREINNYHHAHDAYLNAVVGTALIKKYPKLESEFVYGDYKVYDVRKMIAKSEQEIGKATAKYFFYSNIMNFFKTEITLANGEIRKRPLIETNGETGEIVWDKGRDFATVRKVLSMPQVNIVKKTEVQTGGFSKESILPKRNSDKLIARKKDWDPKKYGGFDSPTVAYSVLVVAKVEKGKSKKLKSVKELLGITIMERSSFEKNPIDFLEAKGYKEVKKDLIIKLPKYSLFELENGRKRMLASAGELQKGNELALPSKYVNFLYLASHYEKLKGSPEDNEQKQLFVEQHKHYLDEIIEQISEFSKRVILADANLDKVLSAYNKHRDKPIREQAENIIHLFTLTNLGAPAAFKYFDTTIDRKRYTSTKEVLDATLIHQSITGLYETRIDLSQLGGDGGGGGGSGGVLNLEEEYRLHEKPVPSSIDPSWLQLFPTVWAERAGMGLANQVPPVVVELRSGASPVAVRQYPMSKEAREGIRPHIQKFLDLGVLVPCRSPWNTPLLPVKKPGTNDYRPVQDLREINKRVQDIHPTVPNPYNLLSSLPPSYTWYSVLDLKDAFFCLRLHPNSQPLFAFEWKDPEKGNTGQLTWTRLPQGFKNSPTLFNEALHRDLAPFRALNPQVVLLQYVDDLLVAAPTYEDCKKGTQKLLQELSKLGYRVSAKKAQLCQREVTYLGYLLKEGKRWLTPARKATVMKIPVPTTPRQVREFLGTAGFCRLWIPGFASLAAPLYPLTKPSIPFIWTEEHQQAFDHIKKALLSAPALALPDLTKPFTLYIDERAGVARGVLTQTLGPWRRPVAYLSKKLDPVASGWPTCLKAVAAVALLLKDADKLTLGQNVTVIASHSLESIVRQPPDRWMTNARMTHYQSLLLNERVSFAPPAVLNPATLLPVESEATPVHRCSEILAEETGTRRDLEDQPLPGVPTWYTDGSSFITEGKRRAGAPIVDGKRTVWASSLPEGTSAQKAELVALTQALRLAEGKNINIYTDSRYAFATAHIHGAIYKQRGWLTSAGKDIKNKEEILALLEAIHLPRRVAIIHCPGHQRGSNPVATGNRRADEAAKQAALSTRVLAGTTKPAGKRTADGSEFEKRTADGSEFESPKKKAKVE

SEQ ID NO: 6111 - protein, 2090 aa, synthetic construct
MPAAKRVKLDGGDKKYSIGLDIGTNSVGWAVITDEYKVPSKKFKVLGNTDRHSIKKNLIGALLFDSGETAEATRLKRTARRRYTRRKNRICYLQEIFSNEMAKVDDSFFHRLEESFLVEEDKKHERHPIFGNIVDEVAYHEKYPTIYHLRKKLVDSTDKADLRLIYLALAHMIKFRGHFLIEGDLNPDNSDVDKLFIQLVQTYNQLFEENPINASGVDAKAILSARLSKSRRLENLIAQLPGEKKNGLFGNLIALSLGLTPNFKSNFDLAEDAKLQLSKDTYDDDLDNLLAQIGDQYADLFLAAKNLSDAILLSDILRVNTEITKAPLSASMIKRYDEHHQDLTLLKALVRQQLPEKYKEIFFDQSKNGYAGYIDGGASQEEFYKFIKPILEKMDGTEELLVKLNREDLLRKQRTFDNGSIPHQIHLGELHAILRRQEDFYPFLKDNREKIEKILTFRIPYYVGPLARGNSRFAWMTRKSEETITPWNFEEVVDKGASAQSFIERMTNFDKNLPNEKVLPKHSLLYEYFTVYNELTKVKYVTEGMRKPAFLSGEQKKAIVDLLFKTNRKVTVKQLKEDYFKKIECFDSVEISGVEDRFNASLGTYHDLLKIIKDKDFLDNEENEDILEDIVLTLTLFEDREMIEERLKTYAHLFDDKVMKQLKRRRYTGWGRLSRKLINGIRDKQSGKTILDFLKSDGFANRNFMQLIHDDSLTFKEDIQKAQVSGQGDSLHEHIANLAGSPAIKKGILQTVKVVDELVKVMGRHKPENIVIEMARENQTTQKGQKNSRERMKRIEEGIKELGSQILKEHPVENTQLQNEKLYLYYLQNGRDMYVDQELDINRLSDYDVDHIVPQSFLKDDSIDNKVLTRSDKARGKSDNVPSEEVVKKMKNYWRQLLNAKLITQRKFDNLTKAERGGLSELDKAGFIKRQLVETRQITKHVAQILDSRMNTKYDENDKLIREVKVITLKSKLVSDFRKDFQFYKVREINNYHHAHDAYLNAVVGTALIKKYPKLESEFVYGDYKVYDVRKMIAKSEQEIGKATAKYFFYSNIMNFFKTEITLANGEIRKRPLIETNGETGEIVWDKGRDFATVRKVLSMPQVNIVKKTEVQTGGFSKESILPKRNSDKLIARKKDWDPKKYGGFDSPTVAYSVLVVAKVEKGKSKKLKSVKELLGITIMERSSFEKNPIDFLEAKGYKEVKKDLIIKLPKYSLFELENGRKRMLASAGELQKGNELALPSKYVNFLYLASHYEKLKGSPEDNEQKQLFVEQHKHYLDEIIEQISEFSKRVILADANLDKVLSAYNKHRDKPIREQAENIIHLFTLTNLGAPAAFKYFDTTIDRKRYTSTKEVLDATLIHQSITGLYETRIDLSQLGGDGGGGGGSGGTLNIEDEYRLHETSKEPDVSLGSTWLSDFPQAWAETGGMGLAVRQAPLIIPLKATSTPVSIKQYPMSQEARLGIKPHIQRLLDQGILVPCQSPWNTPLLPVKKPGTNDYRPVQDLREVNKRVEDIHPTVPNPYNLLSGLPPSHQWYTVLDLKDAFFCLRLHPTSQPLFAFEWRDPEMGISGQLTWTRLPQGFKNSPTLFDEALHRDLAGFRIQHPDLILLQYVDDLLLAATSELDCQQGTRALLQTLGDLGYRASAKKAQICQKQVKYLGYLLKEGQRWLTEARKETVMGQPIPKTPRQLREFLGTAGFCRLWIPGFAEMAAPLYPLTKTGTLFNWGPDQQKAFQEIKQALLTAPALGLPDLTKPFELFVDEKQGYAKGVLTQKLGPWRRPVAYLSKKLDPVAAGWPPCLRMVAAIAVLTKDAGKLTMGQPLVILAPHAVEALVKQPPDRWLSNARMTHYQALLLDTDRVQFGPVVALNPATLLPLPEEGLQHDCLDILAEAHGTRSDLMDQPLPDADHTWYTDGSSFLQEGQRKAGAAVTTETEVIWARALPAGTSAQRAELIALTQALKMAEGKKLNVYTDSRYAFATAHIHGEIYRRRGLLTSEGKEIKNKDEILALLKALFLPKRLSIIHCPGHQKGNSAEARGNRMADQAAREVATRETPETSTLLAGKRTADGSEFEKRTADGSEFESPKKKAKVE

SEQ ID NO: 6112 - protein, 2090 aa, synthetic construct
MPAAKRVKLDGGDKKYSIGLDIGTNSVGWAVITDEYKVPSKKFKVLGNTDRHSIKKNLIGALLFDSGETAEATRLKRTARRRYTRRKNRICYLQEIFSNEMAKVDDSFFHRLEESFLVEEDKKHERHPIFGNIVDEVAYHEKYPTIYHLRKKLVDSTDKADLRLIYLALAHMIKFRGHFLIEGDLNPDNSDVDKLFIQLVQTYNQLFEENPINASGVDAKAILSARLSKSRRLENLIAQLPGEKKNGLFGNLIALSLGLTPNFKSNFDLAEDAKLQLSKDTYDDDLDNLLAQIGDQYADLFLAAKNLSDAILLSDILRVNTEITKAPLSASMIKRYDEHHQDLTLLKALVRQQLPEKYKEIFFDQSKNGYAGYIDGGASQEEFYKFIKPILEKMDGTEELLVKLNREDLLRKQRTFDNGSIPHQIHLGELHAILRRQEDFYPFLKDNREKIEKILTFRIPYYVGPLARGNSRFAWMTRKSEETITPWNFEEVVDKGASAQSFIERMTNFDKNLPNEKVLPKHSLLYEYFTVYNELTKVKYVTEGMRKPAFLSGEQKKAIVDLLFKTNRKVTVKQLKEDYFKKIECFDSVEISGVEDRFNASLGTYHDLLKIIKDKDFLDNEENEDILEDIVLTLTLFEDREMIEERLKTYAHLFDDKVMKQLKRRRYTGWGRLSRKLINGIRDKQSGKTILDFLKSDGFANRNFMQLIHDDSLTFKEDIQKAQVSGQGDSLHEHIANLAGSPAIKKGILQTVKVVDELVKVMGRHKPENIVIEMARENQTTQKGQKNSRERMKRIEEGIKELGSQILKEHPVENTQLQNEKLYLYYLQNGRDMYVDQELDINRLSDYDVDHIVPQSFLKDDSIDNKVLTRSDKARGKSDNVPSEEVVKKMKNYWRQLLNAKLITQRKFDNLTKAERGGLSELDKAGFIKRQLVETRQITKHVAQILDSRMNTKYDENDKLIREVKVITLKSKLVSDFRKDFQFYKVREINNYHHAHDAYLNAVVGTALIKKYPKLESEFVYGDYKVYDVRKMIAKSEQEIGKATAKYFFYSNIMNFFKTEITLANGEIRKRPLIETNGETGEIVWDKGRDFATVRKVLSMPQVNIVKKTEVQTGGFSKESILPKRNSDKLIARKKDWDPKKYGGFDSPTVAYSVLVVAKVEKGKSKKLKSVKELLGITIMERSSFEKNPIDFLEAKGYKEVKKDLIIKLPKYSLFELENGRKRMLASAGELQKGNELALPSKYVNFLYLASHYEKLKGSPEDNEQKQLFVEQHKHYLDEIIEQISEFSKRVILADANLDKVLSAYNKHRDKPIREQAENIIHLFTLTNLGAPAAFKYFDTTIDRKRYTSTKEVLDATLIHQSITGLYETRIDLSQLGGDGGGGGGSGGTLNIEDEYRLHETSKEPDVSLGSTWLSDFPQAWAETGGMGLAVRQAPLIIPLKATSTPVSIKQYPMSQEARLGIKPHIQRLLDQGILVPCQSPWNTPLLPVKKPGTNDYRPVQDLREVNKRVEDIHPTVPNPYNLLSGLPPSHQWYTVLDLKDAFFCLRLHPTSQPLFAFEWRDPEMGISGQLTWTRLPQGFKNSPTLFNEALHRDLAGFRIQHPDLILLQYVDDLLLAATSELDCQQGTRALLQTLGDLGYRASAKKAQICQKQVKYLGYLLKEGQRWLTEARKETVMGQPIPKTPRQLREFLGTAGFCRLWIPGFAEMAAPLYPLTKPGTLFNWGPDQQKAFQEIKQALLTAPALGLPDLTKPFELFVDEKQGYAKGVLTQKLGPWRRPVAYLSKKLDPVAAGWPPCLRMVAAIAVLTKDAGKLTMGQPLVILAPHAVEALVKQPPDRWLSNARMTHYQALLLDTDRVQFGPVVALNPATLLPLPEEGLQHDCLDILAEAHGTRSDLMDQPLPDADHTWYTDGSSFLQEGQRKAGAAVTTETEVIWARALPAGTSAQRAELIALTQALKMAEGKKLNVYTDSRYAFATAHIHGEIYRRRGWLTSEGKEIKNKDEILALLKALFLPKRLSIIHCPGHQKGNSAEARGNRMADQAAREVATRETPETSTLLAGKRTADGSEFEKRTADGSEFESPKKKAKVE

SEQ ID NO: 6113 - protein, 2110 aa, synthetic construct
MPAAKRVKLDGGDKKYSIGLDIGTNSVGWAVITDEYKVPSKKFKVLGNTDRHSIKKNLIGALLFDSGETAEATRLKRTARRRYTRRKNRICYLQEIFSNEMAKVDDSFFHRLEESFLVEEDKKHERHPIFGNIVDEVAYHEKYPTIYHLRKKLVDSTDKADLRLIYLALAHMIKFRGHFLIEGDLNPDNSDVDKLFIQLVQTYNQLFEENPINASGVDAKAILSARLSKSRRLENLIAQLPGEKKNGLFGNLIALSLGLTPNFKSNFDLAEDAKLQLSKDTYDDDLDNLLAQIGDQYADLFLAAKNLSDAILLSDILRVNTEITKAPLSASMIKRYDEHHQDLTLLKALVRQQLPEKYKEIFFDQSKNGYAGYIDGGASQEEFYKFIKPILEKMDGTEELLVKLNREDLLRKQRTFDNGSIPHQIHLGELHAILRRQEDFYPFLKDNREKIEKILTFRIPYYVGPLARGNSRFAWMTRKSEETITPWNFEEVVDKGASAQSFIERMTNFDKNLPNEKVLPKHSLLYEYFTVYNELTKVKYVTEGMRKPAFLSGEQKKAIVDLLFKTNRKVTVKQLKEDYFKKIECFDSVEISGVEDRFNASLGTYHDLLKIIKDKDFLDNEENEDILEDIVLTLTLFEDREMIEERLKTYAHLFDDKVMKQLKRRRYTGWGRLSRKLINGIRDKQSGKTILDFLKSDGFANRNFMQLIHDDSLTFKEDIQKAQVSGQGDSLHEHIANLAGSPAIKKGILQTVKVVDELVKVMGRHKPENIVIEMARENQTTQKGQKNSRERMKRIEEGIKELGSQILKEHPVENTQLQNEKLYLYYLQNGRDMYVDQELDINRLSDYDVDHIVPQSFLKDDSIDNKVLTRSDKARGKSDNVPSEEVVKKMKNYWRQLLNAKLITQRKFDNLTKAERGGLSELDKAGFIKRQLVETRQITKHVAQILDSRMNTKYDENDKLIREVKVITLKSKLVSDFRKDFQFYKVREINNYHHAHDAYLNAVVGTALIKKYPKLESEFVYGDYKVYDVRKMIAKSEQEIGKATAKYFFYSNIMNFFKTEITLANGEIRKRPLIETNGETGEIVWDKGRDFATVRKVLSMPQVNIVKKTEVQTGGFSKESILPKRNSDKLIARKKDWDPKKYGGFDSPTVAYSVLVVAKVEKGKSKKLKSVKELLGITIMERSSFEKNPIDFLEAKGYKEVKKDLIIKLPKYSLFELENGRKRMLASAGELQKGNELALPSKYVNFLYLASHYEKLKGSPEDNEQKQLFVEQHKHYLDEIIEQISEFSKRVILADANLDKVLSAYNKHRDKPIREQAENIIHLFTLTNLGAPAAFKYFDTTIDRKRYTSTKEVLDATLIHQSITGLYETRIDLSQLGGDGGGGGGSGGVQEISDSRPMLHIYLNGRRFLGLLDTGADKTCIAGRDWPANWPIHQTESSLQGLGMACGVARSSQPLRWQHEDKSGIIHPFVIPTLPFTLWGRDIMKDIKVRLMTDSPDDSQDLMIGAIESNLFADQISWKSDQPVWLNQWPLKQEKLQALQQLVTEQLQLGHLEESNSPWNTPVFVIKKKSGKWRLLQDLRAVNATMHDMGALQPGLPSPVAVPKGWEIIIIDLQDCFFNIKLHPEDCKRFAFSVPSPNFKRPYQRFQWKVLPQGMKNSPTLCQKFVDKAILTVRDKYQDSYIVHYMDDILLAHPSRSIVDEILTSMIQALNKHGLVVSTEKIQKYDNLKYLGTHIQGDSVSYQKLQIRTDKLRTLNDFQKLLGNINWIRPFLKLTTGELKPLFEILNGDSNPISTRKLTPEACKALQLMNERLSTARVKRLDLSQPWSLCILKTEYTPTACLWQDGVVEWIHLPHISPKVITPYDIFCTQLIIKGRHRSKELFSKDPDYIVVPYTKVQFDLLLQEKEDWPISLLGFLGEVHFHLPKDPLLTFTLQTAIIFPHMTSTTPLEKGIVIFTDGSANGRSVTYIQGREPIIKENTQNTAQQAEIVAVITAFEEVSQPFNLYTDSKYVTGLFPEIETATLSPRTKIYTELKHLQRLIHKRQEKFYIGHIRGHTGLPGPLAQGNAYADSLTRILTAAGKRTADGSEFEKRTADGSEFESPKKKAKVE

SEQ ID NO: 6114 - protein, 2170 aa, synthetic construct
MPAAKRVKLDGGDKKYSIGLDIGTNSVGWAVITDEYKVPSKKFKVLGNTDRHSIKKNLIGALLFDSGETAEATRLKRTARRRYTRRKNRICYLQEIFSNEMAKVDDSFFHRLEESFLVEEDKKHERHPIFGNIVDEVAYHEKYPTIYHLRKKLVDSTDKADLRLIYLALAHMIKFRGHFLIEGDLNPDNSDVDKLFIQLVQTYNQLFEENPINASGVDAKAILSARLSKSRRLENLIAQLPGEKKNGLFGNLIALSLGLTPNFKSNFDLAEDAKLQLSKDTYDDDLDNLLAQIGDQYADLFLAAKNLSDAILLSDILRVNTEITKAPLSASMIKRYDEHHQDLTLLKALVRQQLPEKYKEIFFDQSKNGYAGYIDGGASQEEFYKFIKPILEKMDGTEELLVKLNREDLLRKQRTFDNGSIPHQIHLGELHAILRRQEDFYPFLKDNREKIEKILTFRIPYYVGPLARGNSRFAWMTRKSEETITPWNFEEVVDKGASAQSFIERMTNFDKNLPNEKVLPKHSLLYEYFTVYNELTKVKYVTEGMRKPAFLSGEQKKAIVDLLFKTNRKVTVKQLKEDYFKKIECFDSVEISGVEDRFNASLGTYHDLLKIIKDKDFLDNEENEDILEDIVLTLTLFEDREMIEERLKTYAHLFDDKVMKQLKRRRYTGWGRLSRKLINGIRDKQSGKTILDFLKSDGFANRNFMQLIHDDSLTFKEDIQKAQVSGQGDSLHEHIANLAGSPAIKKGILQTVKVVDELVKVMGRHKPENIVIEMARENQTTQKGQKNSRERMKRIEEGIKELGSQILKEHPVENTQLQNEKLYLYYLQNGRDMYVDQELDINRLSDYDVDHIVPQSFLKDDSIDNKVLTRSDKARGKSDNVPSEEVVKKMKNYWRQLLNAKLITQRKFDNLTKAERGGLSELDKAGFIKRQLVETRQITKHVAQILDSRMNTKYDENDKLIREVKVITLKSKLVSDFRKDFQFYKVREINNYHHAHDAYLNAVVGTALIKKYPKLESEFVYGDYKVYDVRKMIAKSEQEIGKATAKYFFYSNIMNFFKTEITLANGEIRKRPLIETNGETGEIVWDKGRDFATVRKVLSMPQVNIVKKTEVQTGGFSKESILPKRNSDKLIARKKDWDPKKYGGFDSPTVAYSVLVVAKVEKGKSKKLKSVKELLGITIMERSSFEKNPIDFLEAKGYKEVKKDLIIKLPKYSLFELENGRKRMLASAGELQKGNELALPSKYVNFLYLASHYEKLKGSPEDNEQKQLFVEQHKHYLDEIIEQISEFSKRVILADANLDKVLSAYNKHRDKPIREQAENIIHLFTLTNLGAPAAFKYFDTTIDRKRYTSTKEVLDATLIHQSITGLYETRIDLSQLGGDGGGGGGSGGMDPLQLLQPLEAEIKGTKLKAHWNSGATITCVPEAFLEDERPIQTMLIKTIHGEKQQDVYYLTFKVQGRKVEAEVLASPYDYILLNPSDVPWLMKKPLQLTVLVPLHEYQERLLQQTALPKEQKELLQKLFLKYDALWQHWENQVGHRRIKPHNIATGTLAPRPQKQYPINPKAKPSIQIVIDDLLKQGVLIQQNSTMNTPVYPVPKPDGKWRMVLDYREVNKTIPLIAAQNQHSAGILSSIYRGKYKTTLDLTNGFWAHPITPESYWLTAFTWQGKQYCWTRLPQGFLNSPALFNADVVDLLKEIPNVQAYVDDIYISHDDPQEHLEQLEKIFSILLNAGYVVSLKKSEIAQREVEFLGFNITKEGRGLTDTFKQKLLNITPPKDLKQLQSILGKLNFARNFIPNYSELVKPLYTIVAPANGKFISWTEDNSNQLQHIISVLNQADNLEERNPETRLIIKVNSSPSAGYIRYYNEGSKRPIMYVNYIFSKAEAKFTQTEKLLTTMHKGLIKAMDLAMGQEILVYSPIVSMTKIQRTPLPERKALPVRWITWMTYLEDPRIQFHYDKSLPELQQIPNVTEDVIAKTKHPSEFAMVFYTDGSAIKHPDVNKSHSAGMGIAQVQFIPEYKIVHQWSIPLGDHTAQLAEIAAVEFACKKALKISGPVLIVTDSFYVAESANKELPYWKSNGFLNNKKKPLRHVSKWKSIAECLQLKPDIIIMHEKGHQQPMTTLHTEGNNLADKLATQGSYVVHAGKRTADGSEFEKRTADGSEFESPKKKAKVE

SEQ ID NO: 6115 - protein, 2088 aa, synthetic construct
MPAAKRVKLDGGDKKYSIGLDIGTNSVGWAVITDEYKVPSKKFKVLGNTDRHSIKKNLIGALLFDSGETAEATRLKRTARRRYTRRKNRICYLQEIFSNEMAKVDDSFFHRLEESFLVEEDKKHERHPIFGNIVDEVAYHEKYPTIYHLRKKLVDSTDKADLRLIYLALAHMIKFRGHFLIEGDLNPDNSDVDKLFIQLVQTYNQLFEENPINASGVDAKAILSARLSKSRRLENLIAQLPGEKKNGLFGNLIALSLGLTPNFKSNFDLAEDAKLQLSKDTYDDDLDNLLAQIGDQYADLFLAAKNLSDAILLSDILRVNTEITKAPLSASMIKRYDEHHQDLTLLKALVRQQLPEKYKEIFFDQSKNGYAGYIDGGASQEEFYKFIKPILEKMDGTEELLVKLNREDLLRKQRTFDNGSIPHQIHLGELHAILRRQEDFYPFLKDNREKIEKILTFRIPYYVGPLARGNSRFAWMTRKSEETITPWNFEEVVDKGASAQSFIERMTNFDKNLPNEKVLPKHSLLYEYFTVYNELTKVKYVTEGMRKPAFLSGEQKKAIVDLLFKTNRKVTVKQLKEDYFKKIECFDSVEISGVEDRFNASLGTYHDLLKIIKDKDFLDNEENEDILEDIVLTLTLFEDREMIEERLKTYAHLFDDKVMKQLKRRRYTGWGRLSRKLINGIRDKQSGKTILDFLKSDGFANRNFMQLIHDDSLTFKEDIQKAQVSGQGDSLHEHIANLAGSPAIKKGILQTVKVVDELVKVMGRHKPENIVIEMARENQTTQKGQKNSRERMKRIEEGIKELGSQILKEHPVENTQLQNEKLYLYYLQNGRDMYVDQELDINRLSDYDVDHIVPQSFLKDDSIDNKVLTRSDKARGKSDNVPSEEVVKKMKNYWRQLLNAKLITQRKFDNLTKAERGGLSELDKAGFIKRQLVETRQITKHVAQILDSRMNTKYDENDKLIREVKVITLKSKLVSDFRKDFQFYKVREINNYHHAHDAYLNAVVGTALIKKYPKLESEFVYGDYKVYDVRKMIAKSEQEIGKATAKYFFYSNIMNFFKTEITLANGEIRKRPLIETNGETGEIVWDKGRDFATVRKVLSMPQVNIVKKTEVQTGGFSKESILPKRNSDKLIARKKDWDPKKYGGFDSPTVAYSVLVVAKVEKGKSKKLKSVKELLGITIMERSSFEKNPIDFLEAKGYKEVKKDLIIKLPKYSLFELENGRKRMLASAGELQKGNELALPSKYVNFLYLASHYEKLKGSPEDNEQKQLFVEQHKHYLDEIIEQISEFSKRVILADANLDKVLSAYNKHRDKPIREQAENIIHLFTLTNLGAPAAFKYFDTTIDRKRYTSTKEVLDATLIHQSITGLYETRIDLSQLGGDGGGGGGSGGVLNLEEEYRLHEKPVPSSIDPSWLQLFPTVWAERAGMGLANQVPPVVVELRSGASPVAVRQYPMSKEAREGIRPHIQRFLDLGVLVPCQSPWNTPLLPVKKPGTNDYRPVQDLREINKRVQDIHPTVPNPYNLLSSLPPSHTWYSVLDLKDAFFCLKLHPNSQPLFAFEWRDPEKGNTGQLTWTRLPQGFKNSPTLFNEALHRDLAPFRALNPQVVLLQYVDDLLVAAPTYRDCKEGTQKLLQELSKLGYRVSAKKAQLCQKEVTYLGYLLKEGKRWLTPARKATVMKIPPPTTPRQVREFLGTAGFCRLWIPGFASLAAPLYPLTKPSIPFIWTEEHQKAFDRIKEALLSAPALALPDLTKPFTLYVDERAGVARGVLTQTLGPWRRPVAYLSKKLDPVASGWPTCLKAVAAVALLLKDADKLTLGQNVTVIASHSLESIVRQPPDRWMTNARMTHYQSLLLNERVSFAPPAVLNPATLLPVESEATPVHRCSEILAEETGTRRDLKDQPLPGVPAWYTDGSSFIAEGKRRAGAAIVDGKRTVWASSLPEGTSAQKAELVALTQALRLAEGKDINIYTDSRYAFATAHIHGAIYKQRGWLTSAGKDIKNKEEILALLEAIHLPKRVAIIHCPGHQKGNDPVATGNRRADEAAKQAALSTRVLAETTKPAGKRTADGSEFEKRTADGSEFESPKKKAKVE

SEQ ID NO: 6116 - protein, 2088 aa, synthetic construct
MPAAKRVKLDGGDKKYSIGLDIGTNSVGWAVITDEYKVPSKKFKVLGNTDRHSIKKNLIGALLFDSGETAEATRLKRTARRRYTRRKNRICYLQEIFSNEMAKVDDSFFHRLEESFLVEEDKKHERHPIFGNIVDEVAYHEKYPTIYHLRKKLVDSTDKADLRLIYLALAHMIKFRGHFLIEGDLNPDNSDVDKLFIQLVQTYNQLFEENPINASGVDAKAILSARLSKSRRLENLIAQLPGEKKNGLFGNLIALSLGLTPNFKSNFDLAEDAKLQLSKDTYDDDLDNLLAQIGDQYADLFLAAKNLSDAILLSDILRVNTEITKAPLSASMIKRYDEHHQDLTLLKALVRQQLPEKYKEIFFDQSKNGYAGYIDGGASQEEFYKFIKPILEKMDGTEELLVKLNREDLLRKQRTFDNGSIPHQIHLGELHAILRRQEDFYPFLKDNREKIEKILTFRIPYYVGPLARGNSRFAWMTRKSEETITPWNFEEVVDKGASAQSFIERMTNFDKNLPNEKVLPKHSLLYEYFTVYNELTKVKYVTEGMRKPAFLSGEQKKAIVDLLFKTNRKVTVKQLKEDYFKKIECFDSVEISGVEDRFNASLGTYHDLLKIIKDKDFLDNEENEDILEDIVLTLTLFEDREMIEERLKTYAHLFDDKVMKQLKRRRYTGWGRLSRKLINGIRDKQSGKTILDFLKSDGFANRNFMQLIHDDSLTFKEDIQKAQVSGQGDSLHEHIANLAGSPAIKKGILQTVKVVDELVKVMGRHKPENIVIEMARENQTTQKGQKNSRERMKRIEEGIKELGSQILKEHPVENTQLQNEKLYLYYLQNGRDMYVDQELDINRLSDYDVDHIVPQSFLKDDSIDNKVLTRSDKARGKSDNVPSEEVVKKMKNYWRQLLNAKLITQRKFDNLTKAERGGLSELDKAGFIKRQLVETRQITKHVAQILDSRMNTKYDENDKLIREVKVITLKSKLVSDFRKDFQFYKVREINNYHHAHDAYLNAVVGTALIKKYPKLESEFVYGDYKVYDVRKMIAKSEQEIGKATAKYFFYSNIMNFFKTEITLANGEIRKRPLIETNGETGEIVWDKGRDFATVRKVLSMPQVNIVKKTEVQTGGFSKESILPKRNSDKLIARKKDWDPKKYGGFDSPTVAYSVLVVAKVEKGKSKKLKSVKELLGITIMERSSFEKNPIDFLEAKGYKEVKKDLIIKLPKYSLFELENGRKRMLASAGELQKGNELALPSKYVNFLYLASHYEKLKGSPEDNEQKQLFVEQHKHYLDEIIEQISEFSKRVILADANLDKVLSAYNKHRDKPIREQAENIIHLFTLTNLGAPAAFKYFDTTIDRKRYTSTKEVLDATLIHQSITGLYETRIDLSQLGGDGGGGGGSGGVLNLEEEYRLHEKPVPSSIDPSWLQLFPTVWAERAGMGLANQVPPVVVELRSGASPVAVRQYPMSKEAREGIRPHIQRFLDLGVLVPCQSPWNTPLLPVKKPGTNDYRPVQDLREINKRVQDIHPTVPNPYNLLSSLPPSHTWYSVLDLKDAFFCLKLHPNSQPLFAFEWRDPEKGNTGQLTWTRLPQGFKNSPTLFNEALHRDLAPFRALNPQVVLLQYVDDLLVAAPTYRDCKEGTQKLLQELSKLGYRVSAKKAQLCQKEVTYLGYLLKEGKRWLTPARKATVMKIPPPTTPRQVREFLGKAGFCRLFIPGFASLAAPLYPLTKPSIPFIWTEEHQKAFDRIKEALLSAPALALPDLTKPFTLYVDERAGVARGVLTQTLGPWRRPVAYLSKKLDPVASGWPTCLKAVAAVALLLKDADKLTLGQNVTVIASHSLESIVRQPPDRWMTNARMTHYQSLLLNERVSFAPPAVLNPATLLPVESEATPVHRCSEILAEETGTRRDLKDQPLPGVPAWYTDGSSFIAEGKRRAGAAIVDGKRTVWASSLPEGTSAQKAELVALTQALRLAEGKDINIYTDSRYAFATAHIHGAIYKQRGWLTSAGKDIKNKEEILALLEAIHLPKRVAIIHCPGHQKGNDPVATGNRRADEAAKQAALSTRVLAETTKPAGKRTADGSEFEKRTADGSEFESPKKKAKVE

SEQ ID NO: 6117 - protein, 2090 aa, synthetic construct
MPAAKRVKLDGGDKKYSIGLDIGTNSVGWAVITDEYKVPSKKFKVLGNTDRHSIKKNLIGALLFDSGETAEATRLKRTARRRYTRRKNRICYLQEIFSNEMAKVDDSFFHRLEESFLVEEDKKHERHPIFGNIVDEVAYHEKYPTIYHLRKKLVDSTDKADLRLIYLALAHMIKFRGHFLIEGDLNPDNSDVDKLFIQLVQTYNQLFEENPINASGVDAKAILSARLSKSRRLENLIAQLPGEKKNGLFGNLIALSLGLTPNFKSNFDLAEDAKLQLSKDTYDDDLDNLLAQIGDQYADLFLAAKNLSDAILLSDILRVNTEITKAPLSASMIKRYDEHHQDLTLLKALVRQQLPEKYKEIFFDQSKNGYAGYIDGGASQEEFYKFIKPILEKMDGTEELLVKLNREDLLRKQRTFDNGSIPHQIHLGELHAILRRQEDFYPFLKDNREKIEKILTFRIPYYVGPLARGNSRFAWMTRKSEETITPWNFEEVVDKGASAQSFIERMTNFDKNLPNEKVLPKHSLLYEYFTVYNELTKVKYVTEGMRKPAFLSGEQKKAIVDLLFKTNRKVTVKQLKEDYFKKIECFDSVEISGVEDRFNASLGTYHDLLKIIKDKDFLDNEENEDILEDIVLTLTLFEDREMIEERLKTYAHLFDDKVMKQLKRRRYTGWGRLSRKLINGIRDKQSGKTILDFLKSDGFANRNFMQLIHDDSLTFKEDIQKAQVSGQGDSLHEHIANLAGSPAIKKGILQTVKVVDELVKVMGRHKPENIVIEMARENQTTQKGQKNSRERMKRIEEGIKELGSQILKEHPVENTQLQNEKLYLYYLQNGRDMYVDQELDINRLSDYDVDHIVPQSFLKDDSIDNKVLTRSDKARGKSDNVPSEEVVKKMKNYWRQLLNAKLITQRKFDNLTKAERGGLSELDKAGFIKRQLVETRQITKHVAQILDSRMNTKYDENDKLIREVKVITLKSKLVSDFRKDFQFYKVREINNYHHAHDAYLNAVVGTALIKKYPKLESEFVYGDYKVYDVRKMIAKSEQEIGKATAKYFFYSNIMNFFKTEITLANGEIRKRPLIETNGETGEIVWDKGRDFATVRKVLSMPQVNIVKKTEVQTGGFSKESILPKRNSDKLIARKKDWDPKKYGGFDSPTVAYSVLVVAKVEKGKSKKLKSVKELLGITIMERSSFEKNPIDFLEAKGYKEVKKDLIIKLPKYSLFELENGRKRMLASAGELQKGNELALPSKYVNFLYLASHYEKLKGSPEDNEQKQLFVEQHKHYLDEIIEQISEFSKRVILADANLDKVLSAYNKHRDKPIREQAENIIHLFTLTNLGAPAAFKYFDTTIDRKRYTSTKEVLDATLIHQSITGLYETRIDLSQLGGDGGGGGGSGGTLNIEDEYRLHETSKEPDVPLGSTWLSDFPQAWAETGGMGLAVRQAPLIIPLKATSTPVSIKQYPMSQEARLGIKPHIQRLLDQGILVPCQSPWNTPLLPVKKPGTNDYRPVQDLREVNKRVEDIHPTVPNPYNLLSGLPPSHQWYTVLDLKDAFFCLRLHPTSQPLFAFEWRDPEMGISGQLTWTRLPQGFKNSPTLFNEALHRDLADFRIQHPDLILLQYVDDLLLAATSEQDCQRGTRALLQTLGNLGYRASAKKAQICQKQVKYLGYLLKEGQRWLTEARKETVMGQPTPKTPRQLREFLGKAGFCRLFIPGFAEMAAPLYPLTKPGTLFNWGPDQQKAYQEIKQALLTAPALGLPDLTKPFELFVDEKQGYAKGVLTQKLGPWRRPVAYLSKKLDPVAAGWPPCLRMVAAIAVLTKDAGKLTMGQPLVILAPHAVEALVKQPPDRWLSNARMTHYQAMLLDTDRVQFGPVVALNPATLLPLPEKEAPHDCLEILAETHGTRPDLTDQPIPDADYTWYTDGSSFLQEGQRRAGAAVTTETEVIWARALPAGTSAQRAELIALTQALKMAEGKKLNVYTDSRYAFATAHVHGEIYRRRGWLTSEGREIKNKNEILALLKALFLPKRLSIIHCPGHQKGNSAEARGNRMADQAAREAAMKAVLETSTLLAGKRTADGSEFEKRTADGSEFESPKKKAKVE

SEQ ID NO: 6118 - protein, 2101 aa, synthetic construct
MPAAKRVKLDGGDKKYSIGLDIGTNSVGWAVITDEYKVPSKKFKVLGNTDRHSIKKNLIGALLFDSGETAEATRLKRTARRRYTRRKNRICYLQEIFSNEMAKVDDSFFHRLEESFLVEEDKKHERHPIFGNIVDEVAYHEKYPTIYHLRKKLVDSTDKADLRLIYLALAHMIKFRGHFLIEGDLNPDNSDVDKLFIQLVQTYNQLFEENPINASGVDAKAILSARLSKSRRLENLIAQLPGEKKNGLFGNLIALSLGLTPNFKSNFDLAEDAKLQLSKDTYDDDLDNLLAQIGDQYADLFLAAKNLSDAILLSDILRVNTEITKAPLSASMIKRYDEHHQDLTLLKALVRQQLPEKYKEIFFDQSKNGYAGYIDGGASQEEFYKFIKPILEKMDGTEELLVKLNREDLLRKQRTFDNGSIPHQIHLGELHAILRRQEDFYPFLKDNREKIEKILTFRIPYYVGPLARGNSRFAWMTRKSEETITPWNFEEVVDKGASAQSFIERMTNFDKNLPNEKVLPKHSLLYEYFTVYNELTKVKYVTEGMRKPAFLSGEQKKAIVDLLFKTNRKVTVKQLKEDYFKKIECFDSVEISGVEDRFNASLGTYHDLLKIIKDKDFLDNEENEDILEDIVLTLTLFEDREMIEERLKTYAHLFDDKVMKQLKRRRYTGWGRLSRKLINGIRDKQSGKTILDFLKSDGFANRNFMQLIHDDSLTFKEDIQKAQVSGQGDSLHEHIANLAGSPAIKKGILQTVKVVDELVKVMGRHKPENIVIEMARENQTTQKGQKNSRERMKRIEEGIKELGSQILKEHPVENTQLQNEKLYLYYLQNGRDMYVDQELDINRLSDYDVDHIVPQSFLKDDSIDNKVLTRSDKARGKSDNVPSEEVVKKMKNYWRQLLNAKLITQRKFDNLTKAERGGLSELDKAGFIKRQLVETRQITKHVAQILDSRMNTKYDENDKLIREVKVITLKSKLVSDFRKDFQFYKVREINNYHHAHDAYLNAVVGTALIKKYPKLESEFVYGDYKVYDVRKMIAKSEQEIGKATAKYFFYSNIMNFFKTEITLANGEIRKRPLIETNGETGEIVWDKGRDFATVRKVLSMPQVNIVKKTEVQTGGFSKESILPKRNSDKLIARKKDWDPKKYGGFDSPTVAYSVLVVAKVEKGKSKKLKSVKELLGITIMERSSFEKNPIDFLEAKGYKEVKKDLIIKLPKYSLFELENGRKRMLASAGELQKGNELALPSKYVNFLYLASHYEKLKGSPEDNEQKQLFVEQHKHYLDEIIEQISEFSKRVILADANLDKVLSAYNKHRDKPIREQAENIIHLFTLTNLGAPAAFKYFDTTIDRKRYTSTKEVLDATLIHQSITGLYETRIDLSQLGGDGGGGGGSGGGGSGGTVSLQDEHRLFDIPVTTSLPDVWLQDFPQAWAETGGLGRAKCQAPIIIDLKPTAVPVSIKQYPMSLEAHMGIRQHIIKFLELGVLRPCRSPWNTPLLPVKKPGTQDYRPVQDLREINKRTVDIHPTVPNPYNLLSTLKPDYSWYTVLDLKDAFFCLPLAPQSQELFAFEWKDPERGISGQLTWTRLPQGFKNSPTLFNEALHRDLTDFRTQHPEVTLLQYVDDLLLAAPTKKACTQGTRHLLQELGEKGYRASAKKAQICQTKVTYLGYILSEGKRWLTPGRIETVARIPPPRNPREVREFLGKAGFCRLFIPGFAELAAPLYALTKPSTPFTWQTEHQLAFEALKKALLSAPALGLPDTSKPFTLFLDERQGIAKGVLTQKLGPWKRPVAYLSKKLDPVAAGWPPCLRIMAATAMLVKDSAKLTLGQPLTVITPHTLEAIVRQPPDRWITNARLTHYQALLLDTDRVQFGPPVTLNPATLLPVPENQPSPHDCRQVLAETHGTREDLKDQELPDADHTWYTDGSSYLDSGTRRAGAAVVDGHNTIWAQSLPPGTSAQKAELIALTKALELSKGKKANIYTDSRYAFATAHTHGSIYERRGWLTSEGKEIKNKAEIIALLKALFLPQEVAIIHCPGHQKGQDPVAVGNRQADRVARQAAMAEVLTLATEPDNTSHITAGKRTADGSEFEKRTADGSEFESPKKKAKVE

SEQ ID NO: 6119 - protein, 2175 aa, synthetic construct
MPAAKRVKLDGGDKKYSIGLDIGTNSVGWAVITDEYKVPSKKFKVLGNTDRHSIKKNLIGALLFDSGETAEATRLKRTARRRYTRRKNRICYLQEIFSNEMAKVDDSFFHRLEESFLVEEDKKHERHPIFGNIVDEVAYHEKYPTIYHLRKKLVDSTDKADLRLIYLALAHMIKFRGHFLIEGDLNPDNSDVDKLFIQLVQTYNQLFEENPINASGVDAKAILSARLSKSRRLENLIAQLPGEKKNGLFGNLIALSLGLTPNFKSNFDLAEDAKLQLSKDTYDDDLDNLLAQIGDQYADLFLAAKNLSDAILLSDILRVNTEITKAPLSASMIKRYDEHHQDLTLLKALVRQQLPEKYKEIFFDQSKNGYAGYIDGGASQEEFYKFIKPILEKMDGTEELLVKLNREDLLRKQRTFDNGSIPHQIHLGELHAILRRQEDFYPFLKDNREKIEKILTFRIPYYVGPLARGNSRFAWMTRKSEETITPWNFEEVVDKGASAQSFIERMTNFDKNLPNEKVLPKHSLLYEYFTVYNELTKVKYVTEGMRKPAFLSGEQKKAIVDLLFKTNRKVTVKQLKEDYFKKIECFDSVEISGVEDRFNASLGTYHDLLKIIKDKDFLDNEENEDILEDIVLTLTLFEDREMIEERLKTYAHLFDDKVMKQLKRRRYTGWGRLSRKLINGIRDKQSGKTILDFLKSDGFANRNFMQLIHDDSLTFKEDIQKAQVSGQGDSLHEHIANLAGSPAIKKGILQTVKVVDELVKVMGRHKPENIVIEMARENQTTQKGQKNSRERMKRIEEGIKELGSQILKEHPVENTQLQNEKLYLYYLQNGRDMYVDQELDINRLSDYDVDHIVPQSFLKDDSIDNKVLTRSDKARGKSDNVPSEEVVKKMKNYWRQLLNAKLITQRKFDNLTKAERGGLSELDKAGFIKRQLVETRQITKHVAQILDSRMNTKYDENDKLIREVKVITLKSKLVSDFRKDFQFYKVREINNYHHAHDAYLNAVVGTALIKKYPKLESEFVYGDYKVYDVRKMIAKSEQEIGKATAKYFFYSNIMNFFKTEITLANGEIRKRPLIETNGETGEIVWDKGRDFATVRKVLSMPQVNIVKKTEVQTGGFSKESILPKRNSDKLIARKKDWDPKKYGGFDSPTVAYSVLVVAKVEKGKSKKLKSVKELLGITIMERSSFEKNPIDFLEAKGYKEVKKDLIIKLPKYSLFELENGRKRMLASAGELQKGNELALPSKYVNFLYLASHYEKLKGSPEDNEQKQLFVEQHKHYLDEIIEQISEFSKRVILADANLDKVLSAYNKHRDKPIREQAENIIHLFTLTNLGAPAAFKYFDTTIDRKRYTSTKEVLDATLIHQSITGLYETRIDLSQLGGDGGGGGGSGGGGSGGMNPLQLLQPLPAEIKGTKLLAHWNSGATITCIPESFLEDEQPIKKTLIKTIHGEKQQNVYYVTFKVKGRKVEAEVIASPYEYILLSPTDVPWLTQQPLQLTILVPLQEYQEKILSKTALPEDQKQQLKTLFVKYDNLWQHWENQVGHRKIRPHNIATGDYPPRPQKQYPINPKAKPSIQIVIDDLLKQGVLTPQNSTMNTPVYPVPKPDGRWRMVLDYREVNKTIPLTAAQNQHSAGILATIVRQKYKTTLDLANGFWAHPITPESYWLTAFTWQGKQYCWTRLPQGFLNSPALFNADVVDLLKEIPNVQVYVDDIYLSHDDPKEHVQQLEKVFQILLQAGYVVSLKKSEIGQKTVEFLGFNITKEGRGLTDTFKTKLLNITPPKDLKQLQSILGKLNFARNFIPNFAELVQPLYNLIAPAKGKYIEWSEENTKQLNMVIEALNTASNLEERLPEQRLVIKVNTSPSAGYVRYYNETGKKPIMYLNYVFSKAELKFSMLEKLLTTMHKALIKAMDLAMGQEILVYSPIVSMTKIQKTPLPERKALPIRWITWMTYLEDPRIQFHYDKTLPELKHIPDVYTSSQSPVKHPSQYEGVFYTDGSAIKSPDPTKSNNAGMGIVHATYKPEYQVLNQWSIPLGNHTAQMAEIAAVEFACKKALKIPGPVLVITDSFYVAESANKELPYWKSNGFVNNKKKPLKHISKWKSIAECLSMKPDITIQHEKGISLQIPVFILKGNALADKLATQGSYVVNAGKRTADGSEFEKRTADGSEFESPKKKAKVE

SEQ ID NO: 6120 - protein, 2217 aa, synthetic construct
MPAAKRVKLDGGDKKYSIGLDIGTNSVGWAVITDEYKVPSKKFKVLGNTDRHSIKKNLIGALLFDSGETAEATRLKRTARRRYTRRKNRICYLQEIFSNEMAKVDDSFFHRLEESFLVEEDKKHERHPIFGNIVDEVAYHEKYPTIYHLRKKLVDSTDKADLRLIYLALAHMIKFRGHFLIEGDLNPDNSDVDKLFIQLVQTYNQLFEENPINASGVDAKAILSARLSKSRRLENLIAQLPGEKKNGLFGNLIALSLGLTPNFKSNFDLAEDAKLQLSKDTYDDDLDNLLAQIGDQYADLFLAAKNLSDAILLSDILRVNTEITKAPLSASMIKRYDEHHQDLTLLKALVRQQLPEKYKEIFFDQSKNGYAGYIDGGASQEEFYKFIKPILEKMDGTEELLVKLNREDLLRKQRTFDNGSIPHQIHLGELHAILRRQEDFYPFLKDNREKIEKILTFRIPYYVGPLARGNSRFAWMTRKSEETITPWNFEEVVDKGASAQSFIERMTNFDKNLPNEKVLPKHSLLYEYFTVYNELTKVKYVTEGMRKPAFLSGEQKKAIVDLLFKTNRKVTVKQLKEDYFKKIECFDSVEISGVEDRFNASLGTYHDLLKIIKDKDFLDNEENEDILEDIVLTLTLFEDREMIEERLKTYAHLFDDKVMKQLKRRRYTGWGRLSRKLINGIRDKQSGKTILDFLKSDGFANRNFMQLIHDDSLTFKEDIQKAQVSGQGDSLHEHIANLAGSPAIKKGILQTVKVVDELVKVMGRHKPENIVIEMARENQTTQKGQKNSRERMKRIEEGIKELGSQILKEHPVENTQLQNEKLYLYYLQNGRDMYVDQELDINRLSDYDVDHIVPQSFLKDDSIDNKVLTRSDKARGKSDNVPSEEVVKKMKNYWRQLLNAKLITQRKFDNLTKAERGGLSELDKAGFIKRQLVETRQITKHVAQILDSRMNTKYDENDKLIREVKVITLKSKLVSDFRKDFQFYKVREINNYHHAHDAYLNAVVGTALIKKYPKLESEFVYGDYKVYDVRKMIAKSEQEIGKATAKYFFYSNIMNFFKTEITLANGEIRKRPLIETNGETGEIVWDKGRDFATVRKVLSMPQVNIVKKTEVQTGGFSKESILPKRNSDKLIARKKDWDPKKYGGFDSPTVAYSVLVVAKVEKGKSKKLKSVKELLGITIMERSSFEKNPIDFLEAKGYKEVKKDLIIKLPKYSLFELENGRKRMLASAGELQKGNELALPSKYVNFLYLASHYEKLKGSPEDNEQKQLFVEQHKHYLDEIIEQISEFSKRVILADANLDKVLSAYNKHRDKPIREQAENIIHLFTLTNLGAPAAFKYFDTTIDRKRYTSTKEVLDATLIHQSITGLYETRIDLSQLGGDGGGGGGSGGGGSGGTLGDQGSRGSDPLPEPRVTLTVEGIPTEFLVNTGAEHSVLTKPMGKMGSKRTVVAGATGSKVYPWTTKRLLKIGQKQVTHSFLVIPECPAPLLGRDLLTKLKAQIQFSTEGPQVTWEDRPAMCLVLNLEEEYRLHEKPVPPSIDPSWLQLFPMVWAEKAGMGLANQVPPVVVELKSDASPVAVRQYPMSKEAREGIRPHIQRFLDLGILVPCQSPWNTPLLPVKKPGTNDYRPVQDLREVNKRVQDIHPTVPNPYNLLSSLPPSHTWYSVLDLKDAFFCLKLHPNSQPLFAFEWRDPEKGNTGQLTWTRLPQGFKNSPTLFDEALHRDLASFRALNPQVVMLQYVDDLLVAAPTYRDCKEGTRRLLQELSKLGYRVSAKKAQLCREEVTYLGYLLKGGKRWLTPARKATVMKIPTPTTPRQVREFLGTAGFCRLWIPGFASLAAPLYPLTREKVPFTWTEAHQEAFGRIKEALLSAPALALPDLTKPFALYVDEKEGVARGVLTQTLGPWRRPVAYLSKKLDPVASGWPTCLKAIAAVALLLKDADKLTLGQNVLVIAPHNLESIVRQPPDRWMTNARMTHYQSLLLNERVSFAPPAILNPATLLPVESDDTPIHICSEILAEETGTRPDLRDQPLPGVPAWYTDGSSFIMDGRRQAGAAIVDNKRTVWASNLPEGTSAQKAELIALTQALRLAEGKSINIYTDSRYAFATAHVHGAIYKQRGLLTSAGKDIKNKEEILALLEAIHLPKRVAIIHCPGHQRGTDPVATGNRKADEAAKQAAQSTRILTETTKNAGKRTADGSEFEKRTADGSEFESPKKKAKVE

SEQ ID NO: 6121 - protein, 2126 aa, synthetic construct
MPAAKRVKLDGGDKKYSIGLDIGTNSVGWAVITDEYKVPSKKFKVLGNTDRHSIKKNLIGALLFDSGETAEATRLKRTARRRYTRRKNRICYLQEIFSNEMAKVDDSFFHRLEESFLVEEDKKHERHPIFGNIVDEVAYHEKYPTIYHLRKKLVDSTDKADLRLIYLALAHMIKFRGHFLIEGDLNPDNSDVDKLFIQLVQTYNQLFEENPINASGVDAKAILSARLSKSRRLENLIAQLPGEKKNGLFGNLIALSLGLTPNFKSNFDLAEDAKLQLSKDTYDDDLDNLLAQIGDQYADLFLAAKNLSDAILLSDILRVNTEITKAPLSASMIKRYDEHHQDLTLLKALVRQQLPEKYKEIFFDQSKNGYAGYIDGGASQEEFYKFIKPILEKMDGTEELLVKLNREDLLRKQRTFDNGSIPHQIHLGELHAILRRQEDFYPFLKDNREKIEKILTFRIPYYVGPLARGNSRFAWMTRKSEETITPWNFEEVVDKGASAQSFIERMTNFDKNLPNEKVLPKHSLLYEYFTVYNELTKVKYVTEGMRKPAFLSGEQKKAIVDLLFKTNRKVTVKQLKEDYFKKIECFDSVEISGVEDRFNASLGTYHDLLKIIKDKDFLDNEENEDILEDIVLTLTLFEDREMIEERLKTYAHLFDDKVMKQLKRRRYTGWGRLSRKLINGIRDKQSGKTILDFLKSDGFANRNFMQLIHDDSLTFKEDIQKAQVSGQGDSLHEHIANLAGSPAIKKGILQTVKVVDELVKVMGRHKPENIVIEMARENQTTQKGQKNSRERMKRIEEGIKELGSQILKEHPVENTQLQNEKLYLYYLQNGRDMYVDQELDINRLSDYDVDHIVPQSFLKDDSIDNKVLTRSDKARGKSDNVPSEEVVKKMKNYWRQLLNAKLITQRKFDNLTKAERGGLSELDKAGFIKRQLVETRQITKHVAQILDSRMNTKYDENDKLIREVKVITLKSKLVSDFRKDFQFYKVREINNYHHAHDAYLNAVVGTALIKKYPKLESEFVYGDYKVYDVRKMIAKSEQEIGKATAKYFFYSNIMNFFKTEITLANGEIRKRPLIETNGETGEIVWDKGRDFATVRKVLSMPQVNIVKKTEVQTGGFSKESILPKRNSDKLIARKKDWDPKKYGGFDSPTVAYSVLVVAKVEKGKSKKLKSVKELLGITIMERSSFEKNPIDFLEAKGYKEVKKDLIIKLPKYSLFELENGRKRMLASAGELQKGNELALPSKYVNFLYLASHYEKLKGSPEDNEQKQLFVEQHKHYLDEIIEQISEFSKRVILADANLDKVLSAYNKHRDKPIREQAENIIHLFTLTNLGAPAAFKYFDTTIDRKRYTSTKEVLDATLIHQSITGLYETRIDLSQLGGDGGGGGGSGGGGSGGLLGRDLLTKLKAQIQFSTEGPQVTWEDRPAMCLVLNLEEEYRLHEKPVPPSIDPSWLQLFPMVWAEKAGMGLANQVPPVVVELKSDASPVAVRQYPMSKEAREGIRPHIQRFLDLGILVPCQSPWNTPLLPVKKPGTNDYRPVQDLREVNKRVQDIHPTVPNPYNLLSSLPPSHTWYSVLDLKDAFFCLKLHPNSQPLFAFEWRDPEKGNTGQLTWTRLPQGFKNSPTLFNEALHRDLASFRALNPQVVMLQYVDDLLVAAPTYRDCKEGTRRLLQELSKLGYRVSAKKAQLCREEVTYLGYLLKGGKRWLTPARKATVMKIPTPTTPRQVREFLGTAGFCRLWIPGFASLAAPLYPLTRPKVPFTWTEAHQEAFGRIKEALLSAPALALPDLTKPFALYVDEKEGVARGVLTQTLGPWRRPVAYLSKKLDPVASGWPTCLKAIAAVALLLKDADKLTLGQNVLVIAPHNLESIVRQPPDRWMTNARMTHYQSLLLNERVSFAPPAILNPATLLPVESDDTPIHICSEILAEETGTRPDLRDQPLPGVPAWYTDGSSFIMDGRRQAGAAIVDNKRTVWASNLPEGTSAQKAELIALTQALRLAEGKSINIYTDSRYAFATAHVHGAIYKQRGWLTSAGKDIKNKEEILALLEAIHLPKRVAIIHCPGHQRGTDPVATGNRKADEAAKQAAQSTRILTETTKNAGKRTADGSEFEKRTADGSEFESPKKKAKVE

SEQ ID NO: 6122 - protein, 2217 aa, synthetic construct
MPAAKRVKLDGGDKKYSIGLDIGTNSVGWAVITDEYKVPSKKFKVLGNTDRHSIKKNLIGALLFDSGETAEATRLKRTARRRYTRRKNRICYLQEIFSNEMAKVDDSFFHRLEESFLVEEDKKHERHPIFGNIVDEVAYHEKYPTIYHLRKKLVDSTDKADLRLIYLALAHMIKFRGHFLIEGDLNPDNSDVDKLFIQLVQTYNQLFEENPINASGVDAKAILSARLSKSRRLENLIAQLPGEKKNGLFGNLIALSLGLTPNFKSNFDLAEDAKLQLSKDTYDDDLDNLLAQIGDQYADLFLAAKNLSDAILLSDILRVNTEITKAPLSASMIKRYDEHHQDLTLLKALVRQQLPEKYKEIFFDQSKNGYAGYIDGGASQEEFYKFIKPILEKMDGTEELLVKLNREDLLRKQRTFDNGSIPHQIHLGELHAILRRQEDFYPFLKDNREKIEKILTFRIPYYVGPLARGNSRFAWMTRKSEETITPWNFEEVVDKGASAQSFIERMTNFDKNLPNEKVLPKHSLLYEYFTVYNELTKVKYVTEGMRKPAFLSGEQKKAIVDLLFKTNRKVTVKQLKEDYFKKIECFDSVEISGVEDRFNASLGTYHDLLKIIKDKDFLDNEENEDILEDIVLTLTLFEDREMIEERLKTYAHLFDDKVMKQLKRRRYTGWGRLSRKLINGIRDKQSGKTILDFLKSDGFANRNFMQLIHDDSLTFKEDIQKAQVSGQGDSLHEHIANLAGSPAIKKGILQTVKVVDELVKVMGRHKPENIVIEMARENQTTQKGQKNSRERMKRIEEGIKELGSQILKEHPVENTQLQNEKLYLYYLQNGRDMYVDQELDINRLSDYDVDHIVPQSFLKDDSIDNKVLTRSDKARGKSDNVPSEEVVKKMKNYWRQLLNAKLITQRKFDNLTKAERGGLSELDKAGFIKRQLVETRQITKHVAQILDSRMNTKYDENDKLIREVKVITLKSKLVSDFRKDFQFYKVREINNYHHAHDAYLNAVVGTALIKKYPKLESEFVYGDYKVYDVRKMIAKSEQEIGKATAKYFFYSNIMNFFKTEITLANGEIRKRPLIETNGETGEIVWDKGRDFATVRKVLSMPQVNIVKKTEVQTGGFSKESILPKRNSDKLIARKKDWDPKKYGGFDSPTVAYSVLVVAKVEKGKSKKLKSVKELLGITIMERSSFEKNPIDFLEAKGYKEVKKDLIIKLPKYSLFELENGRKRMLASAGELQKGNELALPSKYVNFLYLASHYEKLKGSPEDNEQKQLFVEQHKHYLDEIIEQISEFSKRVILADANLDKVLSAYNKHRDKPIREQAENIIHLFTLTNLGAPAAFKYFDTTIDRKRYTSTKEVLDATLIHQSITGLYETRIDLSQLGGDGGGGGGSGGGGSGGTLGDQGSRGSDPLPEPRVTLTVEGIPTEFLVNTGAEHSVLTKPMGKMGSKRTVVAGATGSKVYPWTTKRLLKIGQKQVTHSFLVIPECPAPLLGRDLLTKLKAQIQFSTEGPQVTWEDRPAMCLVLNLEEEYRLHEKPVPPSIDPSWLQLFPMVWAEKAGMGLANQVPPVVVELKSDASPVAVRQYPMSKEAREGIRPHIQRFLDLGILVPCQSPWNTPLLPVKKPGTNDYRPVQDLREVNKRVQDIHPTVPNPYNLLSSLPPSHTWYSVLDLKDAFFCLKLHPNSQPLFAFEWRDPEKGNTGQLTWTRLPQGFKNSPTLFNEALHRDLASFRALNPQVVMLQYVDDLLVAAPTYRDCKEGTRRLLQELSKLGYRVSAKKAQLCREEVTYLGYLLKGGKRWLTPARKATVMKIPTPTTPRQVREFLGTAGFCRLWIPGFASLAAPLYPLTRPKVPFTWTEAHQEAFGRIKEALLSAPALALPDLTKPFALYVDEKEGVARGVLTQTLGPWRRPVAYLSKKLDPVASGWPTCLKAIAAVALLLKDADKLTLGQNVLVIAPHNLESIVRQPPDRWMTNARMTHYQSLLLNERVSFAPPAILNPATLLPVESDDTPIHICSEILAEETGTRPDLRDQPLPGVPAWYTDGSSFIMDGRRQAGAAIVDNKRTVWASNLPEGTSAQKAELIALTQALRLAEGKSINIYTDSRYAFATAHVHGAIYKQRGWLTSAGKDIKNKEEILALLEAIHLPKRVAIIHCPGHQRGTDPVATGNRKADEAAKQAAQSTRILTETTKNAGKRTADGSEFEKRTADGSEFESPKKKAKVE

SEQ ID NO: 6123 - protein, 2217 aa, synthetic construct
MPAAKRVKLDGGDKKYSIGLDIGTNSVGWAVITDEYKVPSKKFKVLGNTDRHSIKKNLIGALLFDSGETAEATRLKRTARRRYTRRKNRICYLQEIFSNEMAKVDDSFFHRLEESFLVEEDKKHERHPIFGNIVDEVAYHEKYPTIYHLRKKLVDSTDKADLRLIYLALAHMIKFRGHFLIEGDLNPDNSDVDKLFIQLVQTYNQLFEENPINASGVDAKAILSARLSKSRRLENLIAQLPGEKKNGLFGNLIALSLGLTPNFKSNFDLAEDAKLQLSKDTYDDDLDNLLAQIGDQYADLFLAAKNLSDAILLSDILRVNTEITKAPLSASMIKRYDEHHQDLTLLKALVRQQLPEKYKEIFFDQSKNGYAGYIDGGASQEEFYKFIKPILEKMDGTEELLVKLNREDLLRKQRTFDNGSIPHQIHLGELHAILRRQEDFYPFLKDNREKIEKILTFRIPYYVGPLARGNSRFAWMTRKSEETITPWNFEEVVDKGASAQSFIERMTNFDKNLPNEKVLPKHSLLYEYFTVYNELTKVKYVTEGMRKPAFLSGEQKKAIVDLLFKTNRKVTVKQLKEDYFKKIECFDSVEISGVEDRFNASLGTYHDLLKIIKDKDFLDNEENEDILEDIVLTLTLFEDREMIEERLKTYAHLFDDKVMKQLKRRRYTGWGRLSRKLINGIRDKQSGKTILDFLKSDGFANRNFMQLIHDDSLTFKEDIQKAQVSGQGDSLHEHIANLAGSPAIKKGILQTVKVVDELVKVMGRHKPENIVIEMARENQTTQKGQKNSRERMKRIEEGIKELGSQILKEHPVENTQLQNEKLYLYYLQNGRDMYVDQELDINRLSDYDVDHIVPQSFLKDDSIDNKVLTRSDKARGKSDNVPSEEVVKKMKNYWRQLLNAKLITQRKFDNLTKAERGGLSELDKAGFIKRQLVETRQITKHVAQILDSRMNTKYDENDKLIREVKVITLKSKLVSDFRKDFQFYKVREINNYHHAHDAYLNAVVGTALIKKYPKLESEFVYGDYKVYDVRKMIAKSEQEIGKATAKYFFYSNIMNFFKTEITLANGEIRKRPLIETNGETGEIVWDKGRDFATVRKVLSMPQVNIVKKTEVQTGGFSKESILPKRNSDKLIARKKDWDPKKYGGFDSPTVAYSVLVVAKVEKGKSKKLKSVKELLGITIMERSSFEKNPIDFLEAKGYKEVKKDLIIKLPKYSLFELENGRKRMLASAGELQKGNELALPSKYVNFLYLASHYEKLKGSPEDNEQKQLFVEQHKHYLDEIIEQISEFSKRVILADANLDKVLSAYNKHRDKPIREQAENIIHLFTLTNLGAPAAFKYFDTTIDRKRYTSTKEVLDATLIHQSITGLYETRIDLSQLGGDGGGGGGSGGGGSGGTLGDQGSRGSDPLPEPRVTLTVEGIPTEFLVNTGAEHSVLTKPMGKMGSKRTVVAGATGSKVYPWTTKRLLKIGQKQVTHSFLVIPECPAPLLGRDLLTKLKAQIQFSTEGPQVTWEDRPAMCLVLNLEEEYRLHEKPVPPSIDPSWLQLFPMVWAEKAGMGLANQVPPVVVELKSDASPVAVRQYPMSKEAREGIRPHIQRFLDLGILVPCQSPWNTPLLPVKKPGTNDYRPVQDLREVNKRVQDIHPTVPNPYNLLSSLPPSHTWYSVLDLKDAFFCLKLHPNSQPLFAFEWRDPEKGNTGQLTWTRLPQGFKNSPTLFNEALHRDLASFRALNPQVVMLQYVDDLLVAAPTYRDCKEGTRRLLQELSKLGYRVSAKKAQLCREEVTYLGYLLKGGKRWLTPARKATVMKIPTPTTPRQVREFLGKAGFCRLFIPGFASLAAPLYPLTRPKVPFTWTEAHQEAFGRIKEALLSAPALALPDLTKPFALYVDEKEGVARGVLTQTLGPWRRPVAYLSKKLDPVASGWPTCLKAIAAVALLLKDADKLTLGQNVLVIAPHNLESIVRQPPDRWMTNARMTHYQSLLLNERVSFAPPAILNPATLLPVESDDTPIHICSEILAEETGTRPDLRDQPLPGVPAWYTDGSSFIMDGRRQAGAAIVDNKRTVWASNLPEGTSAQKAELIALTQALRLAEGKSINIYTDSRYAFATAHVHGAIYKQRGWLTSAGKDIKNKEEILALLEAIHLPKRVAIIHCPGHQRGTDPVATGNRKADEAAKQAAQSTRILTETTKNAGKRTADGSEFEKRTADGSEFESPKKKAKVE

SEQ ID NO: 6124 - protein, 2095 aa, synthetic construct
MPAAKRVKLDGGDKKYSIGLDIGTNSVGWAVITDEYKVPSKKFKVLGNTDRHSIKKNLIGALLFDSGETAEATRLKRTARRRYTRRKNRICYLQEIFSNEMAKVDDSFFHRLEESFLVEEDKKHERHPIFGNIVDEVAYHEKYPTIYHLRKKLVDSTDKADLRLIYLALAHMIKFRGHFLIEGDLNPDNSDVDKLFIQLVQTYNQLFEENPINASGVDAKAILSARLSKSRRLENLIAQLPGEKKNGLFGNLIALSLGLTPNFKSNFDLAEDAKLQLSKDTYDDDLDNLLAQIGDQYADLFLAAKNLSDAILLSDILRVNTEITKAPLSASMIKRYDEHHQDLTLLKALVRQQLPEKYKEIFFDQSKNGYAGYIDGGASQEEFYKFIKPILEKMDGTEELLVKLNREDLLRKQRTFDNGSIPHQIHLGELHAILRRQEDFYPFLKDNREKIEKILTFRIPYYVGPLARGNSRFAWMTRKSEETITPWNFEEVVDKGASAQSFIERMTNFDKNLPNEKVLPKHSLLYEYFTVYNELTKVKYVTEGMRKPAFLSGEQKKAIVDLLFKTNRKVTVKQLKEDYFKKIECFDSVEISGVEDRFNASLGTYHDLLKIIKDKDFLDNEENEDILEDIVLTLTLFEDREMIEERLKTYAHLFDDKVMKQLKRRRYTGWGRLSRKLINGIRDKQSGKTILDFLKSDGFANRNFMQLIHDDSLTFKEDIQKAQVSGQGDSLHEHIANLAGSPAIKKGILQTVKVVDELVKVMGRHKPENIVIEMARENQTTQKGQKNSRERMKRIEEGIKELGSQILKEHPVENTQLQNEKLYLYYLQNGRDMYVDQELDINRLSDYDVDHIVPQSFLKDDSIDNKVLTRSDKARGKSDNVPSEEVVKKMKNYWRQLLNAKLITQRKFDNLTKAERGGLSELDKAGFIKRQLVETRQITKHVAQILDSRMNTKYDENDKLIREVKVITLKSKLVSDFRKDFQFYKVREINNYHHAHDAYLNAVVGTALIKKYPKLESEFVYGDYKVYDVRKMIAKSEQEIGKATAKYFFYSNIMNFFKTEITLANGEIRKRPLIETNGETGEIVWDKGRDFATVRKVLSMPQVNIVKKTEVQTGGFSKESILPKRNSDKLIARKKDWDPKKYGGFDSPTVAYSVLVVAKVEKGKSKKLKSVKELLGITIMERSSFEKNPIDFLEAKGYKEVKKDLIIKLPKYSLFELENGRKRMLASAGELQKGNELALPSKYVNFLYLASHYEKLKGSPEDNEQKQLFVEQHKHYLDEIIEQISEFSKRVILADANLDKVLSAYNKHRDKPIREQAENIIHLFTLTNLGAPAAFKYFDTTIDRKRYTSTKEVLDATLIHQSITGLYETRIDLSQLGGDGGGGGGSGGGGSGGTLNLEDEYRLYETSAEPEVSPGSTWLSDFPQAWAETGGMGLAVRQAPLIIPLKATSTPVSIKQYPMSQEAKLGIKPHIQRLLDQGILVPCQSPWNTPLLPVKKPGTNDYRPVQDLREVNKRVEDIHPTVPNPYNLLSGLPPSHRWYTVLDLKDAFFCLRLHPTSQPLFAFEWRDPGMGISGQLTWTRLPQGFKNSPTLFNEALHRDLADFRIQHPDLILLQYVDDILLAATSELDCQQGTRALLLTLGNLGYRASAKKAQLCQKQVKYLGYLLKEGQRWLTEARKETVMGQPTPKTPRQLREFLGTAGFCRLWIPGFAEMAAPLYPLTKPGTLFNWGPDQQKAYQEIKQALLTAPALGLPDLTKPFELFVDEKQGYAKGVLTQKLGPWRRPVAYLSKKLDPVAAGWPPCLRMVAAIAVLRKDAGKLTMGQPLVILAPHAVEALVKQPPDRWLSNARMTHYQAMLLDTDRVQFGPVVALNPATLLPLPEEGAPHDCLEILAETHGTRPDLTDQPIPDADHTWYTDGSSFLQEGQRKAGAAVTTETEVIWARALPAGTSAQRAELIALTQALKMAEGKRLNVYTDSRYAFATAHIHGEIYRRRGWLTSEGREIKNKSEILALLKALFLPKRLSIIHCLGHQKGDSAEARGNRLADQAAREAAIKTPPDTSTLLAGKRTADGSEFEKRTADGSEFESPKKKAKVE

SEQ ID NO: 6125 - protein, 2095 aa, synthetic construct
MPAAKRVKLDGGDKKYSIGLDIGTNSVGWAVITDEYKVPSKKFKVLGNTDRHSIKKNLIGALLFDSGETAEATRLKRTARRRYTRRKNRICYLQEIFSNEMAKVDDSFFHRLEESFLVEEDKKHERHPIFGNIVDEVAYHEKYPTIYHLRKKLVDSTDKADLRLIYLALAHMIKFRGHFLIEGDLNPDNSDVDKLFIQLVQTYNQLFEENPINASGVDAKAILSARLSKSRRLENLIAQLPGEKKNGLFGNLIALSLGLTPNFKSNFDLAEDAKLQLSKDTYDDDLDNLLAQIGDQYADLFLAAKNLSDAILLSDILRVNTEITKAPLSASMIKRYDEHHQDLTLLKALVRQQLPEKYKEIFFDQSKNGYAGYIDGGASQEEFYKFIKPILEKMDGTEELLVKLNREDLLRKQRTFDNGSIPHQIHLGELHAILRRQEDFYPFLKDNREKIEKILTFRIPYYVGPLARGNSRFAWMTRKSEETITPWNFEEVVDKGASAQSFIERMTNFDKNLPNEKVLPKHSLLYEYFTVYNELTKVKYVTEGMRKPAFLSGEQKKAIVDLLFKTNRKVTVKQLKEDYFKKIECFDSVEISGVEDRFNASLGTYHDLLKIIKDKDFLDNEENEDILEDIVLTLTLFEDREMIEERLKTYAHLFDDKVMKQLKRRRYTGWGRLSRKLINGIRDKQSGKTILDFLKSDGFANRNFMQLIHDDSLTFKEDIQKAQVSGQGDSLHEHIANLAGSPAIKKGILQTVKVVDELVKVMGRHKPENIVIEMARENQTTQKGQKNSRERMKRIEEGIKELGSQILKEHPVENTQLQNEKLYLYYLQNGRDMYVDQELDINRLSDYDVDHIVPQSFLKDDSIDNKVLTRSDKARGKSDNVPSEEVVKKMKNYWRQLLNAKLITQRKFDNLTKAERGGLSELDKAGFIKRQLVETRQITKHVAQILDSRMNTKYDENDKLIREVKVITLKSKLVSDFRKDFQFYKVREINNYHHAHDAYLNAVVGTALIKKYPKLESEFVYGDYKVYDVRKMIAKSEQEIGKATAKYFFYSNIMNFFKTEITLANGEIRKRPLIETNGETGEIVWDKGRDFATVRKVLSMPQVNIVKKTEVQTGGFSKESILPKRNSDKLIARKKDWDPKKYGGFDSPTVAYSVLVVAKVEKGKSKKLKSVKELLGITIMERSSFEKNPIDFLEAKGYKEVKKDLIIKLPKYSLFELENGRKRMLASAGELQKGNELALPSKYVNFLYLASHYEKLKGSPEDNEQKQLFVEQHKHYLDEIIEQISEFSKRVILADANLDKVLSAYNKHRDKPIREQAENIIHLFTLTNLGAPAAFKYFDTTIDRKRYTSTKEVLDATLIHQSITGLYETRIDLSQLGGDGGGGGGSGGGGSGGTLNLEDEYRLYETSAEPEVSPGSTWLSDFPQAWAETGGMGLAVRQAPLIIPLKATSTPVSIKQYPMSQEAKLGIKPHIQRLLDQGILVPCQSPWNTPLLPVKKPGTNDYRPVQDLREVNKRVEDIHPTVPNPYNLLSGLPPSHRWYTVLDLKDAFFCLRLHPTSQPLFAFEWRDPGMGISGQLTWTRLPQGFKNSPTLFNEALHRDLADFRIQHPDLILLQYVDDILLAATSELDCQQGTRALLLTLGNLGYRASAKKAQLCQKQVKYLGYLLKEGQRWLTEARKETVMGQPTPKTPRQLREFLGKAGFCRLFIPGFAEMAAPLYPLTKPGTLFNWGPDQQKAYQEIKQALLTAPALGLPDLTKPFELFVDEKQGYAKGVLTQKLGPWRRPVAYLSKKLDPVAAGWPPCLRMVAAIAVLRKDAGKLTMGQPLVILAPHAVEALVKQPPDRWLSNARMTHYQAMLLDTDRVQFGPVVALNPATLLPLPEEGAPHDCLEILAETHGTRPDLTDQPIPDADHTWYTDGSSFLQEGQRKAGAAVTTETEVIWARALPAGTSAQRAELIALTQALKMAEGKRLNVYTDSRYAFATAHIHGEIYRRRGWLTSEGREIKNKSEILALLKALFLPKRLSIIHCLGHQKGDSAEARGNRLADQAAREAAIKTPPDTSTLLAGKRTADGSEFEKRTADGSEFESPKKKAKVE

SEQ ID NO: 6126 - protein, 2095 aa, synthetic construct
MPAAKRVKLDGGDKKYSIGLDIGTNSVGWAVITDEYKVPSKKFKVLGNTDRHSIKKNLIGALLFDSGETAEATRLKRTARRRYTRRKNRICYLQEIFSNEMAKVDDSFFHRLEESFLVEEDKKHERHPIFGNIVDEVAYHEKYPTIYHLRKKLVDSTDKADLRLIYLALAHMIKFRGHFLIEGDLNPDNSDVDKLFIQLVQTYNQLFEENPINASGVDAKAILSARLSKSRRLENLIAQLPGEKKNGLFGNLIALSLGLTPNFKSNFDLAEDAKLQLSKDTYDDDLDNLLAQIGDQYADLFLAAKNLSDAILLSDILRVNTEITKAPLSASMIKRYDEHHQDLTLLKALVRQQLPEKYKEIFFDQSKNGYAGYIDGGASQEEFYKFIKPILEKMDGTEELLVKLNREDLLRKQRTFDNGSIPHQIHLGELHAILRRQEDFYPFLKDNREKIEKILTFRIPYYVGPLARGNSRFAWMTRKSEETITPWNFEEVVDKGASAQSFIERMTNFDKNLPNEKVLPKHSLLYEYFTVYNELTKVKYVTEGMRKPAFLSGEQKKAIVDLLFKTNRKVTVKQLKEDYFKKIECFDSVEISGVEDRFNASLGTYHDLLKIIKDKDFLDNEENEDILEDIVLTLTLFEDREMIEERLKTYAHLFDDKVMKQLKRRRYTGWGRLSRKLINGIRDKQSGKTILDFLKSDGFANRNFMQLIHDDSLTFKEDIQKAQVSGQGDSLHEHIANLAGSPAIKKGILQTVKVVDELVKVMGRHKPENIVIEMARENQTTQKGQKNSRERMKRIEEGIKELGSQILKEHPVENTQLQNEKLYLYYLQNGRDMYVDQELDINRLSDYDVDHIVPQSFLKDDSIDNKVLTRSDKARGKSDNVPSEEVVKKMKNYWRQLLNAKLITQRKFDNLTKAERGGLSELDKAGFIKRQLVETRQITKHVAQILDSRMNTKYDENDKLIREVKVITLKSKLVSDFRKDFQFYKVREINNYHHAHDAYLNAVVGTALIKKYPKLESEFVYGDYKVYDVRKMIAKSEQEIGKATAKYFFYSNIMNFFKTEITLANGEIRKRPLIETNGETGEIVWDKGRDFATVRKVLSMPQVNIVKKTEVQTGGFSKESILPKRNSDKLIARKKDWDPKKYGGFDSPTVAYSVLVVAKVEKGKSKKLKSVKELLGITIMERSSFEKNPIDFLEAKGYKEVKKDLIIKLPKYSLFELENGRKRMLASAGELQKGNELALPSKYVNFLYLASHYEKLKGSPEDNEQKQLFVEQHKHYLDEIIEQISEFSKRVILADANLDKVLSAYNKHRDKPIREQAENIIHLFTLTNLGAPAAFKYFDTTIDRKRYTSTKEVLDATLIHQSITGLYETRIDLSQLGGDGGGGGGSGGGGSGGTLGIEDEYRLHETSTEPDVSLGSTWLSDFPQAWAETGGMGLAVRQAPLIIPLKATSTPVSIQQYPMSHEARLGIKPHIQRLLDQGILVPCQSPWNTPLLPVKKPGTNDYRPVQDLREVNKRVEDIHPTVPNPYNLLSGLPPSHQWYTVLDLKDAFFCLRLHPTSQPLFAFEWRDPGMGISGQLTWTRLPQGFKNSPTLFNEALHRDLADFRIQHPDLILLQYVDDILLAATSELDCQQGTRALLQTLGDLGYRASAKKAQICQKQVKYLGYLLREGQRWLTEARKETVMGQPVPKTPRQLREFLGTAGFCRLWIPGFAEMAAPLYPLTKPGTLFSWGPDQQKAYQEIKQALLTAPALGLPDLTKPFELFVDEKQGYAKGVLTQKLGPWRRPVAYLSKKLDPVAAGWPPCLRMVAAIAVLTKDAGKLTMGQPLVILAPHAVEALVKQPPDRWLSNARMTHYQAMLLDTDRVQFGPVVALNPATLLPLPEEGAPHDCLEILAETHGTRPDLTDQPIPDADHTWYTDGSSFLQEGQRKAGAAVTTETEVIWAGALPAGTSAQRAELIALTQALKMAEGKRLNVYTDSRYAFATAHIHGEIYRRRGWLTSEGREIKNKSEILALLKALFLPKRLSIIHCLGHQKGDSAEARGNRLADQAAREAAIKTPPDTSTLLAGKRTADGSEFEKRTADGSEFESPKKKAKVE

SEQ ID NO: 6127 - protein, 2095 aa, synthetic construct
MPAAKRVKLDGGDKKYSIGLDIGTNSVGWAVITDEYKVPSKKFKVLGNTDRHSIKKNLIGALLFDSGETAEATRLKRTARRRYTRRKNRICYLQEIFSNEMAKVDDSFFHRLEESFLVEEDKKHERHPIFGNIVDEVAYHEKYPTIYHLRKKLVDSTDKADLRLIYLALAHMIKFRGHFLIEGDLNPDNSDVDKLFIQLVQTYNQLFEENPINASGVDAKAILSARLSKSRRLENLIAQLPGEKKNGLFGNLIALSLGLTPNFKSNFDLAEDAKLQLSKDTYDDDLDNLLAQIGDQYADLFLAAKNLSDAILLSDILRVNTEITKAPLSASMIKRYDEHHQDLTLLKALVRQQLPEKYKEIFFDQSKNGYAGYIDGGASQEEFYKFIKPILEKMDGTEELLVKLNREDLLRKQRTFDNGSIPHQIHLGELHAILRRQEDFYPFLKDNREKIEKILTFRIPYYVGPLARGNSRFAWMTRKSEETITPWNFEEVVDKGASAQSFIERMTNFDKNLPNEKVLPKHSLLYEYFTVYNELTKVKYVTEGMRKPAFLSGEQKKAIVDLLFKTNRKVTVKQLKEDYFKKIECFDSVEISGVEDRFNASLGTYHDLLKIIKDKDFLDNEENEDILEDIVLTLTLFEDREMIEERLKTYAHLFDDKVMKQLKRRRYTGWGRLSRKLINGIRDKQSGKTILDFLKSDGFANRNFMQLIHDDSLTFKEDIQKAQVSGQGDSLHEHIANLAGSPAIKKGILQTVKVVDELVKVMGRHKPENIVIEMARENQTTQKGQKNSRERMKRIEEGIKELGSQILKEHPVENTQLQNEKLYLYYLQNGRDMYVDQELDINRLSDYDVDHIVPQSFLKDDSIDNKVLTRSDKARGKSDNVPSEEVVKKMKNYWRQLLNAKLITQRKFDNLTKAERGGLSELDKAGFIKRQLVETRQITKHVAQILDSRMNTKYDENDKLIREVKVITLKSKLVSDFRKDFQFYKVREINNYHHAHDAYLNAVVGTALIKKYPKLESEFVYGDYKVYDVRKMIAKSEQEIGKATAKYFFYSNIMNFFKTEITLANGEIRKRPLIETNGETGEIVWDKGRDFATVRKVLSMPQVNIVKKTEVQTGGFSKESILPKRNSDKLIARKKDWDPKKYGGFDSPTVAYSVLVVAKVEKGKSKKLKSVKELLGITIMERSSFEKNPIDFLEAKGYKEVKKDLIIKLPKYSLFELENGRKRMLASAGELQKGNELALPSKYVNFLYLASHYEKLKGSPEDNEQKQLFVEQHKHYLDEIIEQISEFSKRVILADANLDKVLSAYNKHRDKPIREQAENIIHLFTLTNLGAPAAFKYFDTTIDRKRYTSTKEVLDATLIHQSITGLYETRIDLSQLGGDGGGGGGSGGGGSGGTLNIEDEYRLHETSKGPDVPLGSTWLSDFPQAWAETGGMGLAFRQAPLIISLKATSTPVSIKQYPMSQEARLGIKPHIQRLLDQGILVPCQSPWNTPLLPVKKPGTNDYRPVQDLREVNKRVEDIHPTVPNPYNLLSGLPPSHQWYTVLDLKDAFFCLRLHPTSQSLFAFEWKDPEMGISGQLTWTRLPQGFKNSPTLFNEALHRDLADFRIQHPDLILLQYVDDLLLAATSELDCQQGTRALLQTLGDLGYRASAKKAQICQKQVKYLGYLLKEGQRWLTEARKETVMGQPTPKTPRQLREFLGTAGLCRLWIPGFAEMAAPLYPLTKPGTLFKWGPDQQKAYQEIKQALLTAPALGLPDLTKPFELFVDEKQGYAKGVLTQKLGPWRRPVAYLSKKLDPVAAGWPPCLRMVAAIAVLTKDVGKLTMGQPLVILAPHAVEALVKQPPDRWLSNARMTHYQALLLDTDRVQFGPIVALNPATLLPLPEEGLQHDCLDILAEAHGTRPDLTDQPLPDADHTWYTDGSSFLQEGQRRAGAAVTTETEVIWAKALPAGTSAQRAELIALTQALKMAAGKKLNVYTDSRYAFATAHIHGEIYRRRGWLTSEGKEIKNKDEILALLKALFLPKRLSIIHCPGHQKGNHAEARGNRMADQAAREVATRETPETSTLLAGKRTADGSEFEKRTADGSEFESPKKKAKVE

SEQ ID NO: 6128 - protein, 2086 aa, synthetic construct
MPAAKRVKLDGGDKKYSIGLDIGTNSVGWAVITDEYKVPSKKFKVLGNTDRHSIKKNLIGALLFDSGETAEATRLKRTARRRYTRRKNRICYLQEIFSNEMAKVDDSFFHRLEESFLVEEDKKHERHPIFGNIVDEVAYHEKYPTIYHLRKKLVDSTDKADLRLIYLALAHMIKFRGHFLIEGDLNPDNSDVDKLFIQLVQTYNQLFEENPINASGVDAKAILSARLSKSRRLENLIAQLPGEKKNGLFGNLIALSLGLTPNFKSNFDLAEDAKLQLSKDTYDDDLDNLLAQIGDQYADLFLAAKNLSDAILLSDILRVNTEITKAPLSASMIKRYDEHHQDLTLLKALVRQQLPEKYKEIFFDQSKNGYAGYIDGGASQEEFYKFIKPILEKMDGTEELLVKLNREDLLRKQRTFDNGSIPHQIHLGELHAILRRQEDFYPFLKDNREKIEKILTFRIPYYVGPLARGNSRFAWMTRKSEETITPWNFEEVVDKGASAQSFIERMTNFDKNLPNEKVLPKHSLLYEYFTVYNELTKVKYVTEGMRKPAFLSGEQKKAIVDLLFKTNRKVTVKQLKEDYFKKIECFDSVEISGVEDRFNASLGTYHDLLKIIKDKDFLDNEENEDILEDIVLTLTLFEDREMIEERLKTYAHLFDDKVMKQLKRRRYTGWGRLSRKLINGIRDKQSGKTILDFLKSDGFANRNFMQLIHDDSLTFKEDIQKAQVSGQGDSLHEHIANLAGSPAIKKGILQTVKVVDELVKVMGRHKPENIVIEMARENQTTQKGQKNSRERMKRIEEGIKELGSQILKEHPVENTQLQNEKLYLYYLQNGRDMYVDQELDINRLSDYDVDHIVPQSFLKDDSIDNKVLTRSDKARGKSDNVPSEEVVKKMKNYWRQLLNAKLITQRKFDNLTKAERGGLSELDKAGFIKRQLVETRQITKHVAQILDSRMNTKYDENDKLIREVKVITLKSKLVSDFRKDFQFYKVREINNYHHAHDAYLNAVVGTALIKKYPKLESEFVYGDYKVYDVRKMIAKSEQEIGKATAKYFFYSNIMNFFKTEITLANGEIRKRPLIETNGETGEIVWDKGRDFATVRKVLSMPQVNIVKKTEVQTGGFSKESILPKRNSDKLIARKKDWDPKKYGGFDSPTVAYSVLVVAKVEKGKSKKLKSVKELLGITIMERSSFEKNPIDFLEAKGYKEVKKDLIIKLPKYSLFELENGRKRMLASAGELQKGNELALPSKYVNFLYLASHYEKLKGSPEDNEQKQLFVEQHKHYLDEIIEQISEFSKRVILADANLDKVLSAYNKHRDKPIREQAENIIHLFTLTNLGAPAAFKYFDTTIDRKRYTSTKEVLDATLIHQSITGLYETRIDLSQLGGDGGGGGGSGGGGSGGVPWLMKKPLQLTVLVPLHEYQERLLQQTALPKEQKELLQKLFLKYDALWQHWENQVGHRRIKPHNIATGTLAPRPQKQYPINPKAKPSIQIVIDDLLKQGVLIQQNSTMNTPVYPVPKPDGKWRMVLDYREVNKTIPLIAAQNQHSAGILSSIYRGKYKTTLDLTNGFWAHPITPESYWLTAFTWQGKQYCWTRLPQGFLNSPALFTADVVDLLKEIPNVQAYVDDIYISHDDPQEHLEQLEKIFSILLNAGYVVSLKKSEIAQREVEFLGFNITKEGRGLTDTFKQKLLNITPPKDLKQLQSILGLLNFARNFIPNYSELVKPLYTIVANANGKFISWTEDNSNQLQHIISVLNQADNLEERNPETRLIIKVNSSPSAGYIRYYNEGSKRPIMYVNYIFSKAEAKFTQTEKLLTTMHKGLIKAMDLAMGQEILVYSPIVSMTKIQRTPLPERKALPVRWITWMTYLEDPRIQFHYDKSLPELQQIPNVTEDVIAKTKHPSEFAMVFYTDGSAIKHPDVNKSHSAGMGIAQVQFIPEYKIVHQWSIPLGDHTAQLAEIAAVEFACKKALKISGPVLIVTDSFYVAESANKELPYWKSNGFLNNKKKPLRHVSKWKSIAECLQLKPDIIIMHEKGHQQPMTTLHTEGNNLADKLATQGSYVVHAGKRTADGSEFEKRTADGSEFESPKKKAKVE

SEQ ID NO: 6129 - protein, 2102 aa, synthetic construct
MPAAKRVKLDGGDKKYSIGLDIGTNSVGWAVITDEYKVPSKKFKVLGNTDRHSIKKNLIGALLFDSGETAEATRLKRTARRRYTRRKNRICYLQEIFSNEMAKVDDSFFHRLEESFLVEEDKKHERHPIFGNIVDEVAYHEKYPTIYHLRKKLVDSTDKADLRLIYLALAHMIKFRGHFLIEGDLNPDNSDVDKLFIQLVQTYNQLFEENPINASGVDAKAILSARLSKSRRLENLIAQLPGEKKNGLFGNLIALSLGLTPNFKSNFDLAEDAKLQLSKDTYDDDLDNLLAQIGDQYADLFLAAKNLSDAILLSDILRVNTEITKAPLSASMIKRYDEHHQDLTLLKALVRQQLPEKYKEIFFDQSKNGYAGYIDGGASQEEFYKFIKPILEKMDGTEELLVKLNREDLLRKQRTFDNGSIPHQIHLGELHAILRRQEDFYPFLKDNREKIEKILTFRIPYYVGPLARGNSRFAWMTRKSEETITPWNFEEVVDKGASAQSFIERMTNFDKNLPNEKVLPKHSLLYEYFTVYNELTKVKYVTEGMRKPAFLSGEQKKAIVDLLFKTNRKVTVKQLKEDYFKKIECFDSVEISGVEDRFNASLGTYHDLLKIIKDKDFLDNEENEDILEDIVLTLTLFEDREMIEERLKTYAHLFDDKVMKQLKRRRYTGWGRLSRKLINGIRDKQSGKTILDFLKSDGFANRNFMQLIHDDSLTFKEDIQKAQVSGQGDSLHEHIANLAGSPAIKKGILQTVKVVDELVKVMGRHKPENIVIEMARENQTTQKGQKNSRERMKRIEEGIKELGSQILKEHPVENTQLQNEKLYLYYLQNGRDMYVDQELDINRLSDYDVDHIVPQSFLKDDSIDNKVLTRSDKARGKSDNVPSEEVVKKMKNYWRQLLNAKLITQRKFDNLTKAERGGLSELDKAGFIKRQLVETRQITKHVAQILDSRMNTKYDENDKLIREVKVITLKSKLVSDFRKDFQFYKVREINNYHHAHDAYLNAVVGTALIKKYPKLESEFVYGDYKVYDVRKMIAKSEQEIGKATAKYFFYSNIMNFFKTEITLANGEIRKRPLIETNGETGEIVWDKGRDFATVRKVLSMPQVNIVKKTEVQTGGFSKESILPKRNSDKLIARKKDWDPKKYGGFDSPTVAYSVLVVAKVEKGKSKKLKSVKELLGITIMERSSFEKNPIDFLEAKGYKEVKKDLIIKLPKYSLFELENGRKRMLASAGELQKGNELALPSKYVNFLYLASHYEKLKGSPEDNEQKQLFVEQHKHYLDEIIEQISEFSKRVILADANLDKVLSAYNKHRDKPIREQAENIIHLFTLTNLGAPAAFKYFDTTIDRKRYTSTKEVLDATLIHQSITGLYETRIDLSQLGGDGGGGGGSGGGGSGGGGSGGTAPLEEEYRLFLEAPIQNVTLLEQWKREIPKVWAEINPPGLASTQAPIHVQLLSTALPVRVRQYPITLEAKRSLRETIRKFRAAGILRPVHSPWNTPLLPVRKSGTSEYRMVQDLREVNKRVETIHPTVPNPYTLLSLLPPDRIWYSVLDLKDAFFCIPLAPESQLIFAFEWADAEEGESGQLTWTRLPQGFKNSPTLFNEALNRDLQGFRLDHPSVSLLQYVDDLLIAADTQAACLSATRDLLMTLAELGYRVSGKKAQLCQEEVTYLGFKIHKGSRSLSNSRTQAILQIPVPKTKRQVREFLGTIGYCRLWIPGFAELAQPLYAATRPGNDPLVWGEKEEEAFQSLKLALTQPPALALPSLDKPFQLFVEETSGAAKGVLTQALGPWKRPVAYLSKRLDPVAAGWPRCLRAIAAAALLTREASKLTFGQDIEITSSHNLESLLRSPPDKWLTNARITQYQVLLLDPPRVRFKQTAALNPATLLPETDDTLPIHHCLDTLDSLTSTRPDLTDQPLAQAEATLFTDGSSYIRDGKRYAGAAVVTLDSVIWAEPLPIGTSAQKAELIALTKALEWSKDKSVNIYTDSRYAFATLHVHGMIYRERGWLTAGGKAIKNAPEILALLTAVWLPKRVAVMHCKGHQKDDAPTSTGNRRADEVAREVAIRPLSTQATISAGKRTADGSEFEKRTADGSEFESPKKKAKVE

SEQ ID NO: 6130 - protein, 2102 aa, synthetic construct
MPAAKRVKLDGGDKKYSIGLDIGTNSVGWAVITDEYKVPSKKFKVLGNTDRHSIKKNLIGALLFDSGETAEATRLKRTARRRYTRRKNRICYLQEIFSNEMAKVDDSFFHRLEESFLVEEDKKHERHPIFGNIVDEVAYHEKYPTIYHLRKKLVDSTDKADLRLIYLALAHMIKFRGHFLIEGDLNPDNSDVDKLFIQLVQTYNQLFEENPINASGVDAKAILSARLSKSRRLENLIAQLPGEKKNGLFGNLIALSLGLTPNFKSNFDLAEDAKLQLSKDTYDDDLDNLLAQIGDQYADLFLAAKNLSDAILLSDILRVNTEITKAPLSASMIKRYDEHHQDLTLLKALVRQQLPEKYKEIFFDQSKNGYAGYIDGGASQEEFYKFIKPILEKMDGTEELLVKLNREDLLRKQRTFDNGSIPHQIHLGELHAILRRQEDFYPFLKDNREKIEKILTFRIPYYVGPLARGNSRFAWMTRKSEETITPWNFEEVVDKGASAQSFIERMTNFDKNLPNEKVLPKHSLLYEYFTVYNELTKVKYVTEGMRKPAFLSGEQKKAIVDLLFKTNRKVTVKQLKEDYFKKIECFDSVEISGVEDRFNASLGTYHDLLKIIKDKDFLDNEENEDILEDIVLTLTLFEDREMIEERLKTYAHLFDDKVMKQLKRRRYTGWGRLSRKLINGIRDKQSGKTILDFLKSDGFANRNFMQLIHDDSLTFKEDIQKAQVSGQGDSLHEHIANLAGSPAIKKGILQTVKVVDELVKVMGRHKPENIVIEMARENQTTQKGQKNSRERMKRIEEGIKELGSQILKEHPVENTQLQNEKLYLYYLQNGRDMYVDQELDINRLSDYDVDHIVPQSFLKDDSIDNKVLTRSDKARGKSDNVPSEEVVKKMKNYWRQLLNAKLITQRKFDNLTKAERGGLSELDKAGFIKRQLVETRQITKHVAQILDSRMNTKYDENDKLIREVKVITLKSKLVSDFRKDFQFYKVREINNYHHAHDAYLNAVVGTALIKKYPKLESEFVYGDYKVYDVRKMIAKSEQEIGKATAKYFFYSNIMNFFKTEITLANGEIRKRPLIETNGETGEIVWDKGRDFATVRKVLSMPQVNIVKKTEVQTGGFSKESILPKRNSDKLIARKKDWDPKKYGGFDSPTVAYSVLVVAKVEKGKSKKLKSVKELLGITIMERSSFEKNPIDFLEAKGYKEVKKDLIIKLPKYSLFELENGRKRMLASAGELQKGNELALPSKYVNFLYLASHYEKLKGSPEDNEQKQLFVEQHKHYLDEIIEQISEFSKRVILADANLDKVLSAYNKHRDKPIREQAENIIHLFTLTNLGAPAAFKYFDTTIDRKRYTSTKEVLDATLIHQSITGLYETRIDLSQLGGDGGGGGGSGGGGSGGGGSGGTAPLEEEYRLFLEAPIQNVTLLEQWKREIPKVWAEINPPGLASTQAPIHVQLLSTALPVRVRQYPITLEAKRSLRETIRKFRAAGILRPVHSPWNTPLLPVRKSGTSEYRMVQDLREVNKRVETIHPTVPNPYTLLSLLPPDRIWYSVLDLKDAFFCIPLAPESQLIFAFEWADAEEGESGQLTWTRLPQGFKNSPTLFNEALNRDLQGFRLDHPSVSLLQYVDDLLIAADTQAACLSATRDLLMTLAELGYRVSGKKAQLCQEEVTYLGFKIHKGSRSLSNSRTQAILQIPVPKTKRQVREFLGKIGYCRLFIPGFAELAQPLYAATRPGNDPLVWGEKEEEAFQSLKLALTQPPALALPSLDKPFQLFVEETSGAAKGVLTQALGPWKRPVAYLSKRLDPVAAGWPRCLRAIAAAALLTREASKLTFGQDIEITSSHNLESLLRSPPDKWLTNARITQYQVLLLDPPRVRFKQTAALNPATLLPETDDTLPIHHCLDTLDSLTSTRPDLTDQPLAQAEATLFTDGSSYIRDGKRYAGAAVVTLDSVIWAEPLPIGTSAQKAELIALTKALEWSKDKSVNIYTDSRYAFATLHVHGMIYRERGWLTAGGKAIKNAPEILALLTAVWLPKRVAVMHCKGHQKDDAPTSTGNRRADEVAREVAIRPLSTQATISAGKRTADGSEFEKRTADGSEFESPKKKAKVE

SEQ ID NO: 6131 - protein, 2106 aa, synthetic construct
MPAAKRVKLDGGDKKYSIGLDIGTNSVGWAVITDEYKVPSKKFKVLGNTDRHSIKKNLIGALLFDSGETAEATRLKRTARRRYTRRKNRICYLQEIFSNEMAKVDDSFFHRLEESFLVEEDKKHERHPIFGNIVDEVAYHEKYPTIYHLRKKLVDSTDKADLRLIYLALAHMIKFRGHFLIEGDLNPDNSDVDKLFIQLVQTYNQLFEENPINASGVDAKAILSARLSKSRRLENLIAQLPGEKKNGLFGNLIALSLGLTPNFKSNFDLAEDAKLQLSKDTYDDDLDNLLAQIGDQYADLFLAAKNLSDAILLSDILRVNTEITKAPLSASMIKRYDEHHQDLTLLKALVRQQLPEKYKEIFFDQSKNGYAGYIDGGASQEEFYKFIKPILEKMDGTEELLVKLNREDLLRKQRTFDNGSIPHQIHLGELHAILRRQEDFYPFLKDNREKIEKILTFRIPYYVGPLARGNSRFAWMTRKSEETITPWNFEEVVDKGASAQSFIERMTNFDKNLPNEKVLPKHSLLYEYFTVYNELTKVKYVTEGMRKPAFLSGEQKKAIVDLLFKTNRKVTVKQLKEDYFKKIECFDSVEISGVEDRFNASLGTYHDLLKIIKDKDFLDNEENEDILEDIVLTLTLFEDREMIEERLKTYAHLFDDKVMKQLKRRRYTGWGRLSRKLINGIRDKQSGKTILDFLKSDGFANRNFMQLIHDDSLTFKEDIQKAQVSGQGDSLHEHIANLAGSPAIKKGILQTVKVVDELVKVMGRHKPENIVIEMARENQTTQKGQKNSRERMKRIEEGIKELGSQILKEHPVENTQLQNEKLYLYYLQNGRDMYVDQELDINRLSDYDVDHIVPQSFLKDDSIDNKVLTRSDKARGKSDNVPSEEVVKKMKNYWRQLLNAKLITQRKFDNLTKAERGGLSELDKAGFIKRQLVETRQITKHVAQILDSRMNTKYDENDKLIREVKVITLKSKLVSDFRKDFQFYKVREINNYHHAHDAYLNAVVGTALIKKYPKLESEFVYGDYKVYDVRKMIAKSEQEIGKATAKYFFYSNIMNFFKTEITLANGEIRKRPLIETNGETGEIVWDKGRDFATVRKVLSMPQVNIVKKTEVQTGGFSKESILPKRNSDKLIARKKDWDPKKYGGFDSPTVAYSVLVVAKVEKGKSKKLKSVKELLGITIMERSSFEKNPIDFLEAKGYKEVKKDLIIKLPKYSLFELENGRKRMLASAGELQKGNELALPSKYVNFLYLASHYEKLKGSPEDNEQKQLFVEQHKHYLDEIIEQISEFSKRVILADANLDKVLSAYNKHRDKPIREQAENIIHLFTLTNLGAPAAFKYFDTTIDRKRYTSTKEVLDATLIHQSITGLYETRIDLSQLGGDGGGGGGSGGGGSGGGGSGGTVSLQDEHRLFDIPVTTSLPDVWLQDFPQAWAETGGLGRAKCQAPIIIDLKPTAVPVSIKQYPMSLEAHMGIRQHIIKFLELGVLRPCRSPWNTPLLPVKKPGTQDYRPVQDLREINKRTVDIHPTVPNPYNLLSTLKPDYSWYTVLDLKDAFFCLPLAPQSQELFAFEWKDPERGISGQLTWTRLPQGFKNSPTLFNEALHRDLTDFRTQHPEVTLLQYVDDLLLAAPTKKACTQGTRHLLQELGEKGYRASAKKAQICQTKVTYLGYILSEGKRWLTPGRIETVARIPPPRNPREVREFLGTAGFCRLWIPGFAELAAPLYALTKPSTPFTWQTEHQLAFEALKKALLSAPALGLPDTSKPFTLFLDERQGIAKGVLTQKLGPWKRPVAYLSKKLDPVAAGWPPCLRIMAATAMLVKDSAKLTLGQPLTVITPHTLEAIVRQPPDRWITNARLTHYQALLLDTDRVQFGPPVTLNPATLLPVPENQPSPHDCRQVLAETHGTREDLKDQELPDADHTWYTDGSSYLDSGTRRAGAAVVDGHNTIWAQSLPPGTSAQKAELIALTKALELSKGKKANIYTDSRYAFATAHTHGSIYERRGWLTSEGKEIKNKAEIIALLKALFLPQEVAIIHCPGHQKGQDPVAVGNRQADRVARQAAMAEVLTLATEPDNTSHITAGKRTADGSEFEKRTADGSEFESPKKKAKVE

SEQ ID NO: 6132 - protein, 2091 aa, synthetic construct
MPAAKRVKLDGGDKKYSIGLDIGTNSVGWAVITDEYKVPSKKFKVLGNTDRHSIKKNLIGALLFDSGETAEATRLKRTARRRYTRRKNRICYLQEIFSNEMAKVDDSFFHRLEESFLVEEDKKHERHPIFGNIVDEVAYHEKYPTIYHLRKKLVDSTDKADLRLIYLALAHMIKFRGHFLIEGDLNPDNSDVDKLFIQLVQTYNQLFEENPINASGVDAKAILSARLSKSRRLENLIAQLPGEKKNGLFGNLIALSLGLTPNFKSNFDLAEDAKLQLSKDTYDDDLDNLLAQIGDQYADLFLAAKNLSDAILLSDILRVNTEITKAPLSASMIKRYDEHHQDLTLLKALVRQQLPEKYKEIFFDQSKNGYAGYIDGGASQEEFYKFIKPILEKMDGTEELLVKLNREDLLRKQRTFDNGSIPHQIHLGELHAILRRQEDFYPFLKDNREKIEKILTFRIPYYVGPLARGNSRFAWMTRKSEETITPWNFEEVVDKGASAQSFIERMTNFDKNLPNEKVLPKHSLLYEYFTVYNELTKVKYVTEGMRKPAFLSGEQKKAIVDLLFKTNRKVTVKQLKEDYFKKIECFDSVEISGVEDRFNASLGTYHDLLKIIKDKDFLDNEENEDILEDIVLTLTLFEDREMIEERLKTYAHLFDDKVMKQLKRRRYTGWGRLSRKLINGIRDKQSGKTILDFLKSDGFANRNFMQLIHDDSLTFKEDIQKAQVSGQGDSLHEHIANLAGSPAIKKGILQTVKVVDELVKVMGRHKPENIVIEMARENQTTQKGQKNSRERMKRIEEGIKELGSQILKEHPVENTQLQNEKLYLYYLQNGRDMYVDQELDINRLSDYDVDHIVPQSFLKDDSIDNKVLTRSDKARGKSDNVPSEEVVKKMKNYWRQLLNAKLITQRKFDNLTKAERGGLSELDKAGFIKRQLVETRQITKHVAQILDSRMNTKYDENDKLIREVKVITLKSKLVSDFRKDFQFYKVREINNYHHAHDAYLNAVVGTALIKKYPKLESEFVYGDYKVYDVRKMIAKSEQEIGKATAKYFFYSNIMNFFKTEITLANGEIRKRPLIETNGETGEIVWDKGRDFATVRKVLSMPQVNIVKKTEVQTGGFSKESILPKRNSDKLIARKKDWDPKKYGGFDSPTVAYSVLVVAKVEKGKSKKLKSVKELLGITIMERSSFEKNPIDFLEAKGYKEVKKDLIIKLPKYSLFELENGRKRMLASAGELQKGNELALPSKYVNFLYLASHYEKLKGSPEDNEQKQLFVEQHKHYLDEIIEQISEFSKRVILADANLDKVLSAYNKHRDKPIREQAENIIHLFTLTNLGAPAAFKYFDTTIDRKRYTSTKEVLDATLIHQSITGLYETRIDLSQLGGDGGGGGGSGGGGSGGGGSGGVPWLTQQPLQLTILVPLQEYQEKILSKTALPEDQKQQLKTLFVKYDNLWQHWENQVGHRKIRPHNIATGDYPPRPQKQYPINPKAKPSIQIVIDDLLKQGVLTPQNSTMNTPVYPVPKPDGRWRMVLDYREVNKTIPLTAAQNQHSAGILATIVRQKYKTTLDLANGFWAHPITPESYWLTAFTWQGKQYCWTRLPQGFLNSPALFNADVVDLLKEIPNVQVYVDDIYLSHDDPKEHVQQLEKVFQILLQAGYVVSLKKSEIGQKTVEFLGFNITKEGRGLTDTFKTKLLNITPPKDLKQLQSILGLLNFARNFIPNFAELVQPLYNLIAPAKGKYIEWSEENTKQLNMVIEALNTASNLEERLPEQRLVIKVNTSPSAGYVRYYNETGKKPIMYLNYVFSKAELKFSMLEKLLTTMHKALIKAMDLAMGQEILVYSPIVSMTKIQKTPLPERKALPIRWITWMTYLEDPRIQFHYDKTLPELKHIPDVYTSSQSPVKHPSQYEGVFYTDGSAIKSPDPTKSNNAGMGIVHATYKPEYQVLNQWSIPLGNHTAQMAEIAAVEFACKKALKIPGPVLVITDSFYVAESANKELPYWKSNGFVNNKKKPLKHISKWKSIAECLSMKPDITIQHEKGISLQIPVFILKGNALADKLATQGSYVVNAGKRTADGSEFEKRTADGSEFESPKKKAKVE

SEQ ID NO: 6133 - protein, 2222 aa, synthetic construct
MPAAKRVKLDGGDKKYSIGLDIGTNSVGWAVITDEYKVPSKKFKVLGNTDRHSIKKNLIGALLFDSGETAEATRLKRTARRRYTRRKNRICYLQEIFSNEMAKVDDSFFHRLEESFLVEEDKKHERHPIFGNIVDEVAYHEKYPTIYHLRKKLVDSTDKADLRLIYLALAHMIKFRGHFLIEGDLNPDNSDVDKLFIQLVQTYNQLFEENPINASGVDAKAILSARLSKSRRLENLIAQLPGEKKNGLFGNLIALSLGLTPNFKSNFDLAEDAKLQLSKDTYDDDLDNLLAQIGDQYADLFLAAKNLSDAILLSDILRVNTEITKAPLSASMIKRYDEHHQDLTLLKALVRQQLPEKYKEIFFDQSKNGYAGYIDGGASQEEFYKFIKPILEKMDGTEELLVKLNREDLLRKQRTFDNGSIPHQIHLGELHAILRRQEDFYPFLKDNREKIEKILTFRIPYYVGPLARGNSRFAWMTRKSEETITPWNFEEVVDKGASAQSFIERMTNFDKNLPNEKVLPKHSLLYEYFTVYNELTKVKYVTEGMRKPAFLSGEQKKAIVDLLFKTNRKVTVKQLKEDYFKKIECFDSVEISGVEDRFNASLGTYHDLLKIIKDKDFLDNEENEDILEDIVLTLTLFEDREMIEERLKTYAHLFDDKVMKQLKRRRYTGWGRLSRKLINGIRDKQSGKTILDFLKSDGFANRNFMQLIHDDSLTFKEDIQKAQVSGQGDSLHEHIANLAGSPAIKKGILQTVKVVDELVKVMGRHKPENIVIEMARENQTTQKGQKNSRERMKRIEEGIKELGSQILKEHPVENTQLQNEKLYLYYLQNGRDMYVDQELDINRLSDYDVDHIVPQSFLKDDSIDNKVLTRSDKARGKSDNVPSEEVVKKMKNYWRQLLNAKLITQRKFDNLTKAERGGLSELDKAGFIKRQLVETRQITKHVAQILDSRMNTKYDENDKLIREVKVITLKSKLVSDFRKDFQFYKVREINNYHHAHDAYLNAVVGTALIKKYPKLESEFVYGDYKVYDVRKMIAKSEQEIGKATAKYFFYSNIMNFFKTEITLANGEIRKRPLIETNGETGEIVWDKGRDFATVRKVLSMPQVNIVKKTEVQTGGFSKESILPKRNSDKLIARKKDWDPKKYGGFDSPTVAYSVLVVAKVEKGKSKKLKSVKELLGITIMERSSFEKNPIDFLEAKGYKEVKKDLIIKLPKYSLFELENGRKRMLASAGELQKGNELALPSKYVNFLYLASHYEKLKGSPEDNEQKQLFVEQHKHYLDEIIEQISEFSKRVILADANLDKVLSAYNKHRDKPIREQAENIIHLFTLTNLGAPAAFKYFDTTIDRKRYTSTKEVLDATLIHQSITGLYETRIDLSQLGGDGGGGGGSGGGGSGGGGSGGTLGDQGSRGSDPLPEPRVTLTVEGIPTEFLVNTGAEHSVLTKPMGKMGSKRTVVAGATGSKVYPWTTKRLLKIGQKQVTHSFLVIPECPAPLLGRDLLTKLKAQIQFSTEGPQVTWEDRPAMCLVLNLEEEYRLHEKPVPPSIDPSWLQLFPMVWAEKAGMGLANQVPPVVVELKSDASPVAVRQYPMSKEAREGIRPHIQRFLDLGILVPCQSPWNTPLLPVKKPGTNDYRPVQDLREVNKRVQDIHPTVPNPYNLLSSLPPSHTWYSVLDLKDAFFCLKLHPNSQPLFAFEWRDPEKGNTGQLTWTRLPQGFKNSPTLFNEALHRDLASFRALNPQVVMLQYVDDLLVAAPTYRDCKEGTRRLLQELSKLGYRVSAKKAQLCREEVTYLGYLLKGGKRWLTPARKATVMKIPTPTTPRQVREFLGKAGFCRLFIPGFASLAAPLYPLTRPKVPFTWTEAHQEAFGRIKEALLSAPALALPDLTKPFALYVDEKEGVARGVLTQTLGPWRRPVAYLSKKLDPVASGWPTCLKAIAAVALLLKDADKLTLGQNVLVIAPHNLESIVRQPPDRWMTNARMTHYQSLLLNERVSFAPPAILNPATLLPVESDDTPIHICSEILAEETGTRPDLRDQPLPGVPAWYTDGSSFIMDGRRQAGAAIVDNKRTVWASNLPEGTSAQKAELIALTQALRLAEGKSINIYTDSRYAFATAHVHGAIYKQRGWLTSAGKDIKNKEEILALLEAIHLPKRVAIIHCPGHQRGTDPVATGNRKADEAAKQAAQSTRILTETTKNAGKRTADGSEFEKRTADGSEFESPKKKAKVE

SEQ ID NO: 6134 - protein, 2100 aa, synthetic construct
MPAAKRVKLDGGDKKYSIGLDIGTNSVGWAVITDEYKVPSKKFKVLGNTDRHSIKKNLIGALLFDSGETAEATRLKRTARRRYTRRKNRICYLQEIFSNEMAKVDDSFFHRLEESFLVEEDKKHERHPIFGNIVDEVAYHEKYPTIYHLRKKLVDSTDKADLRLIYLALAHMIKFRGHFLIEGDLNPDNSDVDKLFIQLVQTYNQLFEENPINASGVDAKAILSARLSKSRRLENLIAQLPGEKKNGLFGNLIALSLGLTPNFKSNFDLAEDAKLQLSKDTYDDDLDNLLAQIGDQYADLFLAAKNLSDAILLSDILRVNTEITKAPLSASMIKRYDEHHQDLTLLKALVRQQLPEKYKEIFFDQSKNGYAGYIDGGASQEEFYKFIKPILEKMDGTEELLVKLNREDLLRKQRTFDNGSIPHQIHLGELHAILRRQEDFYPFLKDNREKIEKILTFRIPYYVGPLARGNSRFAWMTRKSEETITPWNFEEVVDKGASAQSFIERMTNFDKNLPNEKVLPKHSLLYEYFTVYNELTKVKYVTEGMRKPAFLSGEQKKAIVDLLFKTNRKVTVKQLKEDYFKKIECFDSVEISGVEDRFNASLGTYHDLLKIIKDKDFLDNEENEDILEDIVLTLTLFEDREMIEERLKTYAHLFDDKVMKQLKRRRYTGWGRLSRKLINGIRDKQSGKTILDFLKSDGFANRNFMQLIHDDSLTFKEDIQKAQVSGQGDSLHEHIANLAGSPAIKKGILQTVKVVDELVKVMGRHKPENIVIEMARENQTTQKGQKNSRERMKRIEEGIKELGSQILKEHPVENTQLQNEKLYLYYLQNGRDMYVDQELDINRLSDYDVDHIVPQSFLKDDSIDNKVLTRSDKARGKSDNVPSEEVVKKMKNYWRQLLNAKLITQRKFDNLTKAERGGLSELDKAGFIKRQLVETRQITKHVAQILDSRMNTKYDENDKLIREVKVITLKSKLVSDFRKDFQFYKVREINNYHHAHDAYLNAVVGTALIKKYPKLESEFVYGDYKVYDVRKMIAKSEQEIGKATAKYFFYSNIMNFFKTEITLANGEIRKRPLIETNGETGEIVWDKGRDFATVRKVLSMPQVNIVKKTEVQTGGFSKESILPKRNSDKLIARKKDWDPKKYGGFDSPTVAYSVLVVAKVEKGKSKKLKSVKELLGITIMERSSFEKNPIDFLEAKGYKEVKKDLIIKLPKYSLFELENGRKRMLASAGELQKGNELALPSKYVNFLYLASHYEKLKGSPEDNEQKQLFVEQHKHYLDEIIEQISEFSKRVILADANLDKVLSAYNKHRDKPIREQAENIIHLFTLTNLGAPAAFKYFDTTIDRKRYTSTKEVLDATLIHQSITGLYETRIDLSQLGGDGGGGGGSGGGGSGGGGSGGTLNLEDEYRLYETSAEPEVSPGSTWLSDFPQAWAETGGMGLAVRQAPLIIPLKATSTPVSIKQYPMSQEAKLGIKPHIQRLLDQGILVPCQSPWNTPLLPVKKPGTNDYRPVQDLREVNKRVEDIHPTVPNPYNLLSGLPPSHRWYTVLDLKDAFFCLRLHPTSQPLFAFEWRDPGMGISGQLTWTRLPQGFKNSPTLFNEALHRDLADFRIQHPDLILLQYVDDILLAATSELDCQQGTRALLLTLGNLGYRASAKKAQLCQKQVKYLGYLLKEGQRWLTEARKETVMGQPTPKTPRQLREFLGTAGFCRLWIPGFAEMAAPLYPLTKPGTLFNWGPDQQKAYQEIKQALLTAPALGLPDLTKPFELFVDEKQGYAKGVLTQKLGPWRRPVAYLSKKLDPVAAGWPPCLRMVAAIAVLRKDAGKLTMGQPLVILAPHAVEALVKQPPDRWLSNARMTHYQAMLLDTDRVQFGPVVALNPATLLPLPEEGAPHDCLEILAETHGTRPDLTDQPIPDADHTWYTDGSSFLQEGQRKAGAAVTTETEVIWARALPAGTSAQRAELIALTQALKMAEGKRLNVYTDSRYAFATAHIHGEIYRRRGWLTSEGREIKNKSEILALLKALFLPKRLSIIHCLGHQKGDSAEARGNRLADQAAREAAIKTPPDTSTLLAGKRTADGSEFEKRTADGSEFESPKKKAKVE

SEQ ID NO: 6135 - protein, 2100 aa, synthetic construct
MPAAKRVKLDGGDKKYSIGLDIGTNSVGWAVITDEYKVPSKKFKVLGNTDRHSIKKNLIGALLFDSGETAEATRLKRTARRRYTRRKNRICYLQEIFSNEMAKVDDSFFHRLEESFLVEEDKKHERHPIFGNIVDEVAYHEKYPTIYHLRKKLVDSTDKADLRLIYLALAHMIKFRGHFLIEGDLNPDNSDVDKLFIQLVQTYNQLFEENPINASGVDAKAILSARLSKSRRLENLIAQLPGEKKNGLFGNLIALSLGLTPNFKSNFDLAEDAKLQLSKDTYDDDLDNLLAQIGDQYADLFLAAKNLSDAILLSDILRVNTEITKAPLSASMIKRYDEHHQDLTLLKALVRQQLPEKYKEIFFDQSKNGYAGYIDGGASQEEFYKFIKPILEKMDGTEELLVKLNREDLLRKQRTFDNGSIPHQIHLGELHAILRRQEDFYPFLKDNREKIEKILTFRIPYYVGPLARGNSRFAWMTRKSEETITPWNFEEVVDKGASAQSFIERMTNFDKNLPNEKVLPKHSLLYEYFTVYNELTKVKYVTEGMRKPAFLSGEQKKAIVDLLFKTNRKVTVKQLKEDYFKKIECFDSVEISGVEDRFNASLGTYHDLLKIIKDKDFLDNEENEDILEDIVLTLTLFEDREMIEERLKTYAHLFDDKVMKQLKRRRYTGWGRLSRKLINGIRDKQSGKTILDFLKSDGFANRNFMQLIHDDSLTFKEDIQKAQVSGQGDSLHEHIANLAGSPAIKKGILQTVKVVDELVKVMGRHKPENIVIEMARENQTTQKGQKNSRERMKRIEEGIKELGSQILKEHPVENTQLQNEKLYLYYLQNGRDMYVDQELDINRLSDYDVDHIVPQSFLKDDSIDNKVLTRSDKARGKSDNVPSEEVVKKMKNYWRQLLNAKLITQRKFDNLTKAERGGLSELDKAGFIKRQLVETRQITKHVAQILDSRMNTKYDENDKLIREVKVITLKSKLVSDFRKDFQFYKVREINNYHHAHDAYLNAVVGTALIKKYPKLESEFVYGDYKVYDVRKMIAKSEQEIGKATAKYFFYSNIMNFFKTEITLANGEIRKRPLIETNGETGEIVWDKGRDFATVRKVLSMPQVNIVKKTEVQTGGFSKESILPKRNSDKLIARKKDWDPKKYGGFDSPTVAYSVLVVAKVEKGKSKKLKSVKELLGITIMERSSFEKNPIDFLEAKGYKEVKKDLIIKLPKYSLFELENGRKRMLASAGELQKGNELALPSKYVNFLYLASHYEKLKGSPEDNEQKQLFVEQHKHYLDEIIEQISEFSKRVILADANLDKVLSAYNKHRDKPIREQAENIIHLFTLTNLGAPAAFKYFDTTIDRKRYTSTKEVLDATLIHQSITGLYETRIDLSQLGGDGGGGGGSGGGGSGGGGSGGTLNIEDEYRLHETSKEPDVSLGSTWLSDFPQAWAETGGMGLAVRQAPLIIPLKATSTPVSIKQYPMSQEARLGIKPHIQRLLDQGILVPCQSPWNTPLLPVKKPGTNDYRPVQDLREVNKRVEDIHPTVPNPYNLLSGLPPSHQWYTVLDLKDAFFCLRLHPTSQPLFAFEWRDPEMGISGQLTWTRLPQGFKNSPTLFDEALHRDLAGFRIQHPDLILLQYVDDLLLAATSELDCQQGTRALLQTLGDLGYRASAKKAQICQKQVKYLGYLLKEGQRWLTEARKETVMGQPIPKTPRQLREFLGTAGFCRLWIPGFAEMAAPLYPLTKTGTLFNWGPDQQKAFQEIKQALLTAPALGLPDLTKPFELFVDEKQGYAKGVLTQKLGPWRRPVAYLSKKLDPVAAGWPPCLRMVAAIAVLTKDAGKLTMGQPLVILAPHAVEALVKQPPDRWLSNARMTHYQALLLDTDRVQFGPVVALNPATLLPLPEEGLQHDCLDILAEAHGTRSDLMDQPLPDADHTWYTDGSSFLQEGQRKAGAAVTTETEVIWARALPAGTSAQRAELIALTQALKMAEGKKLNVYTDSRYAFATAHIHGEIYRRRGLLTSEGKEIKNKDEILALLKALFLPKRLSIIHCPGHQKGNSAEARGNRMADQAAREVATRETPETSTLLAGKRTADGSEFEKRTADGSEFESPKKKAKVE

SEQ ID NO: 6136 - protein, 2100 aa, synthetic construct
MPAAKRVKLDGGDKKYSIGLDIGTNSVGWAVITDEYKVPSKKFKVLGNTDRHSIKKNLIGALLFDSGETAEATRLKRTARRRYTRRKNRICYLQEIFSNEMAKVDDSFFHRLEESFLVEEDKKHERHPIFGNIVDEVAYHEKYPTIYHLRKKLVDSTDKADLRLIYLALAHMIKFRGHFLIEGDLNPDNSDVDKLFIQLVQTYNQLFEENPINASGVDAKAILSARLSKSRRLENLIAQLPGEKKNGLFGNLIALSLGLTPNFKSNFDLAEDAKLQLSKDTYDDDLDNLLAQIGDQYADLFLAAKNLSDAILLSDILRVNTEITKAPLSASMIKRYDEHHQDLTLLKALVRQQLPEKYKEIFFDQSKNGYAGYIDGGASQEEFYKFIKPILEKMDGTEELLVKLNREDLLRKQRTFDNGSIPHQIHLGELHAILRRQEDFYPFLKDNREKIEKILTFRIPYYVGPLARGNSRFAWMTRKSEETITPWNFEEVVDKGASAQSFIERMTNFDKNLPNEKVLPKHSLLYEYFTVYNELTKVKYVTEGMRKPAFLSGEQKKAIVDLLFKTNRKVTVKQLKEDYFKKIECFDSVEISGVEDRFNASLGTYHDLLKIIKDKDFLDNEENEDILEDIVLTLTLFEDREMIEERLKTYAHLFDDKVMKQLKRRRYTGWGRLSRKLINGIRDKQSGKTILDFLKSDGFANRNFMQLIHDDSLTFKEDIQKAQVSGQGDSLHEHIANLAGSPAIKKGILQTVKVVDELVKVMGRHKPENIVIEMARENQTTQKGQKNSRERMKRIEEGIKELGSQILKEHPVENTQLQNEKLYLYYLQNGRDMYVDQELDINRLSDYDVDHIVPQSFLKDDSIDNKVLTRSDKARGKSDNVPSEEVVKKMKNYWRQLLNAKLITQRKFDNLTKAERGGLSELDKAGFIKRQLVETRQITKHVAQILDSRMNTKYDENDKLIREVKVITLKSKLVSDFRKDFQFYKVREINNYHHAHDAYLNAVVGTALIKKYPKLESEFVYGDYKVYDVRKMIAKSEQEIGKATAKYFFYSNIMNFFKTEITLANGEIRKRPLIETNGETGEIVWDKGRDFATVRKVLSMPQVNIVKKTEVQTGGFSKESILPKRNSDKLIARKKDWDPKKYGGFDSPTVAYSVLVVAKVEKGKSKKLKSVKELLGITIMERSSFEKNPIDFLEAKGYKEVKKDLIIKLPKYSLFELENGRKRMLASAGELQKGNELALPSKYVNFLYLASHYEKLKGSPEDNEQKQLFVEQHKHYLDEIIEQISEFSKRVILADANLDKVLSAYNKHRDKPIREQAENIIHLFTLTNLGAPAAFKYFDTTIDRKRYTSTKEVLDATLIHQSITGLYETRIDLSQLGGDGGGGGGSGGGGSGGGGSGGTLNIEDEHRLHETSKEPDVSLGSTWLSDFPQAWAETGGMGLAVRQAPLIIPLKATSTPVSIKQYPMSQEARLGIKPHIQRLLDQGILVPCQSPWNTPLLPVKKPGTNDYRPVQDLREVNKRVEDIHPTVPNPYNLLSGLPPSHQWYTVLDLKDAFFCLRLHPTSQPLFAFEWRDPEMGISGQLTWTRLPQGFKNSPTLFDEALHRDLADFRIQHPDLILLQYVDDLLLAATSELDCQQGTRALLQTLGNLGYRASAKKAQICQKQVKYLGYLLKEGQRWLTEARKETVMGQPTPKTPRQLREFLGTAGFCRLWIPGFAEMAAPLYPLTKTGTLFNWGPDQQKAYQEIKQALLTAPALGLPDLTKPFELFVDEKQGYAKGVLTQKLGPWRRPVAYLSKKLDPVAAGWPPCLRMVAAIAVLTKDAGKLTMGQPLVILAPHAVEALVKQPPDRWLSNARMTHYQALLLDTDRVQFGPVVALNPATLLPLPEEGLQHNCLDILAEAHGTRPDLTDQPLPDADHTWYTDGSSLLQEGQRKAGAAVTTETEVIWAKALPAGTSAQRAELIALTQALKMAEGKKLNVYTDSRYAFATAHIHGEIYRRRGLLTSEGKEIKNKDEILALLKALFLPKRLSIIHCPGHQKGHSAEARGNRMADQAARKAAITETPDTSTLLAGKRTADGSEFEKRTADGSEFESPKKKAKVE

SEQ ID NO: 6137 - protein, 2180 aa, synthetic construct
MPAAKRVKLDGGDKKYSIGLDIGTNSVGWAVITDEYKVPSKKFKVLGNTDRHSIKKNLIGALLFDSGETAEATRLKRTARRRYTRRKNRICYLQEIFSNEMAKVDDSFFHRLEESFLVEEDKKHERHPIFGNIVDEVAYHEKYPTIYHLRKKLVDSTDKADLRLIYLALAHMIKFRGHFLIEGDLNPDNSDVDKLFIQLVQTYNQLFEENPINASGVDAKAILSARLSKSRRLENLIAQLPGEKKNGLFGNLIALSLGLTPNFKSNFDLAEDAKLQLSKDTYDDDLDNLLAQIGDQYADLFLAAKNLSDAILLSDILRVNTEITKAPLSASMIKRYDEHHQDLTLLKALVRQQLPEKYKEIFFDQSKNGYAGYIDGGASQEEFYKFIKPILEKMDGTEELLVKLNREDLLRKQRTFDNGSIPHQIHLGELHAILRRQEDFYPFLKDNREKIEKILTFRIPYYVGPLARGNSRFAWMTRKSEETITPWNFEEVVDKGASAQSFIERMTNFDKNLPNEKVLPKHSLLYEYFTVYNELTKVKYVTEGMRKPAFLSGEQKKAIVDLLFKTNRKVTVKQLKEDYFKKIECFDSVEISGVEDRFNASLGTYHDLLKIIKDKDFLDNEENEDILEDIVLTLTLFEDREMIEERLKTYAHLFDDKVMKQLKRRRYTGWGRLSRKLINGIRDKQSGKTILDFLKSDGFANRNFMQLIHDDSLTFKEDIQKAQVSGQGDSLHEHIANLAGSPAIKKGILQTVKVVDELVKVMGRHKPENIVIEMARENQTTQKGQKNSRERMKRIEEGIKELGSQILKEHPVENTQLQNEKLYLYYLQNGRDMYVDQELDINRLSDYDVDHIVPQSFLKDDSIDNKVLTRSDKARGKSDNVPSEEVVKKMKNYWRQLLNAKLITQRKFDNLTKAERGGLSELDKAGFIKRQLVETRQITKHVAQILDSRMNTKYDENDKLIREVKVITLKSKLVSDFRKDFQFYKVREINNYHHAHDAYLNAVVGTALIKKYPKLESEFVYGDYKVYDVRKMIAKSEQEIGKATAKYFFYSNIMNFFKTEITLANGEIRKRPLIETNGETGEIVWDKGRDFATVRKVLSMPQVNIVKKTEVQTGGFSKESILPKRNSDKLIARKKDWDPKKYGGFDSPTVAYSVLVVAKVEKGKSKKLKSVKELLGITIMERSSFEKNPIDFLEAKGYKEVKKDLIIKLPKYSLFELENGRKRMLASAGELQKGNELALPSKYVNFLYLASHYEKLKGSPEDNEQKQLFVEQHKHYLDEIIEQISEFSKRVILADANLDKVLSAYNKHRDKPIREQAENIIHLFTLTNLGAPAAFKYFDTTIDRKRYTSTKEVLDATLIHQSITGLYETRIDLSQLGGDGGGGGGSGGGGSGGGGSGGMDPLQLLQPLEAEIKGTKLKAHWNSGATITCVPEAFLEDERPIQTMLIKTIHGEKQQDVYYLTFKVQGRKVEAEVLASPYDYILLNPSDVPWLMKKPLQLTVLVPLHEYQERLLQQTALPKEQKELLQKLFLKYDALWQHWENQVGHRRIKPHNIATGTLAPRPQKQYPINPKAKPSIQIVIDDLLKQGVLIQQNSTMNTPVYPVPKPDGKWRMVLDYREVNKTIPLIAAQNQHSAGILSSIYRGKYKTTLDLTNGFWAHPITPESYWLTAFTWQGKQYCWTRLPQGFLNSPALFNADVVDLLKEIPNVQAYVDDIYISHDDPQEHLEQLEKIFSILLNAGYVVSLKKSEIAQREVEFLGFNITKEGRGLTDTFKQKLLNITPPKDLKQLQSILGLLNFARNFIPNYSELVKPLYTIVAPANGKFISWTEDNSNQLQHIISVLNQADNLEERNPETRLIIKVNSSPSAGYIRYYNEGSKRPIMYVNYIFSKAEAKFTQTEKLLTTMHKGLIKAMDLAMGQEILVYSPIVSMTKIQRTPLPERKALPVRWITWMTYLEDPRIQFHYDKSLPELQQIPNVTEDVIAKTKHPSEFAMVFYTDGSAIKHPDVNKSHSAGMGIAQVQFIPEYKIVHQWSIPLGDHTAQLAEIAAVEFACKKALKISGPVLIVTDSFYVAESANKELPYWKSNGFLNNKKKPLRHVSKWKSIAECLQLKPDIIIMHEKGHQQPMTTLHTEGNNLADKLATQGSYVVHAGKRTADGSEFEKRTADGSEFESPKKKAKVE

SEQ ID NO: 6138 - protein, 2091 aa, synthetic construct
MPAAKRVKLDGGDKKYSIGLDIGTNSVGWAVITDEYKVPSKKFKVLGNTDRHSIKKNLIGALLFDSGETAEATRLKRTARRRYTRRKNRICYLQEIFSNEMAKVDDSFFHRLEESFLVEEDKKHERHPIFGNIVDEVAYHEKYPTIYHLRKKLVDSTDKADLRLIYLALAHMIKFRGHFLIEGDLNPDNSDVDKLFIQLVQTYNQLFEENPINASGVDAKAILSARLSKSRRLENLIAQLPGEKKNGLFGNLIALSLGLTPNFKSNFDLAEDAKLQLSKDTYDDDLDNLLAQIGDQYADLFLAAKNLSDAILLSDILRVNTEITKAPLSASMIKRYDEHHQDLTLLKALVRQQLPEKYKEIFFDQSKNGYAGYIDGGASQEEFYKFIKPILEKMDGTEELLVKLNREDLLRKQRTFDNGSIPHQIHLGELHAILRRQEDFYPFLKDNREKIEKILTFRIPYYVGPLARGNSRFAWMTRKSEETITPWNFEEVVDKGASAQSFIERMTNFDKNLPNEKVLPKHSLLYEYFTVYNELTKVKYVTEGMRKPAFLSGEQKKAIVDLLFKTNRKVTVKQLKEDYFKKIECFDSVEISGVEDRFNASLGTYHDLLKIIKDKDFLDNEENEDILEDIVLTLTLFEDREMIEERLKTYAHLFDDKVMKQLKRRRYTGWGRLSRKLINGIRDKQSGKTILDFLKSDGFANRNFMQLIHDDSLTFKEDIQKAQVSGQGDSLHEHIANLAGSPAIKKGILQTVKVVDELVKVMGRHKPENIVIEMARENQTTQKGQKNSRERMKRIEEGIKELGSQILKEHPVENTQLQNEKLYLYYLQNGRDMYVDQELDINRLSDYDVDHIVPQSFLKDDSIDNKVLTRSDKARGKSDNVPSEEVVKKMKNYWRQLLNAKLITQRKFDNLTKAERGGLSELDKAGFIKRQLVETRQITKHVAQILDSRMNTKYDENDKLIREVKVITLKSKLVSDFRKDFQFYKVREINNYHHAHDAYLNAVVGTALIKKYPKLESEFVYGDYKVYDVRKMIAKSEQEIGKATAKYFFYSNIMNFFKTEITLANGEIRKRPLIETNGETGEIVWDKGRDFATVRKVLSMPQVNIVKKTEVQTGGFSKESILPKRNSDKLIARKKDWDPKKYGGFDSPTVAYSVLVVAKVEKGKSKKLKSVKELLGITIMERSSFEKNPIDFLEAKGYKEVKKDLIIKLPKYSLFELENGRKRMLASAGELQKGNELALPSKYVNFLYLASHYEKLKGSPEDNEQKQLFVEQHKHYLDEIIEQISEFSKRVILADANLDKVLSAYNKHRDKPIREQAENIIHLFTLTNLGAPAAFKYFDTTIDRKRYTSTKEVLDATLIHQSITGLYETRIDLSQLGGDGGGGGGSGGGGSGGGGSGGIPWLMKKPLQLTTLVPLQEYEERLLKQTMLTGSYKEKLQSLFLKYDALWQHWENQVGHRRIKPHHIATGTVNPRPQKQYPINPKAKASIQTVINDLLKQGVLIQQNSIMNTPVYPVPKPDGKWRMVLDYREVNKTIPLIAAQNQHSAGILSSIFRGKYKTTLDLSNGFWAHSITPESYWLTAFTWLGQQYCWTRLPQGFLNSPALFNADVVDLLKEVPNVQVYVDDIYISHDDPREHLEQLEKVFSLLLNAGYVVSLKKSEIAQHEVEFLGFNITKEGRGLTETFKQKLLNITPPRDLKQLQSILGLLNFARNFIPNFSELVKPLYNIIATAPGKYITWTTDNSQQLQNIISMLNSAENLEERNPEVRLIMKVNTSPSAGYIRFYNEFAKRPIMYLNYVYTKAEVKFTNTEKLLTTIHKGLIKALDLGMGQEILVYSPIVSMTKIQKTPLPERKALPIRWITWMSYLEDPRIQFHYDKTLPELQQVPTVTDDIIAKIKHPSEFSMVFYTDGSAIKHPNVNKSHNAGMGIAQVQFKPEFTVINTWSIPLGDHTAQLAEVAAVEFACKKALKIDGPVLIVTDSFYVAESVNKELPYWQSNGFFNNKKKPLKHVSKWKSIADCIQLKPDIIIIHEKGHQPTASTFHTEGNNLADKLATQGSYVVNAGKRTADGSEFEKRTADGSEFESPKKKAKVE

SEQ ID NO: 6139 - protein, 2091 aa, synthetic construct
MPAAKRVKLDGGDKKYSIGLDIGTNSVGWAVITDEYKVPSKKFKVLGNTDRHSIKKNLIGALLFDSGETAEATRLKRTARRRYTRRKNRICYLQEIFSNEMAKVDDSFFHRLEESFLVEEDKKHERHPIFGNIVDEVAYHEKYPTIYHLRKKLVDSTDKADLRLIYLALAHMIKFRGHFLIEGDLNPDNSDVDKLFIQLVQTYNQLFEENPINASGVDAKAILSARLSKSRRLENLIAQLPGEKKNGLFGNLIALSLGLTPNFKSNFDLAEDAKLQLSKDTYDDDLDNLLAQIGDQYADLFLAAKNLSDAILLSDILRVNTEITKAPLSASMIKRYDEHHQDLTLLKALVRQQLPEKYKEIFFDQSKNGYAGYIDGGASQEEFYKFIKPILEKMDGTEELLVKLNREDLLRKQRTFDNGSIPHQIHLGELHAILRRQEDFYPFLKDNREKIEKILTFRIPYYVGPLARGNSRFAWMTRKSEETITPWNFEEVVDKGASAQSFIERMTNFDKNLPNEKVLPKHSLLYEYFTVYNELTKVKYVTEGMRKPAFLSGEQKKAIVDLLFKTNRKVTVKQLKEDYFKKIECFDSVEISGVEDRFNASLGTYHDLLKIIKDKDFLDNEENEDILEDIVLTLTLFEDREMIEERLKTYAHLFDDKVMKQLKRRRYTGWGRLSRKLINGIRDKQSGKTILDFLKSDGFANRNFMQLIHDDSLTFKEDIQKAQVSGQGDSLHEHIANLAGSPAIKKGILQTVKVVDELVKVMGRHKPENIVIEMARENQTTQKGQKNSRERMKRIEEGIKELGSQILKEHPVENTQLQNEKLYLYYLQNGRDMYVDQELDINRLSDYDVDHIVPQSFLKDDSIDNKVLTRSDKARGKSDNVPSEEVVKKMKNYWRQLLNAKLITQRKFDNLTKAERGGLSELDKAGFIKRQLVETRQITKHVAQILDSRMNTKYDENDKLIREVKVITLKSKLVSDFRKDFQFYKVREINNYHHAHDAYLNAVVGTALIKKYPKLESEFVYGDYKVYDVRKMIAKSEQEIGKATAKYFFYSNIMNFFKTEITLANGEIRKRPLIETNGETGEIVWDKGRDFATVRKVLSMPQVNIVKKTEVQTGGFSKESILPKRNSDKLIARKKDWDPKKYGGFDSPTVAYSVLVVAKVEKGKSKKLKSVKELLGITIMERSSFEKNPIDFLEAKGYKEVKKDLIIKLPKYSLFELENGRKRMLASAGELQKGNELALPSKYVNFLYLASHYEKLKGSPEDNEQKQLFVEQHKHYLDEIIEQISEFSKRVILADANLDKVLSAYNKHRDKPIREQAENIIHLFTLTNLGAPAAFKYFDTTIDRKRYTSTKEVLDATLIHQSITGLYETRIDLSQLGGDGGGGGGSGGGGSGGGGSGGIPWLMKKPLQLTTLVPLQEYEERLLKQTMLTGSYKEKLQSLFLKYDALWQHWENQVGHRRIKPHHIATGTVNPRPQKQYPINPKAKASIQTVINDLLKQGVLIQQNSIMNTPVYPVPKPDGKWRMVLDYREVNKTIPLIAAQNQHSAGILSSIFRGKYKTTLDLSNGFWAHSITPESYWLTAFTWLGQQYCWTRLPQGFLNSPALFNADVVDLLKEVPNVQVYVDDIYISHDDPREHLEQLEKVFSLLLNAGYVVSLKKSEIAQHEVEFLGFNITKEGRGLTETFKQKLLNITPPRDLKQLQSILGKLNFARNFIPNFSELVKPLYNIIATAPGKYITWTTDNSQQLQNIISMLNSAENLEERNPEVRLIMKVNTSPSAGYIRFYNEFAKRPIMYLNYVYTKAEVKFTNTEKLLTTIHKGLIKALDLGMGQEILVYSPIVSMTKIQKTPLPERKALPIRWITWMSYLEDPRIQFHYDKTLPELQQVPTVTDDIIAKIKHPSEFSMVFYTDGSAIKHPNVNKSHNAGMGIAQVQFKPEFTVINTWSIPLGDHTAQLAEVAAVEFACKKALKIDGPVLIVTDSFYVAESVNKELPYWQSNGFFNNKKKPLKHVSKWKSIADCIQLKPDIIIIHEKGHQPTASTFHTEGNNLADKLATQGSYVVNAGKRTADGSEFEKRTADGSEFESPKKKAKVE

SEQ ID NO: 6140 - protein, 2098 aa, synthetic construct
MPAAKRVKLDGGDKKYSIGLDIGTNSVGWAVITDEYKVPSKKFKVLGNTDRHSIKKNLIGALLFDSGETAEATRLKRTARRRYTRRKNRICYLQEIFSNEMAKVDDSFFHRLEESFLVEEDKKHERHPIFGNIVDEVAYHEKYPTIYHLRKKLVDSTDKADLRLIYLALAHMIKFRGHFLIEGDLNPDNSDVDKLFIQLVQTYNQLFEENPINASGVDAKAILSARLSKSRRLENLIAQLPGEKKNGLFGNLIALSLGLTPNFKSNFDLAEDAKLQLSKDTYDDDLDNLLAQIGDQYADLFLAAKNLSDAILLSDILRVNTEITKAPLSASMIKRYDEHHQDLTLLKALVRQQLPEKYKEIFFDQSKNGYAGYIDGGASQEEFYKFIKPILEKMDGTEELLVKLNREDLLRKQRTFDNGSIPHQIHLGELHAILRRQEDFYPFLKDNREKIEKILTFRIPYYVGPLARGNSRFAWMTRKSEETITPWNFEEVVDKGASAQSFIERMTNFDKNLPNEKVLPKHSLLYEYFTVYNELTKVKYVTEGMRKPAFLSGEQKKAIVDLLFKTNRKVTVKQLKEDYFKKIECFDSVEISGVEDRFNASLGTYHDLLKIIKDKDFLDNEENEDILEDIVLTLTLFEDREMIEERLKTYAHLFDDKVMKQLKRRRYTGWGRLSRKLINGIRDKQSGKTILDFLKSDGFANRNFMQLIHDDSLTFKEDIQKAQVSGQGDSLHEHIANLAGSPAIKKGILQTVKVVDELVKVMGRHKPENIVIEMARENQTTQKGQKNSRERMKRIEEGIKELGSQILKEHPVENTQLQNEKLYLYYLQNGRDMYVDQELDINRLSDYDVDHIVPQSFLKDDSIDNKVLTRSDKARGKSDNVPSEEVVKKMKNYWRQLLNAKLITQRKFDNLTKAERGGLSELDKAGFIKRQLVETRQITKHVAQILDSRMNTKYDENDKLIREVKVITLKSKLVSDFRKDFQFYKVREINNYHHAHDAYLNAVVGTALIKKYPKLESEFVYGDYKVYDVRKMIAKSEQEIGKATAKYFFYSNIMNFFKTEITLANGEIRKRPLIETNGETGEIVWDKGRDFATVRKVLSMPQVNIVKKTEVQTGGFSKESILPKRNSDKLIARKKDWDPKKYGGFDSPTVAYSVLVVAKVEKGKSKKLKSVKELLGITIMERSSFEKNPIDFLEAKGYKEVKKDLIIKLPKYSLFELENGRKRMLASAGELQKGNELALPSKYVNFLYLASHYEKLKGSPEDNEQKQLFVEQHKHYLDEIIEQISEFSKRVILADANLDKVLSAYNKHRDKPIREQAENIIHLFTLTNLGAPAAFKYFDTTIDRKRYTSTKEVLDATLIHQSITGLYETRIDLSQLGGDGGGGGGSGGGGSGGGGSGGVLNLEEEYRLHEKPVPSSIDPSWLQLFPTVWAERAGMGLANQVPPVVVELRSGASPVAVRQYPMSKEAREGIRPHIQRFLDLGVLVPCQSPWNTPLLPVKKPGTNDYRPVQDLREINKRVQDIHPTVPNPYNLLSSLPPSHTWYSVLDLKDAFFCLKLHPNSQPLFAFEWRDPEKGNTGQLTWTRLPQGFKNSPTLFNEALHRDLAPFRALNPQVVLLQYVDDLLVAAPTYRDCKEGTQKLLQELSKLGYRVSAKKAQLCQKEVTYLGYLLKEGKRWLTPARKATVMKIPPPTTPRQVREFLGTAGFCRLWIPGFASLAAPLYPLTKPSIPFIWTEEHQKAFDRIKEALLSAPALALPDLTKPFTLYVDERAGVARGVLTQTLGPWRRPVAYLSKKLDPVASGWPTCLKAVAAVALLLKDADKLTLGQNVTVIASHSLESIVRQPPDRWMTNARMTHYQSLLLNERVSFAPPAVLNPATLLPVESEATPVHRCSEILAEETGTRRDLKDQPLPGVPAWYTDGSSFIAEGKRRAGAAIVDGKRTVWASSLPEGTSAQKAELVALTQALRLAEGKDINIYTDSRYAFATAHIHGAIYKQRGWLTSAGKDIKNKEEILALLEAIHLPKRVAIIHCPGHQKGNDPVATGNRRADEAAKQAALSTRVLAETTKPAGKRTADGSEFEKRTADGSEFESPKKKAKVE

SEQ ID NO: 6141 - protein, 2098 aa, synthetic construct
MPAAKRVKLDGGDKKYSIGLDIGTNSVGWAVITDEYKVPSKKFKVLGNTDRHSIKKNLIGALLFDSGETAEATRLKRTARRRYTRRKNRICYLQEIFSNEMAKVDDSFFHRLEESFLVEEDKKHERHPIFGNIVDEVAYHEKYPTIYHLRKKLVDSTDKADLRLIYLALAHMIKFRGHFLIEGDLNPDNSDVDKLFIQLVQTYNQLFEENPINASGVDAKAILSARLSKSRRLENLIAQLPGEKKNGLFGNLIALSLGLTPNFKSNFDLAEDAKLQLSKDTYDDDLDNLLAQIGDQYADLFLAAKNLSDAILLSDILRVNTEITKAPLSASMIKRYDEHHQDLTLLKALVRQQLPEKYKEIFFDQSKNGYAGYIDGGASQEEFYKFIKPILEKMDGTEELLVKLNREDLLRKQRTFDNGSIPHQIHLGELHAILRRQEDFYPFLKDNREKIEKILTFRIPYYVGPLARGNSRFAWMTRKSEETITPWNFEEVVDKGASAQSFIERMTNFDKNLPNEKVLPKHSLLYEYFTVYNELTKVKYVTEGMRKPAFLSGEQKKAIVDLLFKTNRKVTVKQLKEDYFKKIECFDSVEISGVEDRFNASLGTYHDLLKIIKDKDFLDNEENEDILEDIVLTLTLFEDREMIEERLKTYAHLFDDKVMKQLKRRRYTGWGRLSRKLINGIRDKQSGKTILDFLKSDGFANRNFMQLIHDDSLTFKEDIQKAQVSGQGDSLHEHIANLAGSPAIKKGILQTVKVVDELVKVMGRHKPENIVIEMARENQTTQKGQKNSRERMKRIEEGIKELGSQILKEHPVENTQLQNEKLYLYYLQNGRDMYVDQELDINRLSDYDVDHIVPQSFLKDDSIDNKVLTRSDKARGKSDNVPSEEVVKKMKNYWRQLLNAKLITQRKFDNLTKAERGGLSELDKAGFIKRQLVETRQITKHVAQILDSRMNTKYDENDKLIREVKVITLKSKLVSDFRKDFQFYKVREINNYHHAHDAYLNAVVGTALIKKYPKLESEFVYGDYKVYDVRKMIAKSEQEIGKATAKYFFYSNIMNFFKTEITLANGEIRKRPLIETNGETGEIVWDKGRDFATVRKVLSMPQVNIVKKTEVQTGGFSKESILPKRNSDKLIARKKDWDPKKYGGFDSPTVAYSVLVVAKVEKGKSKKLKSVKELLGITIMERSSFEKNPIDFLEAKGYKEVKKDLIIKLPKYSLFELENGRKRMLASAGELQKGNELALPSKYVNFLYLASHYEKLKGSPEDNEQKQLFVEQHKHYLDEIIEQISEFSKRVILADANLDKVLSAYNKHRDKPIREQAENIIHLFTLTNLGAPAAFKYFDTTIDRKRYTSTKEVLDATLIHQSITGLYETRIDLSQLGGDGGGGGGSGGGGSGGGGSGGVLNLEEEYRLHEKPVPSSIDPSWLQLFPTVWAERAGMGLANQVPPVVVELRSGASPVAVRQYPMSKEAREGIRPHIQRFLDLGVLVPCQSPWNTPLLPVKKPGTNDYRPVQDLREINKRVQDIHPTVPNPYNLLSSLPPSHTWYSVLDLKDAFFCLKLHPNSQPLFAFEWRDPEKGNTGQLTWTRLPQGFKNSPTLFNEALHRDLAPFRALNPQVVLLQYVDDLLVAAPTYRDCKEGTQKLLQELSKLGYRVSAKKAQLCQKEVTYLGYLLKEGKRWLTPARKATVMKIPPPTTPRQVREFLGKAGFCRLFIPGFASLAAPLYPLTKPSIPFIWTEEHQKAFDRIKEALLSAPALALPDLTKPFTLYVDERAGVARGVLTQTLGPWRRPVAYLSKKLDPVASGWPTCLKAVAAVALLLKDADKLTLGQNVTVIASHSLESIVRQPPDRWMTNARMTHYQSLLLNERVSFAPPAVLNPATLLPVESEATPVHRCSEILAEETGTRRDLKDQPLPGVPAWYTDGSSFIAEGKRRAGAAIVDGKRTVWASSLPEGTSAQKAELVALTQALRLAEGKDINIYTDSRYAFATAHIHGAIYKQRGWLTSAGKDIKNKEEILALLEAIHLPKRVAIIHCPGHQKGNDPVATGNRRADEAAKQAALSTRVLAETTKPAGKRTADGSEFEKRTADGSEFESPKKKAKVE

SEQ ID NO: 6142 - protein, 2100 aa, synthetic construct
MPAAKRVKLDGGDKKYSIGLDIGTNSVGWAVITDEYKVPSKKFKVLGNTDRHSIKKNLIGALLFDSGETAEATRLKRTARRRYTRRKNRICYLQEIFSNEMAKVDDSFFHRLEESFLVEEDKKHERHPIFGNIVDEVAYHEKYPTIYHLRKKLVDSTDKADLRLIYLALAHMIKFRGHFLIEGDLNPDNSDVDKLFIQLVQTYNQLFEENPINASGVDAKAILSARLSKSRRLENLIAQLPGEKKNGLFGNLIALSLGLTPNFKSNFDLAEDAKLQLSKDTYDDDLDNLLAQIGDQYADLFLAAKNLSDAILLSDILRVNTEITKAPLSASMIKRYDEHHQDLTLLKALVRQQLPEKYKEIFFDQSKNGYAGYIDGGASQEEFYKFIKPILEKMDGTEELLVKLNREDLLRKQRTFDNGSIPHQIHLGELHAILRRQEDFYPFLKDNREKIEKILTFRIPYYVGPLARGNSRFAWMTRKSEETITPWNFEEVVDKGASAQSFIERMTNFDKNLPNEKVLPKHSLLYEYFTVYNELTKVKYVTEGMRKPAFLSGEQKKAIVDLLFKTNRKVTVKQLKEDYFKKIECFDSVEISGVEDRFNASLGTYHDLLKIIKDKDFLDNEENEDILEDIVLTLTLFEDREMIEERLKTYAHLFDDKVMKQLKRRRYTGWGRLSRKLINGIRDKQSGKTILDFLKSDGFANRNFMQLIHDDSLTFKEDIQKAQVSGQGDSLHEHIANLAGSPAIKKGILQTVKVVDELVKVMGRHKPENIVIEMARENQTTQKGQKNSRERMKRIEEGIKELGSQILKEHPVENTQLQNEKLYLYYLQNGRDMYVDQELDINRLSDYDVDHIVPQSFLKDDSIDNKVLTRSDKARGKSDNVPSEEVVKKMKNYWRQLLNAKLITQRKFDNLTKAERGGLSELDKAGFIKRQLVETRQITKHVAQILDSRMNTKYDENDKLIREVKVITLKSKLVSDFRKDFQFYKVREINNYHHAHDAYLNAVVGTALIKKYPKLESEFVYGDYKVYDVRKMIAKSEQEIGKATAKYFFYSNIMNFFKTEITLANGEIRKRPLIETNGETGEIVWDKGRDFATVRKVLSMPQVNIVKKTEVQTGGFSKESILPKRNSDKLIARKKDWDPKKYGGFDSPTVAYSVLVVAKVEKGKSKKLKSVKELLGITIMERSSFEKNPIDFLEAKGYKEVKKDLIIKLPKYSLFELENGRKRMLASAGELQKGNELALPSKYVNFLYLASHYEKLKGSPEDNEQKQLFVEQHKHYLDEIIEQISEFSKRVILADANLDKVLSAYNKHRDKPIREQAENIIHLFTLTNLGAPAAFKYFDTTIDRKRYTSTKEVLDATLIHQSITGLYETRIDLSQLGGDGGGGGGSGGGGSGGGGSGGTLNIEDEYRLHETSKEPDVPLGSTWLSDFPQAWAETGGMGLAVRQAPLIIPLKATSTPVSIKQYPMSQEARLGIKPHIQRLLDQGILVPCQSPWNTPLLPVKKPGTNDYRPVQDLREVNKRVEDIHPTVPNPYNLLSGLPPSHQWYTVLDLKDAFFCLRLHPTSQPLFAFEWRDPEMGISGQLTWTRLPQGFKNSPTLFNEALHRDLADFRIQHPDLILLQYVDDLLLAATSEQDCQRGTRALLQTLGNLGYRASAKKAQICQKQVKYLGYLLKEGQRWLTEARKETVMGQPTPKTPRQLREFLGTAGFCRLWIPGFAEMAAPLYPLTKPGTLFNWGPDQQKAYQEIKQALLTAPALGLPDLTKPFELFVDEKQGYAKGVLTQKLGPWRRPVAYLSKKLDPVAAGWPPCLRMVAAIAVLTKDAGKLTMGQPLVILAPHAVEALVKQPPDRWLSNARMTHYQAMLLDTDRVQFGPVVALNPATLLPLPEKEAPHDCLEILAETHGTRPDLTDQPIPDADYTWYTDGSSFLQEGQRRAGAAVTTETEVIWARALPAGTSAQRAELIALTQALKMAEGKKLNVYTDSRYAFATAHVHGEIYRRRGWLTSEGREIKNKNEILALLKALFLPKRLSIIHCPGHQKGNSAEARGNRMADQAAREAAMKAVLETSTLLAGKRTADGSEFEKRTADGSEFESPKKKAKVE

SEQ ID NO: 6143 - protein, 2107 aa, synthetic construct
MPAAKRVKLDGGDKKYSIGLDIGTNSVGWAVITDEYKVPSKKFKVLGNTDRHSIKKNLIGALLFDSGETAEATRLKRTARRRYTRRKNRICYLQEIFSNEMAKVDDSFFHRLEESFLVEEDKKHERHPIFGNIVDEVAYHEKYPTIYHLRKKLVDSTDKADLRLIYLALAHMIKFRGHFLIEGDLNPDNSDVDKLFIQLVQTYNQLFEENPINASGVDAKAILSARLSKSRRLENLIAQLPGEKKNGLFGNLIALSLGLTPNFKSNFDLAEDAKLQLSKDTYDDDLDNLLAQIGDQYADLFLAAKNLSDAILLSDILRVNTEITKAPLSASMIKRYDEHHQDLTLLKALVRQQLPEKYKEIFFDQSKNGYAGYIDGGASQEEFYKFIKPILEKMDGTEELLVKLNREDLLRKQRTFDNGSIPHQIHLGELHAILRRQEDFYPFLKDNREKIEKILTFRIPYYVGPLARGNSRFAWMTRKSEETITPWNFEEVVDKGASAQSFIERMTNFDKNLPNEKVLPKHSLLYEYFTVYNELTKVKYVTEGMRKPAFLSGEQKKAIVDLLFKTNRKVTVKQLKEDYFKKIECFDSVEISGVEDRFNASLGTYHDLLKIIKDKDFLDNEENEDILEDIVLTLTLFEDREMIEERLKTYAHLFDDKVMKQLKRRRYTGWGRLSRKLINGIRDKQSGKTILDFLKSDGFANRNFMQLIHDDSLTFKEDIQKAQVSGQGDSLHEHIANLAGSPAIKKGILQTVKVVDELVKVMGRHKPENIVIEMARENQTTQKGQKNSRERMKRIEEGIKELGSQILKEHPVENTQLQNEKLYLYYLQNGRDMYVDQELDINRLSDYDVDHIVPQSFLKDDSIDNKVLTRSDKARGKSDNVPSEEVVKKMKNYWRQLLNAKLITQRKFDNLTKAERGGLSELDKAGFIKRQLVETRQITKHVAQILDSRMNTKYDENDKLIREVKVITLKSKLVSDFRKDFQFYKVREINNYHHAHDAYLNAVVGTALIKKYPKLESEFVYGDYKVYDVRKMIAKSEQEIGKATAKYFFYSNIMNFFKTEITLANGEIRKRPLIETNGETGEIVWDKGRDFATVRKVLSMPQVNIVKKTEVQTGGFSKESILPKRNSDKLIARKKDWDPKKYGGFDSPTVAYSVLVVAKVEKGKSKKLKSVKELLGITIMERSSFEKNPIDFLEAKGYKEVKKDLIIKLPKYSLFELENGRKRMLASAGELQKGNELALPSKYVNFLYLASHYEKLKGSPEDNEQKQLFVEQHKHYLDEIIEQISEFSKRVILADANLDKVLSAYNKHRDKPIREQAENIIHLFTLTNLGAPAAFKYFDTTIDRKRYTSTKEVLDATLIHQSITGLYETRIDLSQLGGDGGGGGGSGGGGSGGGGSGGGGSGGTAPLEEEYRLFLEAPIQNVTLLEQWKREIPKVWAEINPPGLASTQAPIHVQLLSTALPVRVRQYPITLEAKRSLRETIRKFRAAGILRPVHSPWNTPLLPVRKSGTSEYRMVQDLREVNKRVETIHPTVPNPYTLLSLLPPDRIWYSVLDLKDAFFCIPLAPESQLIFAFEWADAEEGESGQLTWTRLPQGFKNSPTLFDEALNRDLQGFRLDHPSVSLLQYVDDLLIAADTQAACLSATRDLLMTLAELGYRVSGKKAQLCQEEVTYLGFKIHKGSRSLSNSRTQAILQIPVPKTKRQVREFLGTIGYCRLWIPGFAELAQPLYAATRGGNDPLVWGEKEEEAFQSLKLALTQPPALALPSLDKPFQLFVEETSGAAKGVLTQALGPWKRPVAYLSKRLDPVAAGWPRCLRAIAAAALLTREASKLTFGQDIEITSSHNLESLLRSPPDKWLTNARITQYQVLLLDPPRVRFKQTAALNPATLLPETDDTLPIHHCLDTLDSLTSTRPDLTDQPLAQAEATLFTDGSSYIRDGKRYAGAAVVTLDSVIWAEPLPIGTSAQKAELIALTKALEWSKDKSVNIYTDSRYAFATLHVHGMIYRERGLLTAGGKAIKNAPEILALLTAVWLPKRVAVMHCKGHQKDDAPTSTGNRRADEVAREVAIRPLSTQATISAGKRTADGSEFEKRTADGSEFESPKKKAKVE

SEQ ID NO: 6144 - protein, 2107 aa, synthetic construct
MPAAKRVKLDGGDKKYSIGLDIGTNSVGWAVITDEYKVPSKKFKVLGNTDRHSIKKNLIGALLFDSGETAEATRLKRTARRRYTRRKNRICYLQEIFSNEMAKVDDSFFHRLEESFLVEEDKKHERHPIFGNIVDEVAYHEKYPTIYHLRKKLVDSTDKADLRLIYLALAHMIKFRGHFLIEGDLNPDNSDVDKLFIQLVQTYNQLFEENPINASGVDAKAILSARLSKSRRLENLIAQLPGEKKNGLFGNLIALSLGLTPNFKSNFDLAEDAKLQLSKDTYDDDLDNLLAQIGDQYADLFLAAKNLSDAILLSDILRVNTEITKAPLSASMIKRYDEHHQDLTLLKALVRQQLPEKYKEIFFDQSKNGYAGYIDGGASQEEFYKFIKPILEKMDGTEELLVKLNREDLLRKQRTFDNGSIPHQIHLGELHAILRRQEDFYPFLKDNREKIEKILTFRIPYYVGPLARGNSRFAWMTRKSEETITPWNFEEVVDKGASAQSFIERMTNFDKNLPNEKVLPKHSLLYEYFTVYNELTKVKYVTEGMRKPAFLSGEQKKAIVDLLFKTNRKVTVKQLKEDYFKKIECFDSVEISGVEDRFNASLGTYHDLLKIIKDKDFLDNEENEDILEDIVLTLTLFEDREMIEERLKTYAHLFDDKVMKQLKRRRYTGWGRLSRKLINGIRDKQSGKTILDFLKSDGFANRNFMQLIHDDSLTFKEDIQKAQVSGQGDSLHEHIANLAGSPAIKKGILQTVKVVDELVKVMGRHKPENIVIEMARENQTTQKGQKNSRERMKRIEEGIKELGSQILKEHPVENTQLQNEKLYLYYLQNGRDMYVDQELDINRLSDYDVDHIVPQSFLKDDSIDNKVLTRSDKARGKSDNVPSEEVVKKMKNYWRQLLNAKLITQRKFDNLTKAERGGLSELDKAGFIKRQLVETRQITKHVAQILDSRMNTKYDENDKLIREVKVITLKSKLVSDFRKDFQFYKVREINNYHHAHDAYLNAVVGTALIKKYPKLESEFVYGDYKVYDVRKMIAKSEQEIGKATAKYFFYSNIMNFFKTEITLANGEIRKRPLIETNGETGEIVWDKGRDFATVRKVLSMPQVNIVKKTEVQTGGFSKESILPKRNSDKLIARKKDWDPKKYGGFDSPTVAYSVLVVAKVEKGKSKKLKSVKELLGITIMERSSFEKNPIDFLEAKGYKEVKKDLIIKLPKYSLFELENGRKRMLASAGELQKGNELALPSKYVNFLYLASHYEKLKGSPEDNEQKQLFVEQHKHYLDEIIEQISEFSKRVILADANLDKVLSAYNKHRDKPIREQAENIIHLFTLTNLGAPAAFKYFDTTIDRKRYTSTKEVLDATLIHQSITGLYETRIDLSQLGGDGGGGGGSGGGGSGGGGSGGGGSGGTAPLEEEYRLFLEAPIQNVTLLEQWKREIPKVWAEINPPGLASTQAPIHVQLLSTALPVRVRQYPITLEAKRSLRETIRKFRAAGILRPVHSPWNTPLLPVRKSGTSEYRMVQDLREVNKRVETIHPTVPNPYTLLSLLPPDRIWYSVLDLKDAFFCIPLAPESQLIFAFEWADAEEGESGQLTWTRLPQGFKNSPTLFNEALNRDLQGFRLDHPSVSLLQYVDDLLIAADTQAACLSATRDLLMTLAELGYRVSGKKAQLCQEEVTYLGFKIHKGSRSLSNSRTQAILQIPVPKTKRQVREFLGTIGYCRLWIPGFAELAQPLYAATRPGNDPLVWGEKEEEAFQSLKLALTQPPALALPSLDKPFQLFVEETSGAAKGVLTQALGPWKRPVAYLSKRLDPVAAGWPRCLRAIAAAALLTREASKLTFGQDIEITSSHNLESLLRSPPDKWLTNARITQYQVLLLDPPRVRFKQTAALNPATLLPETDDTLPIHHCLDTLDSLTSTRPDLTDQPLAQAEATLFTDGSSYIRDGKRYAGAAVVTLDSVIWAEPLPIGTSAQKAELIALTKALEWSKDKSVNIYTDSRYAFATLHVHGMIYRERGWLTAGGKAIKNAPEILALLTAVWLPKRVAVMHCKGHQKDDAPTSTGNRRADEVAREVAIRPLSTQATISAGKRTADGSEFEKRTADGSEFESPKKKAKVE

SEQ ID NO: 6145 - protein, 2096 aa, synthetic construct
MPAAKRVKLDGGDKKYSIGLDIGTNSVGWAVITDEYKVPSKKFKVLGNTDRHSIKKNLIGALLFDSGETAEATRLKRTARRRYTRRKNRICYLQEIFSNEMAKVDDSFFHRLEESFLVEEDKKHERHPIFGNIVDEVAYHEKYPTIYHLRKKLVDSTDKADLRLIYLALAHMIKFRGHFLIEGDLNPDNSDVDKLFIQLVQTYNQLFEENPINASGVDAKAILSARLSKSRRLENLIAQLPGEKKNGLFGNLIALSLGLTPNFKSNFDLAEDAKLQLSKDTYDDDLDNLLAQIGDQYADLFLAAKNLSDAILLSDILRVNTEITKAPLSASMIKRYDEHHQDLTLLKALVRQQLPEKYKEIFFDQSKNGYAGYIDGGASQEEFYKFIKPILEKMDGTEELLVKLNREDLLRKQRTFDNGSIPHQIHLGELHAILRRQEDFYPFLKDNREKIEKILTFRIPYYVGPLARGNSRFAWMTRKSEETITPWNFEEVVDKGASAQSFIERMTNFDKNLPNEKVLPKHSLLYEYFTVYNELTKVKYVTEGMRKPAFLSGEQKKAIVDLLFKTNRKVTVKQLKEDYFKKIECFDSVEISGVEDRFNASLGTYHDLLKIIKDKDFLDNEENEDILEDIVLTLTLFEDREMIEERLKTYAHLFDDKVMKQLKRRRYTGWGRLSRKLINGIRDKQSGKTILDFLKSDGFANRNFMQLIHDDSLTFKEDIQKAQVSGQGDSLHEHIANLAGSPAIKKGILQTVKVVDELVKVMGRHKPENIVIEMARENQTTQKGQKNSRERMKRIEEGIKELGSQILKEHPVENTQLQNEKLYLYYLQNGRDMYVDQELDINRLSDYDVDHIVPQSFLKDDSIDNKVLTRSDKARGKSDNVPSEEVVKKMKNYWRQLLNAKLITQRKFDNLTKAERGGLSELDKAGFIKRQLVETRQITKHVAQILDSRMNTKYDENDKLIREVKVITLKSKLVSDFRKDFQFYKVREINNYHHAHDAYLNAVVGTALIKKYPKLESEFVYGDYKVYDVRKMIAKSEQEIGKATAKYFFYSNIMNFFKTEITLANGEIRKRPLIETNGETGEIVWDKGRDFATVRKVLSMPQVNIVKKTEVQTGGFSKESILPKRNSDKLIARKKDWDPKKYGGFDSPTVAYSVLVVAKVEKGKSKKLKSVKELLGITIMERSSFEKNPIDFLEAKGYKEVKKDLIIKLPKYSLFELENGRKRMLASAGELQKGNELALPSKYVNFLYLASHYEKLKGSPEDNEQKQLFVEQHKHYLDEIIEQISEFSKRVILADANLDKVLSAYNKHRDKPIREQAENIIHLFTLTNLGAPAAFKYFDTTIDRKRYTSTKEVLDATLIHQSITGLYETRIDLSQLGGDGGGGGGSGGGGSGGGGSGGGGSGGVPWILKKPLELTIKLDLEEQQGTLLNNSILSKKGKEELKQLFEKYSALWQSWENQVGHRRIRPHKIATGTVKPTPQKQYHINPKAKPDIQIVINDLLKQGVLIQKESTMNTPVYPVPKPNGRWRMVLDYRAVNKVTPLIAVQNQHSYGILGSLFKGRYKTTIDLSNGFWAHPIVPEDYWITAFTWQGKQYCWTVLPQGFLNSPGLFNGDVVDLLQGIPNVEVYVDDVYISHDSEKEHLEYLDILFNRLKEAGYIISLKKSNIANSIVDFLGFQITNEGRGLTDTFKEKLENITAPTTLKQLQSILGLLNFARNFIPDFTELIAPLYALIPKSPKNYVPWQIEHSTTLETLITKLNGAEYLQGRKGDKTLIMKVNASYTTGYIRYYNEGEKKPISYVSIVFSKTELKFTELEKLLTTVHKGLLKALDLSMGQNIHVYSPIVSMQNIQKTPQTAKKALASRWLSWLSYLEDPRIRFFYDPQMPALKDLPAVDTGKDNKKHPSNFQHIFYTDGSAITSPTKEGHLNAGMGIVYFINKDGNLQKQQEWSISLGNHTAQFAEIAAFEFALKKCLPLGGNILVVTDSNYVAKAYNEELDVWASNGFVNNRKKPLKHISKWKSVADLKRLRPDVVVTHEPGHQKLDSSPHAYGNNLADQLATQASFKVHAGKRTADGSEFEKRTADGSEFESPKKKAKVE

SEQ ID NO: 6146 - protein, 2104 aa, synthetic construct
MPAAKRVKLDGGDKKYSIGLDIGTNSVGWAVITDEYKVPSKKFKVLGNTDRHSIKKNLIGALLFDSGETAEATRLKRTARRRYTRRKNRICYLQEIFSNEMAKVDDSFFHRLEESFLVEEDKKHERHPIFGNIVDEVAYHEKYPTIYHLRKKLVDSTDKADLRLIYLALAHMIKFRGHFLIEGDLNPDNSDVDKLFIQLVQTYNQLFEENPINASGVDAKAILSARLSKSRRLENLIAQLPGEKKNGLFGNLIALSLGLTPNFKSNFDLAEDAKLQLSKDTYDDDLDNLLAQIGDQYADLFLAAKNLSDAILLSDILRVNTEITKAPLSASMIKRYDEHHQDLTLLKALVRQQLPEKYKEIFFDQSKNGYAGYIDGGASQEEFYKFIKPILEKMDGTEELLVKLNREDLLRKQRTFDNGSIPHQIHLGELHAILRRQEDFYPFLKDNREKIEKILTFRIPYYVGPLARGNSRFAWMTRKSEETITPWNFEEVVDKGASAQSFIERMTNFDKNLPNEKVLPKHSLLYEYFTVYNELTKVKYVTEGMRKPAFLSGEQKKAIVDLLFKTNRKVTVKQLKEDYFKKIECFDSVEISGVEDRFNASLGTYHDLLKIIKDKDFLDNEENEDILEDIVLTLTLFEDREMIEERLKTYAHLFDDKVMKQLKRRRYTGWGRLSRKLINGIRDKQSGKTILDFLKSDGFANRNFMQLIHDDSLTFKEDIQKAQVSGQGDSLHEHIANLAGSPAIKKGILQTVKVVDELVKVMGRHKPENIVIEMARENQTTQKGQKNSRERMKRIEEGIKELGSQILKEHPVENTQLQNEKLYLYYLQNGRDMYVDQELDINRLSDYDVDHIVPQSFLKDDSIDNKVLTRSDKARGKSDNVPSEEVVKKMKNYWRQLLNAKLITQRKFDNLTKAERGGLSELDKAGFIKRQLVETRQITKHVAQILDSRMNTKYDENDKLIREVKVITLKSKLVSDFRKDFQFYKVREINNYHHAHDAYLNAVVGTALIKKYPKLESEFVYGDYKVYDVRKMIAKSEQEIGKATAKYFFYSNIMNFFKTEITLANGEIRKRPLIETNGETGEIVWDKGRDFATVRKVLSMPQVNIVKKTEVQTGGFSKESILPKRNSDKLIARKKDWDPKKYGGFDSPTVAYSVLVVAKVEKGKSKKLKSVKELLGITIMERSSFEKNPIDFLEAKGYKEVKKDLIIKLPKYSLFELENGRKRMLASAGELQKGNELALPSKYVNFLYLASHYEKLKGSPEDNEQKQLFVEQHKHYLDEIIEQISEFSKRVILADANLDKVLSAYNKHRDKPIREQAENIIHLFTLTNLGAPAAFKYFDTTIDRKRYTSTKEVLDATLIHQSITGLYETRIDLSQLGGDGGGGGGSGGGGSGGGGSGGGGSGGTLQLEEEYRLFEPESTQKQEMDIWLKNFPQAWAETGGMGTAHCQAPVLIQLKATATPISIRQYPMPHEAYQGIKPHIRRMLDQGILKPCQSPWNTPLLPVKKPGTEDYRPVQDLREVNKRVEDIHPTVPNPYNLLSTLPPSHPWYTVLDLKDAFFCLRLHSESQLLFAFEWRDPEIGLSGQLTWTRLPQGFKNSPTLFDEALHSDLADFRVRYPALVLLQYVDDLLLAAATRTECLEGTKALLETLGNKGYRASAKKAQICLQEVTYLGYSLKDGQRWLTKARKEAILSIPVPKNSRQVREFLGTAGYCRLWIPGFAELAAPLYPLTRPGTLFQWGTEQQLAFEDIKKALLSSPALGLPDITKPFELFIDENSGFAKGVLVQKLGPWKRPVAYLSKKLDTVASGWPPCLRMVAAIAILVKDAGKLTLGQPLTILTSHPVEALVRQPPNKWLSNARMTHYQAMLLDAERVHFGPTVSLNPATLLPLPSGGNHHDCLQILAETHGTRPDLTDQPLPDADLTWYTDGSSFIRNGEREAGAAVTTESEVIWAAPLPPGTSAQRAELIALTQALKMAEGKKLTVYTDSRYAFATTHVHGEIYRRRGLLTSEGKEIKNKNEILALLEALFLPKRLSIIHCPGHQKGDSPQAKGNRLADDTAKKAATETHSSLTVLPAGKRTADGSEFEKRTADGSEFESPKKKAKVE

SEQ ID NO: 6147 - protein, 2104 aa, synthetic construct
MPAAKRVKLDGGDKKYSIGLDIGTNSVGWAVITDEYKVPSKKFKVLGNTDRHSIKKNLIGALLFDSGETAEATRLKRTARRRYTRRKNRICYLQEIFSNEMAKVDDSFFHRLEESFLVEEDKKHERHPIFGNIVDEVAYHEKYPTIYHLRKKLVDSTDKADLRLIYLALAHMIKFRGHFLIEGDLNPDNSDVDKLFIQLVQTYNQLFEENPINASGVDAKAILSARLSKSRRLENLIAQLPGEKKNGLFGNLIALSLGLTPNFKSNFDLAEDAKLQLSKDTYDDDLDNLLAQIGDQYADLFLAAKNLSDAILLSDILRVNTEITKAPLSASMIKRYDEHHQDLTLLKALVRQQLPEKYKEIFFDQSKNGYAGYIDGGASQEEFYKFIKPILEKMDGTEELLVKLNREDLLRKQRTFDNGSIPHQIHLGELHAILRRQEDFYPFLKDNREKIEKILTFRIPYYVGPLARGNSRFAWMTRKSEETITPWNFEEVVDKGASAQSFIERMTNFDKNLPNEKVLPKHSLLYEYFTVYNELTKVKYVTEGMRKPAFLSGEQKKAIVDLLFKTNRKVTVKQLKEDYFKKIECFDSVEISGVEDRFNASLGTYHDLLKIIKDKDFLDNEENEDILEDIVLTLTLFEDREMIEERLKTYAHLFDDKVMKQLKRRRYTGWGRLSRKLINGIRDKQSGKTILDFLKSDGFANRNFMQLIHDDSLTFKEDIQKAQVSGQGDSLHEHIANLAGSPAIKKGILQTVKVVDELVKVMGRHKPENIVIEMARENQTTQKGQKNSRERMKRIEEGIKELGSQILKEHPVENTQLQNEKLYLYYLQNGRDMYVDQELDINRLSDYDVDHIVPQSFLKDDSIDNKVLTRSDKARGKSDNVPSEEVVKKMKNYWRQLLNAKLITQRKFDNLTKAERGGLSELDKAGFIKRQLVETRQITKHVAQILDSRMNTKYDENDKLIREVKVITLKSKLVSDFRKDFQFYKVREINNYHHAHDAYLNAVVGTALIKKYPKLESEFVYGDYKVYDVRKMIAKSEQEIGKATAKYFFYSNIMNFFKTEITLANGEIRKRPLIETNGETGEIVWDKGRDFATVRKVLSMPQVNIVKKTEVQTGGFSKESILPKRNSDKLIARKKDWDPKKYGGFDSPTVAYSVLVVAKVEKGKSKKLKSVKELLGITIMERSSFEKNPIDFLEAKGYKEVKKDLIIKLPKYSLFELENGRKRMLASAGELQKGNELALPSKYVNFLYLASHYEKLKGSPEDNEQKQLFVEQHKHYLDEIIEQISEFSKRVILADANLDKVLSAYNKHRDKPIREQAENIIHLFTLTNLGAPAAFKYFDTTIDRKRYTSTKEVLDATLIHQSITGLYETRIDLSQLGGDGGGGGGSGGGGSGGGGSGGGGSGGTLQLEEEYRLFEPESTQKQEMDIWLKNFPQAWAETGGMGTAHCQAPVLIQLKATATPISIRQYPMPHEAYQGIKPHIRRMLDQGILKPCQSPWNTPLLPVKKPGTEDYRPVQDLREVNKRVEDIHPTVPNPYNLLSTLPPSHPWYTVLDLKDAFFCLRLHSESQLLFAFEWRDPEIGLSGQLTWTRLPQGFKNSPTLFNEALHSDLADFRVRYPALVLLQYVDDLLLAAATRTECLEGTKALLETLGNKGYRASAKKAQICLQEVTYLGYSLKDGQRWLTKARKEAILSIPVPKNSRQVREFLGTAGYCRLWIPGFAELAAPLYPLTRPGTLFQWGTEQQLAFEDIKKALLSSPALGLPDITKPFELFIDENSGFAKGVLVQKLGPWKRPVAYLSKKLDTVASGWPPCLRMVAAIAILVKDAGKLTLGQPLTILTSHPVEALVRQPPNKWLSNARMTHYQAMLLDAERVHFGPTVSLNPATLLPLPSGGNHHDCLQILAETHGTRPDLTDQPLPDADLTWYTDGSSFIRNGEREAGAAVTTESEVIWAAPLPPGTSAQRAELIALTQALKMAEGKKLTVYTDSRYAFATTHVHGEIYRRRGWLTSEGKEIKNKNEILALLEALFLPKRLSIIHCPGHQKGDSPQAKGNRLADDTAKKAATETHSSLTVLPAGKRTADGSEFEKRTADGSEFESPKKKAKVE

SEQ ID NO: 6148 - protein, 2104 aa, synthetic construct
MPAAKRVKLDGGDKKYSIGLDIGTNSVGWAVITDEYKVPSKKFKVLGNTDRHSIKKNLIGALLFDSGETAEATRLKRTARRRYTRRKNRICYLQEIFSNEMAKVDDSFFHRLEESFLVEEDKKHERHPIFGNIVDEVAYHEKYPTIYHLRKKLVDSTDKADLRLIYLALAHMIKFRGHFLIEGDLNPDNSDVDKLFIQLVQTYNQLFEENPINASGVDAKAILSARLSKSRRLENLIAQLPGEKKNGLFGNLIALSLGLTPNFKSNFDLAEDAKLQLSKDTYDDDLDNLLAQIGDQYADLFLAAKNLSDAILLSDILRVNTEITKAPLSASMIKRYDEHHQDLTLLKALVRQQLPEKYKEIFFDQSKNGYAGYIDGGASQEEFYKFIKPILEKMDGTEELLVKLNREDLLRKQRTFDNGSIPHQIHLGELHAILRRQEDFYPFLKDNREKIEKILTFRIPYYVGPLARGNSRFAWMTRKSEETITPWNFEEVVDKGASAQSFIERMTNFDKNLPNEKVLPKHSLLYEYFTVYNELTKVKYVTEGMRKPAFLSGEQKKAIVDLLFKTNRKVTVKQLKEDYFKKIECFDSVEISGVEDRFNASLGTYHDLLKIIKDKDFLDNEENEDILEDIVLTLTLFEDREMIEERLKTYAHLFDDKVMKQLKRRRYTGWGRLSRKLINGIRDKQSGKTILDFLKSDGFANRNFMQLIHDDSLTFKEDIQKAQVSGQGDSLHEHIANLAGSPAIKKGILQTVKVVDELVKVMGRHKPENIVIEMARENQTTQKGQKNSRERMKRIEEGIKELGSQILKEHPVENTQLQNEKLYLYYLQNGRDMYVDQELDINRLSDYDVDHIVPQSFLKDDSIDNKVLTRSDKARGKSDNVPSEEVVKKMKNYWRQLLNAKLITQRKFDNLTKAERGGLSELDKAGFIKRQLVETRQITKHVAQILDSRMNTKYDENDKLIREVKVITLKSKLVSDFRKDFQFYKVREINNYHHAHDAYLNAVVGTALIKKYPKLESEFVYGDYKVYDVRKMIAKSEQEIGKATAKYFFYSNIMNFFKTEITLANGEIRKRPLIETNGETGEIVWDKGRDFATVRKVLSMPQVNIVKKTEVQTGGFSKESILPKRNSDKLIARKKDWDPKKYGGFDSPTVAYSVLVVAKVEKGKSKKLKSVKELLGITIMERSSFEKNPIDFLEAKGYKEVKKDLIIKLPKYSLFELENGRKRMLASAGELQKGNELALPSKYVNFLYLASHYEKLKGSPEDNEQKQLFVEQHKHYLDEIIEQISEFSKRVILADANLDKVLSAYNKHRDKPIREQAENIIHLFTLTNLGAPAAFKYFDTTIDRKRYTSTKEVLDATLIHQSITGLYETRIDLSQLGGDGGGGGGSGGGGSGGGGSGGGGSGGTLQLEEEYRLFEPESTQKQEMDIWLKNFPQAWAETGGMGTAHCQAPVLIQLKATATPISIRQYPMPHEAYQGIKPHIRRMLDQGILKPCQSPWNTPLLPVKKPGTEDYRPVQDLREVNKRVEDIHPTVPNPYNLLSTLPPSHPWYTVLDLKDAFFCLRLHSESQLLFAFEWRDPEIGLSGQLTWTRLPQGFKNSPTLFNEALHSDLADFRVRYPALVLLQYVDDLLLAAATRTECLEGTKALLETLGNKGYRASAKKAQICLQEVTYLGYSLKDGQRWLTKARKEAILSIPVPKNSRQVREFLGKAGYCRLFIPGFAELAAPLYPLTRPGTLFQWGTEQQLAFEDIKKALLSSPALGLPDITKPFELFIDENSGFAKGVLVQKLGPWKRPVAYLSKKLDTVASGWPPCLRMVAAIAILVKDAGKLTLGQPLTILTSHPVEALVRQPPNKWLSNARMTHYQAMLLDAERVHFGPTVSLNPATLLPLPSGGNHHDCLQILAETHGTRPDLTDQPLPDADLTWYTDGSSFIRNGEREAGAAVTTESEVIWAAPLPPGTSAQRAELIALTQALKMAEGKKLTVYTDSRYAFATTHVHGEIYRRRGWLTSEGKEIKNKNEILALLEALFLPKRLSIIHCPGHQKGDSPQAKGNRLADDTAKKAATETHSSLTVLPAGKRTADGSEFEKRTADGSEFESPKKKAKVE

SEQ ID NO: 6149 - protein, 2185 aa, synthetic construct
MPAAKRVKLDGGDKKYSIGLDIGTNSVGWAVITDEYKVPSKKFKVLGNTDRHSIKKNLIGALLFDSGETAEATRLKRTARRRYTRRKNRICYLQEIFSNEMAKVDDSFFHRLEESFLVEEDKKHERHPIFGNIVDEVAYHEKYPTIYHLRKKLVDSTDKADLRLIYLALAHMIKFRGHFLIEGDLNPDNSDVDKLFIQLVQTYNQLFEENPINASGVDAKAILSARLSKSRRLENLIAQLPGEKKNGLFGNLIALSLGLTPNFKSNFDLAEDAKLQLSKDTYDDDLDNLLAQIGDQYADLFLAAKNLSDAILLSDILRVNTEITKAPLSASMIKRYDEHHQDLTLLKALVRQQLPEKYKEIFFDQSKNGYAGYIDGGASQEEFYKFIKPILEKMDGTEELLVKLNREDLLRKQRTFDNGSIPHQIHLGELHAILRRQEDFYPFLKDNREKIEKILTFRIPYYVGPLARGNSRFAWMTRKSEETITPWNFEEVVDKGASAQSFIERMTNFDKNLPNEKVLPKHSLLYEYFTVYNELTKVKYVTEGMRKPAFLSGEQKKAIVDLLFKTNRKVTVKQLKEDYFKKIECFDSVEISGVEDRFNASLGTYHDLLKIIKDKDFLDNEENEDILEDIVLTLTLFEDREMIEERLKTYAHLFDDKVMKQLKRRRYTGWGRLSRKLINGIRDKQSGKTILDFLKSDGFANRNFMQLIHDDSLTFKEDIQKAQVSGQGDSLHEHIANLAGSPAIKKGILQTVKVVDELVKVMGRHKPENIVIEMARENQTTQKGQKNSRERMKRIEEGIKELGSQILKEHPVENTQLQNEKLYLYYLQNGRDMYVDQELDINRLSDYDVDHIVPQSFLKDDSIDNKVLTRSDKARGKSDNVPSEEVVKKMKNYWRQLLNAKLITQRKFDNLTKAERGGLSELDKAGFIKRQLVETRQITKHVAQILDSRMNTKYDENDKLIREVKVITLKSKLVSDFRKDFQFYKVREINNYHHAHDAYLNAVVGTALIKKYPKLESEFVYGDYKVYDVRKMIAKSEQEIGKATAKYFFYSNIMNFFKTEITLANGEIRKRPLIETNGETGEIVWDKGRDFATVRKVLSMPQVNIVKKTEVQTGGFSKESILPKRNSDKLIARKKDWDPKKYGGFDSPTVAYSVLVVAKVEKGKSKKLKSVKELLGITIMERSSFEKNPIDFLEAKGYKEVKKDLIIKLPKYSLFELENGRKRMLASAGELQKGNELALPSKYVNFLYLASHYEKLKGSPEDNEQKQLFVEQHKHYLDEIIEQISEFSKRVILADANLDKVLSAYNKHRDKPIREQAENIIHLFTLTNLGAPAAFKYFDTTIDRKRYTSTKEVLDATLIHQSITGLYETRIDLSQLGGDGGGGGGSGGGGSGGGGSGGGGSGGMNPLQLLQPLPAEIKGTKLLAHWNSGATITCIPESFLEDEQPIKKTLIKTIHGEKQQNVYYVTFKVKGRKVEAEVIASPYEYILLSPTDVPWLTQQPLQLTILVPLQEYQEKILSKTALPEDQKQQLKTLFVKYDNLWQHWENQVGHRKIRPHNIATGDYPPRPQKQYPINPKAKPSIQIVIDDLLKQGVLTPQNSTMNTPVYPVPKPDGRWRMVLDYREVNKTIPLTAAQNQHSAGILATIVRQKYKTTLDLANGFWAHPITPESYWLTAFTWQGKQYCWTRLPQGFLNSPALFNADVVDLLKEIPNVQVYVDDIYLSHDDPKEHVQQLEKVFQILLQAGYVVSLKKSEIGQKTVEFLGFNITKEGRGLTDTFKTKLLNITPPKDLKQLQSILGLLNFARNFIPNFAELVQPLYNLIAPAKGKYIEWSEENTKQLNMVIEALNTASNLEERLPEQRLVIKVNTSPSAGYVRYYNETGKKPIMYLNYVFSKAELKFSMLEKLLTTMHKALIKAMDLAMGQEILVYSPIVSMTKIQKTPLPERKALPIRWITWMTYLEDPRIQFHYDKTLPELKHIPDVYTSSQSPVKHPSQYEGVFYTDGSAIKSPDPTKSNNAGMGIVHATYKPEYQVLNQWSIPLGNHTAQMAEIAAVEFACKKALKIPGPVLVITDSFYVAESANKELPYWKSNGFVNNKKKPLKHISKWKSIAECLSMKPDITIQHEKGISLQIPVFILKGNALADKLATQGSYVVNAGKRTADGSEFEKRTADGSEFESPKKKAKVE

SEQ ID NO: 6150 - protein, 2185 aa, synthetic construct
MPAAKRVKLDGGDKKYSIGLDIGTNSVGWAVITDEYKVPSKKFKVLGNTDRHSIKKNLIGALLFDSGETAEATRLKRTARRRYTRRKNRICYLQEIFSNEMAKVDDSFFHRLEESFLVEEDKKHERHPIFGNIVDEVAYHEKYPTIYHLRKKLVDSTDKADLRLIYLALAHMIKFRGHFLIEGDLNPDNSDVDKLFIQLVQTYNQLFEENPINASGVDAKAILSARLSKSRRLENLIAQLPGEKKNGLFGNLIALSLGLTPNFKSNFDLAEDAKLQLSKDTYDDDLDNLLAQIGDQYADLFLAAKNLSDAILLSDILRVNTEITKAPLSASMIKRYDEHHQDLTLLKALVRQQLPEKYKEIFFDQSKNGYAGYIDGGASQEEFYKFIKPILEKMDGTEELLVKLNREDLLRKQRTFDNGSIPHQIHLGELHAILRRQEDFYPFLKDNREKIEKILTFRIPYYVGPLARGNSRFAWMTRKSEETITPWNFEEVVDKGASAQSFIERMTNFDKNLPNEKVLPKHSLLYEYFTVYNELTKVKYVTEGMRKPAFLSGEQKKAIVDLLFKTNRKVTVKQLKEDYFKKIECFDSVEISGVEDRFNASLGTYHDLLKIIKDKDFLDNEENEDILEDIVLTLTLFEDREMIEERLKTYAHLFDDKVMKQLKRRRYTGWGRLSRKLINGIRDKQSGKTILDFLKSDGFANRNFMQLIHDDSLTFKEDIQKAQVSGQGDSLHEHIANLAGSPAIKKGILQTVKVVDELVKVMGRHKPENIVIEMARENQTTQKGQKNSRERMKRIEEGIKELGSQILKEHPVENTQLQNEKLYLYYLQNGRDMYVDQELDINRLSDYDVDHIVPQSFLKDDSIDNKVLTRSDKARGKSDNVPSEEVVKKMKNYWRQLLNAKLITQRKFDNLTKAERGGLSELDKAGFIKRQLVETRQITKHVAQILDSRMNTKYDENDKLIREVKVITLKSKLVSDFRKDFQFYKVREINNYHHAHDAYLNAVVGTALIKKYPKLESEFVYGDYKVYDVRKMIAKSEQEIGKATAKYFFYSNIMNFFKTEITLANGEIRKRPLIETNGETGEIVWDKGRDFATVRKVLSMPQVNIVKKTEVQTGGFSKESILPKRNSDKLIARKKDWDPKKYGGFDSPTVAYSVLVVAKVEKGKSKKLKSVKELLGITIMERSSFEKNPIDFLEAKGYKEVKKDLIIKLPKYSLFELENGRKRMLASAGELQKGNELALPSKYVNFLYLASHYEKLKGSPEDNEQKQLFVEQHKHYLDEIIEQISEFSKRVILADANLDKVLSAYNKHRDKPIREQAENIIHLFTLTNLGAPAAFKYFDTTIDRKRYTSTKEVLDATLIHQSITGLYETRIDLSQLGGDGGGGGGSGGGGSGGGGSGGGGSGGMNPLQLLQPLPAEIKGTKLLAHWNSGATITCIPESFLEDEQPIKKTLIKTIHGEKQQNVYYVTFKVKGRKVEAEVIASPYEYILLSPTDVPWLTQQPLQLTILVPLQEYQEKILSKTALPEDQKQQLKTLFVKYDNLWQHWENQVGHRKIRPHNIATGDYPPRPQKQYPINPKAKPSIQIVIDDLLKQGVLTPQNSTMNTPVYPVPKPDGRWRMVLDYREVNKTIPLTAAQNQHSAGILATIVRQKYKTTLDLANGFWAHPITPESYWLTAFTWQGKQYCWTRLPQGFLNSPALFNADVVDLLKEIPNVQVYVDDIYLSHDDPKEHVQQLEKVFQILLQAGYVVSLKKSEIGQKTVEFLGFNITKEGRGLTDTFKTKLLNITPPKDLKQLQSILGKLNFARNFIPNFAELVQPLYNLIAPAKGKYIEWSEENTKQLNMVIEALNTASNLEERLPEQRLVIKVNTSPSAGYVRYYNETGKKPIMYLNYVFSKAELKFSMLEKLLTTMHKALIKAMDLAMGQEILVYSPIVSMTKIQKTPLPERKALPIRWITWMTYLEDPRIQFHYDKTLPELKHIPDVYTSSQSPVKHPSQYEGVFYTDGSAIKSPDPTKSNNAGMGIVHATYKPEYQVLNQWSIPLGNHTAQMAEIAAVEFACKKALKIPGPVLVITDSFYVAESANKELPYWKSNGFVNNKKKPLKHISKWKSIAECLSMKPDITIQHEKGISLQIPVFILKGNALADKLATQGSYVVNAGKRTADGSEFEKRTADGSEFESPKKKAKVE

SEQ ID NO: 6151 - protein, 2136 aa, synthetic construct
MPAAKRVKLDGGDKKYSIGLDIGTNSVGWAVITDEYKVPSKKFKVLGNTDRHSIKKNLIGALLFDSGETAEATRLKRTARRRYTRRKNRICYLQEIFSNEMAKVDDSFFHRLEESFLVEEDKKHERHPIFGNIVDEVAYHEKYPTIYHLRKKLVDSTDKADLRLIYLALAHMIKFRGHFLIEGDLNPDNSDVDKLFIQLVQTYNQLFEENPINASGVDAKAILSARLSKSRRLENLIAQLPGEKKNGLFGNLIALSLGLTPNFKSNFDLAEDAKLQLSKDTYDDDLDNLLAQIGDQYADLFLAAKNLSDAILLSDILRVNTEITKAPLSASMIKRYDEHHQDLTLLKALVRQQLPEKYKEIFFDQSKNGYAGYIDGGASQEEFYKFIKPILEKMDGTEELLVKLNREDLLRKQRTFDNGSIPHQIHLGELHAILRRQEDFYPFLKDNREKIEKILTFRIPYYVGPLARGNSRFAWMTRKSEETITPWNFEEVVDKGASAQSFIERMTNFDKNLPNEKVLPKHSLLYEYFTVYNELTKVKYVTEGMRKPAFLSGEQKKAIVDLLFKTNRKVTVKQLKEDYFKKIECFDSVEISGVEDRFNASLGTYHDLLKIIKDKDFLDNEENEDILEDIVLTLTLFEDREMIEERLKTYAHLFDDKVMKQLKRRRYTGWGRLSRKLINGIRDKQSGKTILDFLKSDGFANRNFMQLIHDDSLTFKEDIQKAQVSGQGDSLHEHIANLAGSPAIKKGILQTVKVVDELVKVMGRHKPENIVIEMARENQTTQKGQKNSRERMKRIEEGIKELGSQILKEHPVENTQLQNEKLYLYYLQNGRDMYVDQELDINRLSDYDVDHIVPQSFLKDDSIDNKVLTRSDKARGKSDNVPSEEVVKKMKNYWRQLLNAKLITQRKFDNLTKAERGGLSELDKAGFIKRQLVETRQITKHVAQILDSRMNTKYDENDKLIREVKVITLKSKLVSDFRKDFQFYKVREINNYHHAHDAYLNAVVGTALIKKYPKLESEFVYGDYKVYDVRKMIAKSEQEIGKATAKYFFYSNIMNFFKTEITLANGEIRKRPLIETNGETGEIVWDKGRDFATVRKVLSMPQVNIVKKTEVQTGGFSKESILPKRNSDKLIARKKDWDPKKYGGFDSPTVAYSVLVVAKVEKGKSKKLKSVKELLGITIMERSSFEKNPIDFLEAKGYKEVKKDLIIKLPKYSLFELENGRKRMLASAGELQKGNELALPSKYVNFLYLASHYEKLKGSPEDNEQKQLFVEQHKHYLDEIIEQISEFSKRVILADANLDKVLSAYNKHRDKPIREQAENIIHLFTLTNLGAPAAFKYFDTTIDRKRYTSTKEVLDATLIHQSITGLYETRIDLSQLGGDGGGGGGSGGGGSGGGGSGGGGSGGLLGRDLLTKLKAQIQFSTEGPQVTWEDRPAMCLVLNLEEEYRLHEKPVPPSIDPSWLQLFPMVWAEKAGMGLANQVPPVVVELKSDASPVAVRQYPMSKEAREGIRPHIQRFLDLGILVPCQSPWNTPLLPVKKPGTNDYRPVQDLREVNKRVQDIHPTVPNPYNLLSSLPPSHTWYSVLDLKDAFFCLKLHPNSQPLFAFEWRDPEKGNTGQLTWTRLPQGFKNSPTLFNEALHRDLASFRALNPQVVMLQYVDDLLVAAPTYRDCKEGTRRLLQELSKLGYRVSAKKAQLCREEVTYLGYLLKGGKRWLTPARKATVMKIPTPTTPRQVREFLGTAGFCRLWIPGFASLAAPLYPLTRPKVPFTWTEAHQEAFGRIKEALLSAPALALPDLTKPFALYVDEKEGVARGVLTQTLGPWRRPVAYLSKKLDPVASGWPTCLKAIAAVALLLKDADKLTLGQNVLVIAPHNLESIVRQPPDRWMTNARMTHYQSLLLNERVSFAPPAILNPATLLPVESDDTPIHICSEILAEETGTRPDLRDQPLPGVPAWYTDGSSFIMDGRRQAGAAIVDNKRTVWASNLPEGTSAQKAELIALTQALRLAEGKSINIYTDSRYAFATAHVHGAIYKQRGWLTSAGKDIKNKEEILALLEAIHLPKRVAIIHCPGHQRGTDPVATGNRKADEAAKQAAQSTRILTETTKNAGKRTADGSEFEKRTADGSEFESPKKKAKVE

SEQ ID NO: 6152 - protein, 2136 aa, synthetic construct
MPAAKRVKLDGGDKKYSIGLDIGTNSVGWAVITDEYKVPSKKFKVLGNTDRHSIKKNLIGALLFDSGETAEATRLKRTARRRYTRRKNRICYLQEIFSNEMAKVDDSFFHRLEESFLVEEDKKHERHPIFGNIVDEVAYHEKYPTIYHLRKKLVDSTDKADLRLIYLALAHMIKFRGHFLIEGDLNPDNSDVDKLFIQLVQTYNQLFEENPINASGVDAKAILSARLSKSRRLENLIAQLPGEKKNGLFGNLIALSLGLTPNFKSNFDLAEDAKLQLSKDTYDDDLDNLLAQIGDQYADLFLAAKNLSDAILLSDILRVNTEITKAPLSASMIKRYDEHHQDLTLLKALVRQQLPEKYKEIFFDQSKNGYAGYIDGGASQEEFYKFIKPILEKMDGTEELLVKLNREDLLRKQRTFDNGSIPHQIHLGELHAILRRQEDFYPFLKDNREKIEKILTFRIPYYVGPLARGNSRFAWMTRKSEETITPWNFEEVVDKGASAQSFIERMTNFDKNLPNEKVLPKHSLLYEYFTVYNELTKVKYVTEGMRKPAFLSGEQKKAIVDLLFKTNRKVTVKQLKEDYFKKIECFDSVEISGVEDRFNASLGTYHDLLKIIKDKDFLDNEENEDILEDIVLTLTLFEDREMIEERLKTYAHLFDDKVMKQLKRRRYTGWGRLSRKLINGIRDKQSGKTILDFLKSDGFANRNFMQLIHDDSLTFKEDIQKAQVSGQGDSLHEHIANLAGSPAIKKGILQTVKVVDELVKVMGRHKPENIVIEMARENQTTQKGQKNSRERMKRIEEGIKELGSQILKEHPVENTQLQNEKLYLYYLQNGRDMYVDQELDINRLSDYDVDHIVPQSFLKDDSIDNKVLTRSDKARGKSDNVPSEEVVKKMKNYWRQLLNAKLITQRKFDNLTKAERGGLSELDKAGFIKRQLVETRQITKHVAQILDSRMNTKYDENDKLIREVKVITLKSKLVSDFRKDFQFYKVREINNYHHAHDAYLNAVVGTALIKKYPKLESEFVYGDYKVYDVRKMIAKSEQEIGKATAKYFFYSNIMNFFKTEITLANGEIRKRPLIETNGETGEIVWDKGRDFATVRKVLSMPQVNIVKKTEVQTGGFSKESILPKRNSDKLIARKKDWDPKKYGGFDSPTVAYSVLVVAKVEKGKSKKLKSVKELLGITIMERSSFEKNPIDFLEAKGYKEVKKDLIIKLPKYSLFELENGRKRMLASAGELQKGNELALPSKYVNFLYLASHYEKLKGSPEDNEQKQLFVEQHKHYLDEIIEQISEFSKRVILADANLDKVLSAYNKHRDKPIREQAENIIHLFTLTNLGAPAAFKYFDTTIDRKRYTSTKEVLDATLIHQSITGLYETRIDLSQLGGDGGGGGGSGGGGSGGGGSGGGGSGGLLGRDLLTKLKAQIQFSTEGPQVTWEDRPAMCLVLNLEEEYRLHEKPVPPSIDPSWLQLFPMVWAEKAGMGLANQVPPVVVELKSDASPVAVRQYPMSKEAREGIRPHIQRFLDLGILVPCQSPWNTPLLPVKKPGTNDYRPVQDLREVNKRVQDIHPTVPNPYNLLSSLPPSHTWYSVLDLKDAFFCLKLHPNSQPLFAFEWRDPEKGNTGQLTWTRLPQGFKNSPTLFNEALHRDLASFRALNPQVVMLQYVDDLLVAAPTYRDCKEGTRRLLQELSKLGYRVSAKKAQLCREEVTYLGYLLKGGKRWLTPARKATVMKIPTPTTPRQVREFLGKAGFCRLFIPGFASLAAPLYPLTRPKVPFTWTEAHQEAFGRIKEALLSAPALALPDLTKPFALYVDEKEGVARGVLTQTLGPWRRPVAYLSKKLDPVASGWPTCLKAIAAVALLLKDADKLTLGQNVLVIAPHNLESIVRQPPDRWMTNARMTHYQSLLLNERVSFAPPAILNPATLLPVESDDTPIHICSEILAEETGTRPDLRDQPLPGVPAWYTDGSSFIMDGRRQAGAAIVDNKRTVWASNLPEGTSAQKAELIALTQALRLAEGKSINIYTDSRYAFATAHVHGAIYKQRGWLTSAGKDIKNKEEILALLEAIHLPKRVAIIHCPGHQRGTDPVATGNRKADEAAKQAAQSTRILTETTKNAGKRTADGSEFEKRTADGSEFESPKKKAKVE

SEQ ID NO: 6153 - protein, 2227 aa, synthetic construct
MPAAKRVKLDGGDKKYSIGLDIGTNSVGWAVITDEYKVPSKKFKVLGNTDRHSIKKNLIGALLFDSGETAEATRLKRTARRRYTRRKNRICYLQEIFSNEMAKVDDSFFHRLEESFLVEEDKKHERHPIFGNIVDEVAYHEKYPTIYHLRKKLVDSTDKADLRLIYLALAHMIKFRGHFLIEGDLNPDNSDVDKLFIQLVQTYNQLFEENPINASGVDAKAILSARLSKSRRLENLIAQLPGEKKNGLFGNLIALSLGLTPNFKSNFDLAEDAKLQLSKDTYDDDLDNLLAQIGDQYADLFLAAKNLSDAILLSDILRVNTEITKAPLSASMIKRYDEHHQDLTLLKALVRQQLPEKYKEIFFDQSKNGYAGYIDGGASQEEFYKFIKPILEKMDGTEELLVKLNREDLLRKQRTFDNGSIPHQIHLGELHAILRRQEDFYPFLKDNREKIEKILTFRIPYYVGPLARGNSRFAWMTRKSEETITPWNFEEVVDKGASAQSFIERMTNFDKNLPNEKVLPKHSLLYEYFTVYNELTKVKYVTEGMRKPAFLSGEQKKAIVDLLFKTNRKVTVKQLKEDYFKKIECFDSVEISGVEDRFNASLGTYHDLLKIIKDKDFLDNEENEDILEDIVLTLTLFEDREMIEERLKTYAHLFDDKVMKQLKRRRYTGWGRLSRKLINGIRDKQSGKTILDFLKSDGFANRNFMQLIHDDSLTFKEDIQKAQVSGQGDSLHEHIANLAGSPAIKKGILQTVKVVDELVKVMGRHKPENIVIEMARENQTTQKGQKNSRERMKRIEEGIKELGSQILKEHPVENTQLQNEKLYLYYLQNGRDMYVDQELDINRLSDYDVDHIVPQSFLKDDSIDNKVLTRSDKARGKSDNVPSEEVVKKMKNYWRQLLNAKLITQRKFDNLTKAERGGLSELDKAGFIKRQLVETRQITKHVAQILDSRMNTKYDENDKLIREVKVITLKSKLVSDFRKDFQFYKVREINNYHHAHDAYLNAVVGTALIKKYPKLESEFVYGDYKVYDVRKMIAKSEQEIGKATAKYFFYSNIMNFFKTEITLANGEIRKRPLIETNGETGEIVWDKGRDFATVRKVLSMPQVNIVKKTEVQTGGFSKESILPKRNSDKLIARKKDWDPKKYGGFDSPTVAYSVLVVAKVEKGKSKKLKSVKELLGITIMERSSFEKNPIDFLEAKGYKEVKKDLIIKLPKYSLFELENGRKRMLASAGELQKGNELALPSKYVNFLYLASHYEKLKGSPEDNEQKQLFVEQHKHYLDEIIEQISEFSKRVILADANLDKVLSAYNKHRDKPIREQAENIIHLFTLTNLGAPAAFKYFDTTIDRKRYTSTKEVLDATLIHQSITGLYETRIDLSQLGGDGGGGGGSGGGGSGGGGSGGGGSGGTLGDQGSRGSDPLPEPRVTLTVEGIPTEFLVNTGAEHSVLTKPMGKMGSKRTVVAGATGSKVYPWTTKRLLKIGQKQVTHSFLVIPECPAPLLGRDLLTKLKAQIQFSTEGPQVTWEDRPAMCLVLNLEEEYRLHEKPVPPSIDPSWLQLFPMVWAEKAGMGLANQVPPVVVELKSDASPVAVRQYPMSKEAREGIRPHIQRFLDLGILVPCQSPWNTPLLPVKKPGTNDYRPVQDLREVNKRVQDIHPTVPNPYNLLSSLPPSHTWYSVLDLKDAFFCLKLHPNSQPLFAFEWRDPEKGNTGQLTWTRLPQGFKNSPTLFNEALHRDLASFRALNPQVVMLQYVDDLLVAAPTYRDCKEGTRRLLQELSKLGYRVSAKKAQLCREEVTYLGYLLKGGKRWLTPARKATVMKIPTPTTPRQVREFLGTAGFCRLWIPGFASLAAPLYPLTRPKVPFTWTEAHQEAFGRIKEALLSAPALALPDLTKPFALYVDEKEGVARGVLTQTLGPWRRPVAYLSKKLDPVASGWPTCLKAIAAVALLLKDADKLTLGQNVLVIAPHNLESIVRQPPDRWMTNARMTHYQSLLLNERVSFAPPAILNPATLLPVESDDTPIHICSEILAEETGTRPDLRDQPLPGVPAWYTDGSSFIMDGRRQAGAAIVDNKRTVWASNLPEGTSAQKAELIALTQALRLAEGKSINIYTDSRYAFATAHVHGAIYKQRGWLTSAGKDIKNKEEILALLEAIHLPKRVAIIHCPGHQRGTDPVATGNRKADEAAKQAAQSTRILTETTKNAGKRTADGSEFEKRTADGSEFESPKKKAKVE

SEQ ID NO: 6154 - protein, 2105 aa, synthetic construct
MPAAKRVKLDGGDKKYSIGLDIGTNSVGWAVITDEYKVPSKKFKVLGNTDRHSIKKNLIGALLFDSGETAEATRLKRTARRRYTRRKNRICYLQEIFSNEMAKVDDSFFHRLEESFLVEEDKKHERHPIFGNIVDEVAYHEKYPTIYHLRKKLVDSTDKADLRLIYLALAHMIKFRGHFLIEGDLNPDNSDVDKLFIQLVQTYNQLFEENPINASGVDAKAILSARLSKSRRLENLIAQLPGEKKNGLFGNLIALSLGLTPNFKSNFDLAEDAKLQLSKDTYDDDLDNLLAQIGDQYADLFLAAKNLSDAILLSDILRVNTEITKAPLSASMIKRYDEHHQDLTLLKALVRQQLPEKYKEIFFDQSKNGYAGYIDGGASQEEFYKFIKPILEKMDGTEELLVKLNREDLLRKQRTFDNGSIPHQIHLGELHAILRRQEDFYPFLKDNREKIEKILTFRIPYYVGPLARGNSRFAWMTRKSEETITPWNFEEVVDKGASAQSFIERMTNFDKNLPNEKVLPKHSLLYEYFTVYNELTKVKYVTEGMRKPAFLSGEQKKAIVDLLFKTNRKVTVKQLKEDYFKKIECFDSVEISGVEDRFNASLGTYHDLLKIIKDKDFLDNEENEDILEDIVLTLTLFEDREMIEERLKTYAHLFDDKVMKQLKRRRYTGWGRLSRKLINGIRDKQSGKTILDFLKSDGFANRNFMQLIHDDSLTFKEDIQKAQVSGQGDSLHEHIANLAGSPAIKKGILQTVKVVDELVKVMGRHKPENIVIEMARENQTTQKGQKNSRERMKRIEEGIKELGSQILKEHPVENTQLQNEKLYLYYLQNGRDMYVDQELDINRLSDYDVDHIVPQSFLKDDSIDNKVLTRSDKARGKSDNVPSEEVVKKMKNYWRQLLNAKLITQRKFDNLTKAERGGLSELDKAGFIKRQLVETRQITKHVAQILDSRMNTKYDENDKLIREVKVITLKSKLVSDFRKDFQFYKVREINNYHHAHDAYLNAVVGTALIKKYPKLESEFVYGDYKVYDVRKMIAKSEQEIGKATAKYFFYSNIMNFFKTEITLANGEIRKRPLIETNGETGEIVWDKGRDFATVRKVLSMPQVNIVKKTEVQTGGFSKESILPKRNSDKLIARKKDWDPKKYGGFDSPTVAYSVLVVAKVEKGKSKKLKSVKELLGITIMERSSFEKNPIDFLEAKGYKEVKKDLIIKLPKYSLFELENGRKRMLASAGELQKGNELALPSKYVNFLYLASHYEKLKGSPEDNEQKQLFVEQHKHYLDEIIEQISEFSKRVILADANLDKVLSAYNKHRDKPIREQAENIIHLFTLTNLGAPAAFKYFDTTIDRKRYTSTKEVLDATLIHQSITGLYETRIDLSQLGGDGGGGGGSGGGGSGGGGSGGGGSGGTLNIEDEYRLHETSKEPDVSLGSTWLSDFPQAWAETGGMGLAVRQAPLIIPLKATSTPVSIKQYPMSQEARLGIKPHIQRLLDQGILVPCQSPWNTPLLPVKKPGTNDYRPVQDLREVNKRVEDIHPTVPNPYNLLSGLPPSHQWYTVLDLKDAFFCLRLHPTSQPLFAFEWRDPEMGISGQLTWTRLPQGFKNSPTLFNEALHRDLAGFRIQHPDLILLQYVDDLLLAATSELDCQQGTRALLQTLGDLGYRASAKKAQICQKQVKYLGYLLKEGQRWLTEARKETVMGQPIPKTPRQLREFLGTAGFCRLWIPGFAEMAAPLYPLTKPGTLFNWGPDQQKAFQEIKQALLTAPALGLPDLTKPFELFVDEKQGYAKGVLTQKLGPWRRPVAYLSKKLDPVAAGWPPCLRMVAAIAVLTKDAGKLTMGQPLVILAPHAVEALVKQPPDRWLSNARMTHYQALLLDTDRVQFGPVVALNPATLLPLPEEGLQHDCLDILAEAHGTRSDLMDQPLPDADHTWYTDGSSFLQEGQRKAGAAVTTETEVIWARALPAGTSAQRAELIALTQALKMAEGKKLNVYTDSRYAFATAHIHGEIYRRRGWLTSEGKEIKNKDEILALLKALFLPKRLSIIHCPGHQKGNSAEARGNRMADQAAREVATRETPETSTLLAGKRTADGSEFEKRTADGSEFESPKKKAKVE

SEQ ID NO: 6155 - protein, 2105 aa, synthetic construct
MPAAKRVKLDGGDKKYSIGLDIGTNSVGWAVITDEYKVPSKKFKVLGNTDRHSIKKNLIGALLFDSGETAEATRLKRTARRRYTRRKNRICYLQEIFSNEMAKVDDSFFHRLEESFLVEEDKKHERHPIFGNIVDEVAYHEKYPTIYHLRKKLVDSTDKADLRLIYLALAHMIKFRGHFLIEGDLNPDNSDVDKLFIQLVQTYNQLFEENPINASGVDAKAILSARLSKSRRLENLIAQLPGEKKNGLFGNLIALSLGLTPNFKSNFDLAEDAKLQLSKDTYDDDLDNLLAQIGDQYADLFLAAKNLSDAILLSDILRVNTEITKAPLSASMIKRYDEHHQDLTLLKALVRQQLPEKYKEIFFDQSKNGYAGYIDGGASQEEFYKFIKPILEKMDGTEELLVKLNREDLLRKQRTFDNGSIPHQIHLGELHAILRRQEDFYPFLKDNREKIEKILTFRIPYYVGPLARGNSRFAWMTRKSEETITPWNFEEVVDKGASAQSFIERMTNFDKNLPNEKVLPKHSLLYEYFTVYNELTKVKYVTEGMRKPAFLSGEQKKAIVDLLFKTNRKVTVKQLKEDYFKKIECFDSVEISGVEDRFNASLGTYHDLLKIIKDKDFLDNEENEDILEDIVLTLTLFEDREMIEERLKTYAHLFDDKVMKQLKRRRYTGWGRLSRKLINGIRDKQSGKTILDFLKSDGFANRNFMQLIHDDSLTFKEDIQKAQVSGQGDSLHEHIANLAGSPAIKKGILQTVKVVDELVKVMGRHKPENIVIEMARENQTTQKGQKNSRERMKRIEEGIKELGSQILKEHPVENTQLQNEKLYLYYLQNGRDMYVDQELDINRLSDYDVDHIVPQSFLKDDSIDNKVLTRSDKARGKSDNVPSEEVVKKMKNYWRQLLNAKLITQRKFDNLTKAERGGLSELDKAGFIKRQLVETRQITKHVAQILDSRMNTKYDENDKLIREVKVITLKSKLVSDFRKDFQFYKVREINNYHHAHDAYLNAVVGTALIKKYPKLESEFVYGDYKVYDVRKMIAKSEQEIGKATAKYFFYSNIMNFFKTEITLANGEIRKRPLIETNGETGEIVWDKGRDFATVRKVLSMPQVNIVKKTEVQTGGFSKESILPKRNSDKLIARKKDWDPKKYGGFDSPTVAYSVLVVAKVEKGKSKKLKSVKELLGITIMERSSFEKNPIDFLEAKGYKEVKKDLIIKLPKYSLFELENGRKRMLASAGELQKGNELALPSKYVNFLYLASHYEKLKGSPEDNEQKQLFVEQHKHYLDEIIEQISEFSKRVILADANLDKVLSAYNKHRDKPIREQAENIIHLFTLTNLGAPAAFKYFDTTIDRKRYTSTKEVLDATLIHQSITGLYETRIDLSQLGGDGGGGGGSGGGGSGGGGSGGGGSGGTLNIEDEYRLHETSKGPDVPLGSTWLSDFPQAWAETGGMGLAVRQAPLIIPLKATSTPVSIKQYPMSQEARLGIKPHIQRLLDQGILVPCQSPWNTPLLPVKKPGTNDYRPVQDLREVNKRVEDIHPTVPNPYNLLSGLPPSHQWYTVLDLKDAFFCLRLHPTSQSLFAFEWRDPEMGISGQLTWTRLPQGFKNSPTLFNEALHRDLADFRIQHPDLILLQYVDDLLLAATSELDCQQGTRALLQTLGDLGYRASAKKAQICQKQVKYLGYLLKEGQRWLTEARKETVMGQPTPKTPRQLREFLGKAGFCRLFIPGFAEMAAPLYPLTKPGTLFEWGPDQQKAYQEIKQALLTAPALGLPDLTKPFELFVDEKQGYAKGVLTQKLGPWRRPVAYLSKKLDPVAAGWPPCLRMVAAIAVLTKDAGKLTMGQPLVILAPHAVEALVKQPPDRWLSNARMTHYQALLLDTDRVQFGPIVALNPATLLPLPEEGLQHDCLDILAEAHGTRPDLTDQPLPDADHTWYTDGSSFLQEGQRKAGAAVTTETEVVWAKALPAGTSAQRAELIALTQALKMAEGKKLNVYTDSRYAFATAHIHGEIYRRRGWLTSEGKEIKNKDEILALLKALFLPKRLSIIHCPGHQKGNRAEARGNRMADQAAREVATRETPETSTLLAGKRTADGSEFEKRTADGSEFESPKKKAKVE

SEQ ID NO: 6156 - protein, 2105 aa, synthetic construct
MPAAKRVKLDGGDKKYSIGLDIGTNSVGWAVITDEYKVPSKKFKVLGNTDRHSIKKNLIGALLFDSGETAEATRLKRTARRRYTRRKNRICYLQEIFSNEMAKVDDSFFHRLEESFLVEEDKKHERHPIFGNIVDEVAYHEKYPTIYHLRKKLVDSTDKADLRLIYLALAHMIKFRGHFLIEGDLNPDNSDVDKLFIQLVQTYNQLFEENPINASGVDAKAILSARLSKSRRLENLIAQLPGEKKNGLFGNLIALSLGLTPNFKSNFDLAEDAKLQLSKDTYDDDLDNLLAQIGDQYADLFLAAKNLSDAILLSDILRVNTEITKAPLSASMIKRYDEHHQDLTLLKALVRQQLPEKYKEIFFDQSKNGYAGYIDGGASQEEFYKFIKPILEKMDGTEELLVKLNREDLLRKQRTFDNGSIPHQIHLGELHAILRRQEDFYPFLKDNREKIEKILTFRIPYYVGPLARGNSRFAWMTRKSEETITPWNFEEVVDKGASAQSFIERMTNFDKNLPNEKVLPKHSLLYEYFTVYNELTKVKYVTEGMRKPAFLSGEQKKAIVDLLFKTNRKVTVKQLKEDYFKKIECFDSVEISGVEDRFNASLGTYHDLLKIIKDKDFLDNEENEDILEDIVLTLTLFEDREMIEERLKTYAHLFDDKVMKQLKRRRYTGWGRLSRKLINGIRDKQSGKTILDFLKSDGFANRNFMQLIHDDSLTFKEDIQKAQVSGQGDSLHEHIANLAGSPAIKKGILQTVKVVDELVKVMGRHKPENIVIEMARENQTTQKGQKNSRERMKRIEEGIKELGSQILKEHPVENTQLQNEKLYLYYLQNGRDMYVDQELDINRLSDYDVDHIVPQSFLKDDSIDNKVLTRSDKARGKSDNVPSEEVVKKMKNYWRQLLNAKLITQRKFDNLTKAERGGLSELDKAGFIKRQLVETRQITKHVAQILDSRMNTKYDENDKLIREVKVITLKSKLVSDFRKDFQFYKVREINNYHHAHDAYLNAVVGTALIKKYPKLESEFVYGDYKVYDVRKMIAKSEQEIGKATAKYFFYSNIMNFFKTEITLANGEIRKRPLIETNGETGEIVWDKGRDFATVRKVLSMPQVNIVKKTEVQTGGFSKESILPKRNSDKLIARKKDWDPKKYGGFDSPTVAYSVLVVAKVEKGKSKKLKSVKELLGITIMERSSFEKNPIDFLEAKGYKEVKKDLIIKLPKYSLFELENGRKRMLASAGELQKGNELALPSKYVNFLYLASHYEKLKGSPEDNEQKQLFVEQHKHYLDEIIEQISEFSKRVILADANLDKVLSAYNKHRDKPIREQAENIIHLFTLTNLGAPAAFKYFDTTIDRKRYTSTKEVLDATLIHQSITGLYETRIDLSQLGGDGGGGGGSGGGGSGGGGSGGGGSGGTLNIEDEHRLHETSKEPDVSLGSTWLSDFPQAWAETGGMGLAVRQAPLIIPLKATSTPVSIKQYPMSQEARLGIKPHIQRLLDQGILVPCQSPWNTPLLPVKKPGTNDYRPVQDLREVNKRVEDIHPTVPNPYNLLSGLPPSHQWYTVLDLKDAFFCLRLHPTSQPLFAFEWRDPEMGISGQLTWTRLPQGFKNSPTLFDEALHRDLADFRIQHPDLILLQYVDDLLLAATSELDCQQGTRALLQTLGNLGYRASAKKAQICQKQVKYLGYLLKEGQRWLTEARKETVMGQPTPKTPRQLREFLGTAGFCRLWIPGFAEMAAPLYPLTKTGTLFNWGPDQQKAYQEIKQALLTAPALGLPDLTKPFELFVDEKQGYAKGVLTQKLGPWRRPVAYLSKKLDPVAAGWPPCLRMVAAIAVLTKDAGKLTMGQPLVILAPHAVEALVKQPPDRWLSNARMTHYQALLLDTDRVQFGPVVALNPATLLPLPEEGLQHNCLDILAEAHGTRPDLTDQPLPDADHTWYTDGSSLLQEGQRKAGAAVTTETEVIWAKALPAGTSAQRAELIALTQALKMAEGKKLNVYTDSRYAFATAHIHGEIYRRRGLLTSEGKEIKNKDEILALLKALFLPKRLSIIHCPGHQKGHSAEARGNRMADQAARKAAITETPDTSTLLAGKRTADGSEFEKRTADGSEFESPKKKAKVE

SEQ ID NO: 6157 - protein, 2033 aa, synthetic construct
MPAAKRVKLDGGDKKYSIGLDIGTNSVGWAVITDEYKVPSKKFKVLGNTDRHSIKKNLIGALLFDSGETAEATRLKRTARRRYTRRKNRICYLQEIFSNEMAKVDDSFFHRLEESFLVEEDKKHERHPIFGNIVDEVAYHEKYPTIYHLRKKLVDSTDKADLRLIYLALAHMIKFRGHFLIEGDLNPDNSDVDKLFIQLVQTYNQLFEENPINASGVDAKAILSARLSKSRRLENLIAQLPGEKKNGLFGNLIALSLGLTPNFKSNFDLAEDAKLQLSKDTYDDDLDNLLAQIGDQYADLFLAAKNLSDAILLSDILRVNTEITKAPLSASMIKRYDEHHQDLTLLKALVRQQLPEKYKEIFFDQSKNGYAGYIDGGASQEEFYKFIKPILEKMDGTEELLVKLNREDLLRKQRTFDNGSIPHQIHLGELHAILRRQEDFYPFLKDNREKIEKILTFRIPYYVGPLARGNSRFAWMTRKSEETITPWNFEEVVDKGASAQSFIERMTNFDKNLPNEKVLPKHSLLYEYFTVYNELTKVKYVTEGMRKPAFLSGEQKKAIVDLLFKTNRKVTVKQLKEDYFKKIECFDSVEISGVEDRFNASLGTYHDLLKIIKDKDFLDNEENEDILEDIVLTLTLFEDREMIEERLKTYAHLFDDKVMKQLKRRRYTGWGRLSRKLINGIRDKQSGKTILDFLKSDGFANRNFMQLIHDDSLTFKEDIQKAQVSGQGDSLHEHIANLAGSPAIKKGILQTVKVVDELVKVMGRHKPENIVIEMARENQTTQKGQKNSRERMKRIEEGIKELGSQILKEHPVENTQLQNEKLYLYYLQNGRDMYVDQELDINRLSDYDVDHIVPQSFLKDDSIDNKVLTRSDKARGKSDNVPSEEVVKKMKNYWRQLLNAKLITQRKFDNLTKAERGGLSELDKAGFIKRQLVETRQITKHVAQILDSRMNTKYDENDKLIREVKVITLKSKLVSDFRKDFQFYKVREINNYHHAHDAYLNAVVGTALIKKYPKLESEFVYGDYKVYDVRKMIAKSEQEIGKATAKYFFYSNIMNFFKTEITLANGEIRKRPLIETNGETGEIVWDKGRDFATVRKVLSMPQVNIVKKTEVQTGGFSKESILPKRNSDKLIARKKDWDPKKYGGFDSPTVAYSVLVVAKVEKGKSKKLKSVKELLGITIMERSSFEKNPIDFLEAKGYKEVKKDLIIKLPKYSLFELENGRKRMLASAGELQKGNELALPSKYVNFLYLASHYEKLKGSPEDNEQKQLFVEQHKHYLDEIIEQISEFSKRVILADANLDKVLSAYNKHRDKPIREQAENIIHLFTLTNLGAPAAFKYFDTTIDRKRYTSTKEVLDATLIHQSITGLYETRIDLSQLGGDGGGGGGSGGGGSGGGGSGGGGSGGGRDIMKDIKVRLMTDSPDDSQDLMIGAIESNLFADQISWKSDQPVWLNQWPLKQEKLQALQQLVTEQLQLGHLEESNSPWNTPVFVIKKKSGKWRLLQDLRAVNATMHDMGALQPGLPSPVAVPKGWEIIIIDLQDCFFNIKLHPEDCKRFAFSVPSPNFKRPYQRFQWKVLPQGMKNSPTLCQKFVDKAILTVRDKYQDSYIVHYMDDILLAHPSRSIVDEILTSMIQALNKHGLVVSTEKIQKYDNLKYLGTHIQGDSVSYQKLQIRTDKLRTLNDFQKLLGNINWIRPFLKLTTGELKPLFEILNGDSNPISTRKLTPEACKALQLMNERLSTARVKRLDLSQPWSLCILKTEYTPTACLWQDGVVEWIHLPHISPKVITPYDIFCTQLIIKGRHRSKELFSKDPDYIVVPYTKVQFDLLLQEKEDWPISLLGFLGEVHFHLPKDPLLTFTLQTAIIFPHMTSTTPLEKGIVIFTDGSANGRSVTYIQGREPIIKENTQNTAQQAEIVAVITAFEEVSQPFNLYTDSKYVTGLFPEIETATLSPRTKIYTELKHLQRLIHKRQEKFYIGHIRGHTGLPGPLAQGNAYADSLTRILTAGKRTADGSEFEKRTADGSEFESPKKKAKVE

SEQ ID NO: 6158 - protein, 2097 aa, synthetic construct
MPAAKRVKLDGGDKKYSIGLDIGTNSVGWAVITDEYKVPSKKFKVLGNTDRHSIKKNLIGALLFDSGETAEATRLKRTARRRYTRRKNRICYLQEIFSNEMAKVDDSFFHRLEESFLVEEDKKHERHPIFGNIVDEVAYHEKYPTIYHLRKKLVDSTDKADLRLIYLALAHMIKFRGHFLIEGDLNPDNSDVDKLFIQLVQTYNQLFEENPINASGVDAKAILSARLSKSRRLENLIAQLPGEKKNGLFGNLIALSLGLTPNFKSNFDLAEDAKLQLSKDTYDDDLDNLLAQIGDQYADLFLAAKNLSDAILLSDILRVNTEITKAPLSASMIKRYDEHHQDLTLLKALVRQQLPEKYKEIFFDQSKNGYAGYIDGGASQEEFYKFIKPILEKMDGTEELLVKLNREDLLRKQRTFDNGSIPHQIHLGELHAILRRQEDFYPFLKDNREKIEKILTFRIPYYVGPLARGNSRFAWMTRKSEETITPWNFEEVVDKGASAQSFIERMTNFDKNLPNEKVLPKHSLLYEYFTVYNELTKVKYVTEGMRKPAFLSGEQKKAIVDLLFKTNRKVTVKQLKEDYFKKIECFDSVEISGVEDRFNASLGTYHDLLKIIKDKDFLDNEENEDILEDIVLTLTLFEDREMIEERLKTYAHLFDDKVMKQLKRRRYTGWGRLSRKLINGIRDKQSGKTILDFLKSDGFANRNFMQLIHDDSLTFKEDIQKAQVSGQGDSLHEHIANLAGSPAIKKGILQTVKVVDELVKVMGRHKPENIVIEMARENQTTQKGQKNSRERMKRIEEGIKELGSQILKEHPVENTQLQNEKLYLYYLQNGRDMYVDQELDINRLSDYDVDHIVPQSFLKDDSIDNKVLTRSDKARGKSDNVPSEEVVKKMKNYWRQLLNAKLITQRKFDNLTKAERGGLSELDKAGFIKRQLVETRQITKHVAQILDSRMNTKYDENDKLIREVKVITLKSKLVSDFRKDFQFYKVREINNYHHAHDAYLNAVVGTALIKKYPKLESEFVYGDYKVYDVRKMIAKSEQEIGKATAKYFFYSNIMNFFKTEITLANGEIRKRPLIETNGETGEIVWDKGRDFATVRKVLSMPQVNIVKKTEVQTGGFSKESILPKRNSDKLIARKKDWDPKKYGGFDSPTVAYSVLVVAKVEKGKSKKLKSVKELLGITIMERSSFEKNPIDFLEAKGYKEVKKDLIIKLPKYSLFELENGRKRMLASAGELQKGNELALPSKYVNFLYLASHYEKLKGSPEDNEQKQLFVEQHKHYLDEIIEQISEFSKRVILADANLDKVLSAYNKHRDKPIREQAENIIHLFTLTNLGAPAAFKYFDTTIDRKRYTSTKEVLDATLIHQSITGLYETRIDLSQLGGDGGGGGGSGGGGSGGGGSGGGGSGGLDDEYRLYSPLVKPDQNIQFWLEQFPQAWAETAGMGLAKQVPPQVIQLKASATPVSVRQYPLSKEAQEGIRPHVQRLIQQGILVPVQSPWNTPLLPVRKPGTNDYRPVQDLREVNKRVQDIHPTVPNPYNLLCALPPQRSWYTVLDLKDAFFCLRLHPTSQPLFAFEWRDPGTGRTGQLTWTRLPQGFKNSPTIFNEALHRDLANFRIQHPQVTLLQYVDDLLLAGATKQDCLEGTKALLLELSDLGYRASAKKAQICRREVTYLGYSLRDGQRWLTEARKKTVVQIPAPTTAKQVREFLGKAGFCRLFIPGFATLAAPLYPLTKPKGEFSWAPEHQKAFDAIKKALLSAPALALPDVTKPFTLYVDERKGVARGVLTQTLGPWRRPVAYLSKKLDPVASGWPVCLKAIAAVAILVKDADKLTLGQNITVIAPHALENIVRQPPDRWMTNARMTHYQSLLLTERVTFAPPAALNPATLLPEETDEPVTHDCHQLLIEETGVRKDLTDIPLTGEVLTWFTDGSSYVVEGKRMAGAAVVDGTRTIWASSLPEGTSAQKAELMALTQALRLAEGKSINIYTDSRYAFATAHVHGAIYKQRGWLTSAGREIKNKEEILSLLEALHLPKRLAIIHCPGHQKAKDPISRGNQMADRVAKQAAQGVNLLPAGKRTADGSEFEKRTADGSEFESPKKKAKVE

SEQ ID NO: 6159 - protein, 2097 aa, synthetic construct; identical to SEQ ID NO: 6158

SEQ ID NO: 6160 - protein, 2096 aa, synthetic construct
MPAAKRVKLDGGDKKYSIGLDIGTNSVGWAVITDEYKVPSKKFKVLGNTDRHSIKKNLIGALLFDSGETAEATRLKRTARRRYTRRKNRICYLQEIFSNEMAKVDDSFFHRLEESFLVEEDKKHERHPIFGNIVDEVAYHEKYPTIYHLRKKLVDSTDKADLRLIYLALAHMIKFRGHFLIEGDLNPDNSDVDKLFIQLVQTYNQLFEENPINASGVDAKAILSARLSKSRRLENLIAQLPGEKKNGLFGNLIALSLGLTPNFKSNFDLAEDAKLQLSKDTYDDDLDNLLAQIGDQYADLFLAAKNLSDAILLSDILRVNTEITKAPLSASMIKRYDEHHQDLTLLKALVRQQLPEKYKEIFFDQSKNGYAGYIDGGASQEEFYKFIKPILEKMDGTEELLVKLNREDLLRKQRTFDNGSIPHQIHLGELHAILRRQEDFYPFLKDNREKIEKILTFRIPYYVGPLARGNSRFAWMTRKSEETITPWNFEEVVDKGASAQSFIERMTNFDKNLPNEKVLPKHSLLYEYFTVYNELTKVKYVTEGMRKPAFLSGEQKKAIVDLLFKTNRKVTVKQLKEDYFKKIECFDSVEISGVEDRFNASLGTYHDLLKIIKDKDFLDNEENEDILEDIVLTLTLFEDREMIEERLKTYAHLFDDKVMKQLKRRRYTGWGRLSRKLINGIRDKQSGKTILDFLKSDGFANRNFMQLIHDDSLTFKEDIQKAQVSGQGDSLHEHIANLAGSPAIKKGILQTVKVVDELVKVMGRHKPENIVIEMARENQTTQKGQKNSRERMKRIEEGIKELGSQILKEHPVENTQLQNEKLYLYYLQNGRDMYVDQELDINRLSDYDVDHIVPQSFLKDDSIDNKVLTRSDKARGKSDNVPSEEVVKKMKNYWRQLLNAKLITQRKFDNLTKAERGGLSELDKAGFIKRQLVETRQITKHVAQILDSRMNTKYDENDKLIREVKVITLKSKLVSDFRKDFQFYKVREINNYHHAHDAYLNAVVGTALIKKYPKLESEFVYGDYKVYDVRKMIAKSEQEIGKATAKYFFYSNIMNFFKTEITLANGEIRKRPLIETNGETGEIVWDKGRDFATVRKVLSMPQVNIVKKTEVQTGGFSKESILPKRNSDKLIARKKDWDPKKYGGFDSPTVAYSVLVVAKVEKGKSKKLKSVKELLGITIMERSSFEKNPIDFLEAKGYKEVKKDLIIKLPKYSLFELENGRKRMLASAGELQKGNELALPSKYVNFLYLASHYEKLKGSPEDNEQKQLFVEQHKHYLDEIIEQISEFSKRVILADANLDKVLSAYNKHRDKPIREQAENIIHLFTLTNLGAPAAFKYFDTTIDRKRYTSTKEVLDATLIHQSITGLYETRIDLSQLGGDGGGGGGSGGGGSGGGGSGGGGSGGVPWLMKKPLQLTVLVPLHEYQERLLQQTALPKEQKELLQKLFLKYDALWQHWENQVGHRRIKPHNIATGTLAPRPQKQYPINPKAKPSIQIVIDDLLKQGVLIQQNSTMNTPVYPVPKPDGKWRMVLDYREVNKTIPLIAAQNQHSAGILSSIYRGKYKTTLDLTNGFWAHPITPESYWLTAFTWQGKQYCWTRLPQGFLNSPALFTADVVDLLKEIPNVQAYVDDIYISHDDPQEHLEQLEKIFSILLNAGYVVSLKKSEIAQREVEFLGFNITKEGRGLTDTFKQKLLNITPPKDLKQLQSILGLLNFARNFIPNYSELVKPLYTIVANANGKFISWTEDNSNQLQHIISVLNQADNLEERNPETRLIIKVNSSPSAGYIRYYNEGSKRPIMYVNYIFSKAEAKFTQTEKLLTTMHKGLIKAMDLAMGQEILVYSPIVSMTKIQRTPLPERKALPVRWITWMTYLEDPRIQFHYDKSLPELQQIPNVTEDVIAKTKHPSEFAMVFYTDGSAIKHPDVNKSHSAGMGIAQVQFIPEYKIVHQWSIPLGDHTAQLAEIAAVEFACKKALKISGPVLIVTDSFYVAESANKELPYWKSNGFLNNKKKPLRHVSKWKSIAECLQLKPDIIIMHEKGHQQPMTTLHTEGNNLADKLATQGSYVVHAGKRTADGSEFEKRTADGSEFESPKKKAKVE

SEQ ID NO: 6161 - protein, 2185 aa, synthetic construct
MPAAKRVKLDGGDKKYSIGLDIGTNSVGWAVITDEYKVPSKKFKVLGNTDRHSIKKNLIGALLFDSGETAEATRLKRTARRRYTRRKNRICYLQEIFSNEMAKVDDSFFHRLEESFLVEEDKKHERHPIFGNIVDEVAYHEKYPTIYHLRKKLVDSTDKADLRLIYLALAHMIKFRGHFLIEGDLNPDNSDVDKLFIQLVQTYNQLFEENPINASGVDAKAILSARLSKSRRLENLIAQLPGEKKNGLFGNLIALSLGLTPNFKSNFDLAEDAKLQLSKDTYDDDLDNLLAQIGDQYADLFLAAKNLSDAILLSDILRVNTEITKAPLSASMIKRYDEHHQDLTLLKALVRQQLPEKYKEIFFDQSKNGYAGYIDGGASQEEFYKFIKPILEKMDGTEELLVKLNREDLLRKQRTFDNGSIPHQIHLGELHAILRRQEDFYPFLKDNREKIEKILTFRIPYYVGPLARGNSRFAWMTRKSEETITPWNFEEVVDKGASAQSFIERMTNFDKNLPNEKVLPKHSLLYEYFTVYNELTKVKYVTEGMRKPAFLSGEQKKAIVDLLFKTNRKVTVKQLKEDYFKKIECFDSVEISGVEDRFNASLGTYHDLLKIIKDKDFLDNEENEDILEDIVLTLTLFEDREMIEERLKTYAHLFDDKVMKQLKRRRYTGWGRLSRKLINGIRDKQSGKTILDFLKSDGFANRNFMQLIHDDSLTFKEDIQKAQVSGQGDSLHEHIANLAGSPAIKKGILQTVKVVDELVKVMGRHKPENIVIEMARENQTTQKGQKNSRERMKRIEEGIKELGSQILKEHPVENTQLQNEKLYLYYLQNGRDMYVDQELDINRLSDYDVDHIVPQSFLKDDSIDNKVLTRSDKARGKSDNVPSEEVVKKMKNYWRQLLNAKLITQRKFDNLTKAERGGLSELDKAGFIKRQLVETRQITKHVAQILDSRMNTKYDENDKLIREVKVITLKSKLVSDFRKDFQFYKVREINNYHHAHDAYLNAVVGTALIKKYPKLESEFVYGDYKVYDVRKMIAKSEQEIGKATAKYFFYSNIMNFFKTEITLANGEIRKRPLIETNGETGEIVWDKGRDFATVRKVLSMPQVNIVKKTEVQTGGFSKESILPKRNSDKLIARKKDWDPKKYGGFDSPTVAYSVLVVAKVEKGKSKKLKSVKELLGITIMERSSFEKNPIDFLEAKGYKEVKKDLIIKLPKYSLFELENGRKRMLASAGELQKGNELALPSKYVNFLYLASHYEKLKGSPEDNEQKQLFVEQHKHYLDEIIEQISEFSKRVILADANLDKVLSAYNKHRDKPIREQAENIIHLFTLTNLGAPAAFKYFDTTIDRKRYTSTKEVLDATLIHQSITGLYETRIDLSQLGGDGGGGGGSGGGGSGGGGSGGGGSGGMDPLQLLQPLEAEIKGTKLKAHWNSGATITCVPQAFLEEEVPIKNIWIKTIHGEKEQPVYYLTFKIQGRKVEAEVISSPYDYILVSPSDIPWLMKKPLQLTTLVPLQEYEERLLKQTMLTGSYKEKLQSLFLKYDALWQHWENQVGHRRIKPHHIATGTVNPRPQKQYPINPKAKASIQTVINDLLKQGVLIQQNSIMNTPVYPVPKPDGKWRMVLDYREVNKTIPLIAAQNQHSAGILSSIFRGKYKTTLDLSNGFWAHSITPESYWLTAFTWLGQQYCWTRLPQGFLNSPALFTADVVDLLKEVPNVQVYVDDIYISHDDPREHLEQLEKVFSLLLNAGYVVSLKKSEIAQHEVEFLGFNITKEGRGLTETFKQKLLNITPPRDLKQLQSILGLLNFARNFIPNFSELVKPLYNIIATANGKYITWTTDNSQQLQNIISMLNSAENLEERNPEVRLIMKVNTSPSAGYIRFYNEFAKRPIMYLNYVYTKAEVKFTNTEKLLTTIHKGLIKALDLGMGQEILVYSPIVSMTKIQKTPLPERKALPIRWITWMSYLEDPRIQFHYDKTLPELQQVPTVTDDIIAKIKHPSEFSMVFYTDGSAIKHPNVNKSHNAGMGIAQVQFKPEFTVINTWSIPLGDHTAQLAEVAAVEFACKKALKIDGPVLIVTDSFYVAESVNKELPYWQSNGFFNNKKKPLKHVSKWKSIADCIQLKPDIIIIHEKGHQPTASTFHTEGNNLADKLATQGSYVVNAGKRTADGSEFEKRTADGSEFESPKKKAKVE

SEQ ID NO: 6162 - protein, 2096 aa, synthetic construct
MPAAKRVKLDGGDKKYSIGLDIGTNSVGWAVITDEYKVPSKKFKVLGNTDRHSIKKNLIGALLFDSGETAEATRLKRTARRRYTRRKNRICYLQEIFSNEMAKVDDSFFHRLEESFLVEEDKKHERHPIFGNIVDEVAYHEKYPTIYHLRKKLVDSTDKADLRLIYLALAHMIKFRGHFLIEGDLNPDNSDVDKLFIQLVQTYNQLFEENPINASGVDAKAILSARLSKSRRLENLIAQLPGEKKNGLFGNLIALSLGLTPNFKSNFDLAEDAKLQLSKDTYDDDLDNLLAQIGDQYADLFLAAKNLSDAILLSDILRVNTEITKAPLSASMIKRYDEHHQDLTLLKALVRQQLPEKYKEIFFDQSKNGYAGYIDGGASQEEFYKFIKPILEKMDGTEELLVKLNREDLLRKQRTFDNGSIPHQIHLGELHAILRRQEDFYPFLKDNREKIEKILTFRIPYYVGPLARGNSRFAWMTRKSEETITPWNFEEVVDKGASAQSFIERMTNFDKNLPNEKVLPKHSLLYEYFTVYNELTKVKYVTEGMRKPAFLSGEQKKAIVDLLFKTNRKVTVKQLKEDYFKKIECFDSVEISGVEDRFNASLGTYHDLLKIIKDKDFLDNEENEDILEDIVLTLTLFEDREMIEERLKTYAHLFDDKVMKQLKRRRYTGWGRLSRKLINGIRDKQSGKTILDFLKSDGFANRNFMQLIHDDSLTFKEDIQKAQVSGQGDSLHEHIANLAGSPAIKKGILQTVKVVDELVKVMGRHKPENIVIEMARENQTTQKGQKNSRERMKRIEEGIKELGSQILKEHPVENTQLQNEKLYLYYLQNGRDMYVDQELDINRLSDYDVDHIVPQSFLKDDSIDNKVLTRSDKARGKSDNVPSEEVVKKMKNYWRQLLNAKLITQRKFDNLTKAERGGLSELDKAGFIKRQLVETRQITKHVAQILDSRMNTKYDENDKLIREVKVITLKSKLVSDFRKDFQFYKVREINNYHHAHDAYLNAVVGTALIKKYPKLESEFVYGDYKVYDVRKMIAKSEQEIGKATAKYFFYSNIMNFFKTEITLANGEIRKRPLIETNGETGEIVWDKGRDFATVRKVLSMPQVNIVKKTEVQTGGFSKESILPKRNSDKLIARKKDWDPKKYGGFDSPTVAYSVLVVAKVEKGKSKKLKSVKELLGITIMERSSFEKNPIDFLEAKGYKEVKKDLIIKLPKYSLFELENGRKRMLASAGELQKGNELALPSKYVNFLYLASHYEKLKGSPEDNEQKQLFVEQHKHYLDEIIEQISEFSKRVILADANLDKVLSAYNKHRDKPIREQAENIIHLFTLTNLGAPAAFKYFDTTIDRKRYTSTKEVLDATLIHQSITGLYETRIDLSQLGGDGGGGGGSGGGGSGGGGSGGGGSGGIPWLMKKPLQLTTLVPLQEYEERLLKQTMLTGSYKEKLQSLFLKYDALWQHWENQVGHRRIKPHHIATGTVNPRPQKQYPINPKAKASIQTVINDLLKQGVLIQQNSIMNTPVYPVPKPDGKWRMVLDYREVNKTIPLIAAQNQHSAGILSSIFRGKYKTTLDLSNGFWAHSITPESYWLTAFTWLGQQYCWTRLPQGFLNSPALFNADVVDLLKEVPNVQVYVDDIYISHDDPREHLEQLEKVFSLLLNAGYVVSLKKSEIAQHEVEFLGFNITKEGRGLTETFKQKLLNITPPRDLKQLQSILGKLNFARNFIPNFSELVKPLYNIIATAPGKYITWTTDNSQQLQNIISMLNSAENLEERNPEVRLIMKVNTSPSAGYIRFYNEFAKRPIMYLNYVYTKAEVKFTNTEKLLTTIHKGLIKALDLGMGQEILVYSPIVSMTKIQKTPLPERKALPIRWITWMSYLEDPRIQFHYDKTLPELQQVPTVTDDIIAKIKHPSEFSMVFYTDGSAIKHPNVNKSHNAGMGIAQVQFKPEFTVINTWSIPLGDHTAQLAEVAAVEFACKKALKIDGPVLIVTDSFYVAESVNKELPYWQSNGFFNNKKKPLKHVSKWKSIADCIQLKPDIIIIHEKGHQPTASTFHTEGNNLADKLATQGSYVVNAGKRTADGSEFEKRTADGSEFESPKKKAKVE

SEQ ID NO: 6163 - protein, 2103 aa, synthetic construct
MPAAKRVKLDGGDKKYSIGLDIGTNSVGWAVITDEYKVPSKKFKVLGNTDRHSIKKNLIGALLFDSGETAEATRLKRTARRRYTRRKNRICYLQEIFSNEMAKVDDSFFHRLEESFLVEEDKKHERHPIFGNIVDEVAYHEKYPTIYHLRKKLVDSTDKADLRLIYLALAHMIKFRGHFLIEGDLNPDNSDVDKLFIQLVQTYNQLFEENPINASGVDAKAILSARLSKSRRLENLIAQLPGEKKNGLFGNLIALSLGLTPNFKSNFDLAEDAKLQLSKDTYDDDLDNLLAQIGDQYADLFLAAKNLSDAILLSDILRVNTEITKAPLSASMIKRYDEHHQDLTLLKALVRQQLPEKYKEIFFDQSKNGYAGYIDGGASQEEFYKFIKPILEKMDGTEELLVKLNREDLLRKQRTFDNGSIPHQIHLGELHAILRRQEDFYPFLKDNREKIEKILTFRIPYYVGPLARGNSRFAWMTRKSEETITPWNFEEVVDKGASAQSFIERMTNFDKNLPNEKVLPKHSLLYEYFTVYNELTKVKYVTEGMRKPAFLSGEQKKAIVDLLFKTNRKVTVKQLKEDYFKKIECFDSVEISGVEDRFNASLGTYHDLLKIIKDKDFLDNEENEDILEDIVLTLTLFEDREMIEERLKTYAHLFDDKVMKQLKRRRYTGWGRLSRKLINGIRDKQSGKTILDFLKSDGFANRNFMQLIHDDSLTFKEDIQKAQVSGQGDSLHEHIANLAGSPAIKKGILQTVKVVDELVKVMGRHKPENIVIEMARENQTTQKGQKNSRERMKRIEEGIKELGSQILKEHPVENTQLQNEKLYLYYLQNGRDMYVDQELDINRLSDYDVDHIVPQSFLKDDSIDNKVLTRSDKARGKSDNVPSEEVVKKMKNYWRQLLNAKLITQRKFDNLTKAERGGLSELDKAGFIKRQLVETRQITKHVAQILDSRMNTKYDENDKLIREVKVITLKSKLVSDFRKDFQFYKVREINNYHHAHDAYLNAVVGTALIKKYPKLESEFVYGDYKVYDVRKMIAKSEQEIGKATAKYFFYSNIMNFFKTEITLANGEIRKRPLIETNGETGEIVWDKGRDFATVRKVLSMPQVNIVKKTEVQTGGFSKESILPKRNSDKLIARKKDWDPKKYGGFDSPTVAYSVLVVAKVEKGKSKKLKSVKELLGITIMERSSFEKNPIDFLEAKGYKEVKKDLIIKLPKYSLFELENGRKRMLASAGELQKGNELALPSKYVNFLYLASHYEKLKGSPEDNEQKQLFVEQHKHYLDEIIEQISEFSKRVILADANLDKVLSAYNKHRDKPIREQAENIIHLFTLTNLGAPAAFKYFDTTIDRKRYTSTKEVLDATLIHQSITGLYETRIDLSQLGGDGGGGGGSGGGGSGGGGSGGGGSGGVLNLEEEYRLHEKPVPSSIDPSWLQLFPTVWAERAGMGLANQVPPVVVELRSGASPVAVRQYPMSKEAREGIRPHIQRFLDLGVLVPCQSPWNTPLLPVKKPGTNDYRPVQDLREINKRVQDIHPTVPNPYNLLSSLPPSHTWYSVLDLKDAFFCLKLHPNSQPLFAFEWRDPEKGNTGQLTWTRLPQGFKNSPTLFNEALHRDLAPFRALNPQVVLLQYVDDLLVAAPTYRDCKEGTQKLLQELSKLGYRVSAKKAQLCQKEVTYLGYLLKEGKRWLTPARKATVMKIPPPTTPRQVREFLGKAGFCRLFIPGFASLAAPLYPLTKPSIPFIWTEEHQKAFDRIKEALLSAPALALPDLTKPFTLYVDERAGVARGVLTQTLGPWRRPVAYLSKKLDPVASGWPTCLKAVAAVALLLKDADKLTLGQNVTVIASHSLESIVRQPPDRWMTNARMTHYQSLLLNERVSFAPPAVLNPATLLPVESEATPVHRCSEILAEETGTRRDLKDQPLPGVPAWYTDGSSFIAEGKRRAGAAIVDGKRTVWASSLPEGTSAQKAELVALTQALRLAEGKDINIYTDSRYAFATAHIHGAIYKQRGWLTSAGKDIKNKEEILALLEAIHLPKRVAIIHCPGHQKGNDPVATGNRRADEAAKQAALSTRVLAETTKPAGKRTADGSEFEKRTADGSEFESPKKKAKVE

SEQ ID NO: 6164 - protein, 2112 aa, synthetic construct
MPAAKRVKLDGGDKKYSIGLDIGTNSVGWAVITDEYKVPSKKFKVLGNTDRHSIKKNLIGALLFDSGETAEATRLKRTARRRYTRRKNRICYLQEIFSNEMAKVDDSFFHRLEESFLVEEDKKHERHPIFGNIVDEVAYHEKYPTIYHLRKKLVDSTDKADLRLIYLALAHMIKFRGHFLIEGDLNPDNSDVDKLFIQLVQTYNQLFEENPINASGVDAKAILSARLSKSRRLENLIAQLPGEKKNGLFGNLIALSLGLTPNFKSNFDLAEDAKLQLSKDTYDDDLDNLLAQIGDQYADLFLAAKNLSDAILLSDILRVNTEITKAPLSASMIKRYDEHHQDLTLLKALVRQQLPEKYKEIFFDQSKNGYAGYIDGGASQEEFYKFIKPILEKMDGTEELLVKLNREDLLRKQRTFDNGSIPHQIHLGELHAILRRQEDFYPFLKDNREKIEKILTFRIPYYVGPLARGNSRFAWMTRKSEETITPWNFEEVVDKGASAQSFIERMTNFDKNLPNEKVLPKHSLLYEYFTVYNELTKVKYVTEGMRKPAFLSGEQKKAIVDLLFKTNRKVTVKQLKEDYFKKIECFDSVEISGVEDRFNASLGTYHDLLKIIKDKDFLDNEENEDILEDIVLTLTLFEDREMIEERLKTYAHLFDDKVMKQLKRRRYTGWGRLSRKLINGIRDKQSGKTILDFLKSDGFANRNFMQLIHDDSLTFKEDIQKAQVSGQGDSLHEHIANLAGSPAIKKGILQTVKVVDELVKVMGRHKPENIVIEMARENQTTQKGQKNSRERMKRIEEGIKELGSQILKEHPVENTQLQNEKLYLYYLQNGRDMYVDQELDINRLSDYDVDHIVPQSFLKDDSIDNKVLTRSDKARGKSDNVPSEEVVKKMKNYWRQLLNAKLITQRKFDNLTKAERGGLSELDKAGFIKRQLVETRQITKHVAQILDSRMNTKYDENDKLIREVKVITLKSKLVSDFRKDFQFYKVREINNYHHAHDAYLNAVVGTALIKKYPKLESEFVYGDYKVYDVRKMIAKSEQEIGKATAKYFFYSNIMNFFKTEITLANGEIRKRPLIETNGETGEIVWDKGRDFATVRKVLSMPQVNIVKKTEVQTGGFSKESILPKRNSDKLIARKKDWDPKKYGGFDSPTVAYSVLVVAKVEKGKSKKLKSVKELLGITIMERSSFEKNPIDFLEAKGYKEVKKDLIIKLPKYSLFELENGRKRMLASAGELQKGNELALPSKYVNFLYLASHYEKLKGSPEDNEQKQLFVEQHKHYLDEIIEQISEFSKRVILADANLDKVLSAYNKHRDKPIREQAENIIHLFTLTNLGAPAAFKYFDTTIDRKRYTSTKEVLDATLIHQSITGLYETRIDLSQLGGDGGGGGGSGGGGSGGGGSGGGGSGGGGSGGTAPLEEEYRLFLEAPIQNVTLLEQWKREIPKVWAEINPPGLASTQAPIHVQLLSTALPVRVRQYPITLEAKRSLRETIRKFRAAGILRPVHSPWNTPLLPVRKSGTSEYRMVQDLREVNKRVETIHPTVPNPYTLLSLLPPDRIWYSVLDLKDAFFCIPLAPESQLIFAFEWADAEEGESGQLTWTRLPQGFKNSPTLFNEALNRDLQGFRLDHPSVSLLQYVDDLLIAADTQAACLSATRDLLMTLAELGYRVSGKKAQLCQEEVTYLGFKIHKGSRSLSNSRTQAILQIPVPKTKRQVREFLGTIGYCRLWIPGFAELAQPLYAATRPGNDPLVWGEKEEEAFQSLKLALTQPPALALPSLDKPFQLFVEETSGAAKGVLTQALGPWKRPVAYLSKRLDPVAAGWPRCLRAIAAAALLTREASKLTFGQDIEITSSHNLESLLRSPPDKWLTNARITQYQVLLLDPPRVRFKQTAALNPATLLPETDDTLPIHHCLDTLDSLTSTRPDLTDQPLAQAEATLFTDGSSYIRDGKRYAGAAVVTLDSVIWAEPLPIGTSAQKAELIALTKALEWSKDKSVNIYTDSRYAFATLHVHGMIYRERGWLTAGGKAIKNAPEILALLTAVWLPKRVAVMHCKGHQKDDAPTSTGNRRADEVAREVAIRPLSTQATISAGKRTADGSEFEKRTADGSEFESPKKKAKVE

SEQ ID NO: 6165 - protein, 2112 aa, synthetic construct
MPAAKRVKLDGGDKKYSIGLDIGTNSVGWAVITDEYKVPSKKFKVLGNTDRHSIKKNLIGALLFDSGETAEATRLKRTARRRYTRRKNRICYLQEIFSNEMAKVDDSFFHRLEESFLVEEDKKHERHPIFGNIVDEVAYHEKYPTIYHLRKKLVDSTDKADLRLIYLALAHMIKFRGHFLIEGDLNPDNSDVDKLFIQLVQTYNQLFEENPINASGVDAKAILSARLSKSRRLENLIAQLPGEKKNGLFGNLIALSLGLTPNFKSNFDLAEDAKLQLSKDTYDDDLDNLLAQIGDQYADLFLAAKNLSDAILLSDILRVNTEITKAPLSASMIKRYDEHHQDLTLLKALVRQQLPEKYKEIFFDQSKNGYAGYIDGGASQEEFYKFIKPILEKMDGTEELLVKLNREDLLRKQRTFDNGSIPHQIHLGELHAILRRQEDFYPFLKDNREKIEKILTFRIPYYVGPLARGNSRFAWMTRKSEETITPWNFEEVVDKGASAQSFIERMTNFDKNLPNEKVLPKHSLLYEYFTVYNELTKVKYVTEGMRKPAFLSGEQKKAIVDLLFKTNRKVTVKQLKEDYFKKIECFDSVEISGVEDRFNASLGTYHDLLKIIKDKDFLDNEENEDILEDIVLTLTLFEDREMIEERLKTYAHLFDDKVMKQLKRRRYTGWGRLSRKLINGIRDKQSGKTILDFLKSDGFANRNFMQLIHDDSLTFKEDIQKAQVSGQGDSLHEHIANLAGSPAIKKGILQTVKVVDELVKVMGRHKPENIVIEMARENQTTQKGQKNSRERMKRIEEGIKELGSQILKEHPVENTQLQNEKLYLYYLQNGRDMYVDQELDINRLSDYDVDHIVPQSFLKDDSIDNKVLTRSDKARGKSDNVPSEEVVKKMKNYWRQLLNAKLITQRKFDNLTKAERGGLSELDKAGFIKRQLVETRQITKHVAQILDSRMNTKYDENDKLIREVKVITLKSKLVSDFRKDFQFYKVREINNYHHAHDAYLNAVVGTALIKKYPKLESEFVYGDYKVYDVRKMIAKSEQEIGKATAKYFFYSNIMNFFKTEITLANGEIRKRPLIETNGETGEIVWDKGRDFATVRKVLSMPQVNIVKKTEVQTGGFSKESILPKRNSDKLIARKKDWDPKKYGGFDSPTVAYSVLVVAKVEKGKSKKLKSVKELLGITIMERSSFEKNPIDFLEAKGYKEVKKDLIIKLPKYSLFELENGRKRMLASAGELQKGNELALPSKYVNFLYLASHYEKLKGSPEDNEQKQLFVEQHKHYLDEIIEQISEFSKRVILADANLDKVLSAYNKHRDKPIREQAENIIHLFTLTNLGAPAAFKYFDTTIDRKRYTSTKEVLDATLIHQSITGLYETRIDLSQLGGDGGGGGGSGGGGSGGGGSGGGGSGGGGSGGTAPLEEEYRLFLEAPIQNVTLLEQWKREIPKVWAEINPPGLASTQAPIHVQLLSTALPVRVRQYPITLEAKRSLRETIRKFRAAGILRPVHSPWNTPLLPVRKSGTSEYRMVQDLREVNKRVETIHPTVPNPYTLLSLLPPDRIWYSVLDLKDAFFCIPLAPESQLIFAFEWADAEEGESGQLTWTRLPQGFKNSPTLFNEALNRDLQGFRLDHPSVSLLQYVDDLLIAADTQAACLSATRDLLMTLAELGYRVSGKKAQLCQEEVTYLGFKIHKGSRSLSNSRTQAILQIPVPKTKRQVREFLGKIGYCRLFIPGFAELAQPLYAATRPGNDPLVWGEKEEEAFQSLKLALTQPPALALPSLDKPFQLFVEETSGAAKGVLTQALGPWKRPVAYLSKRLDPVAAGWPRCLRAIAAAALLTREASKLTFGQDIEITSSHNLESLLRSPPDKWLTNARITQYQVLLLDPPRVRFKQTAALNPATLLPETDDTLPIHHCLDTLDSLTSTRPDLTDQPLAQAEATLFTDGSSYIRDGKRYAGAAVVTLDSVIWAEPLPIGTSAQKAELIALTKALEWSKDKSVNIYTDSRYAFATLHVHGMIYRERGWLTAGGKAIKNAPEILALLTAVWLPKRVAVMHCKGHQKDDAPTSTGNRRADEVAREVAIRPLSTQATISAGKRTADGSEFEKRTADGSEFESPKKKAKVE

SEQ ID NO: 6166 - protein, 2116 aa, synthetic construct
MPAAKRVKLDGGDKKYSIGLDIGTNSVGWAVITDEYKVPSKKFKVLGNTDRHSIKKNLIGALLFDSGETAEATRLKRTARRRYTRRKNRICYLQEIFSNEMAKVDDSFFHRLEESFLVEEDKKHERHPIFGNIVDEVAYHEKYPTIYHLRKKLVDSTDKADLRLIYLALAHMIKFRGHFLIEGDLNPDNSDVDKLFIQLVQTYNQLFEENPINASGVDAKAILSARLSKSRRLENLIAQLPGEKKNGLFGNLIALSLGLTPNFKSNFDLAEDAKLQLSKDTYDDDLDNLLAQIGDQYADLFLAAKNLSDAILLSDILRVNTEITKAPLSASMIKRYDEHHQDLTLLKALVRQQLPEKYKEIFFDQSKNGYAGYIDGGASQEEFYKFIKPILEKMDGTEELLVKLNREDLLRKQRTFDNGSIPHQIHLGELHAILRRQEDFYPFLKDNREKIEKILTFRIPYYVGPLARGNSRFAWMTRKSEETITPWNFEEVVDKGASAQSFIERMTNFDKNLPNEKVLPKHSLLYEYFTVYNELTKVKYVTEGMRKPAFLSGEQKKAIVDLLFKTNRKVTVKQLKEDYFKKIECFDSVEISGVEDRFNASLGTYHDLLKIIKDKDFLDNEENEDILEDIVLTLTLFEDREMIEERLKTYAHLFDDKVMKQLKRRRYTGWGRLSRKLINGIRDKQSGKTILDFLKSDGFANRNFMQLIHDDSLTFKEDIQKAQVSGQGDSLHEHIANLAGSPAIKKGILQTVKVVDELVKVMGRHKPENIVIEMARENQTTQKGQKNSRERMKRIEEGIKELGSQILKEHPVENTQLQNEKLYLYYLQNGRDMYVDQELDINRLSDYDVDHIVPQSFLKDDSIDNKVLTRSDKARGKSDNVPSEEVVKKMKNYWRQLLNAKLITQRKFDNLTKAERGGLSELDKAGFIKRQLVETRQITKHVAQILDSRMNTKYDENDKLIREVKVITLKSKLVSDFRKDFQFYKVREINNYHHAHDAYLNAVVGTALIKKYPKLESEFVYGDYKVYDVRKMIAKSEQEIGKATAKYFFYSNIMNFFKTEITLANGEIRKRPLIETNGETGEIVWDKGRDFATVRKVLSMPQVNIVKKTEVQTGGFSKESILPKRNSDKLIARKKDWDPKKYGGFDSPTVAYSVLVVAKVEKGKSKKLKSVKELLGITIMERSSFEKNPIDFLEAKGYKEVKKDLIIKLPKYSLFELENGRKRMLASAGELQKGNELALPSKYVNFLYLASHYEKLKGSPEDNEQKQLFVEQHKHYLDEIIEQISEFSKRVILADANLDKVLSAYNKHRDKPIREQAENIIHLFTLTNLGAPAAFKYFDTTIDRKRYTSTKEVLDATLIHQSITGLYETRIDLSQLGGDGGGGGGSGGGGSGGGGSGGGGSGGGGSGGTVSLQDEHRLFDIPVTTSLPDVWLQDFPQAWAETGGLGRAKCQAPIIIDLKPTAVPVSIKQYPMSLEAHMGIRQHIIKFLELGVLRPCRSPWNTPLLPVKKPGTQDYRPVQDLREINKRTVDIHPTVPNPYNLLSTLKPDYSWYTVLDLKDAFFCLPLAPQSQELFAFEWKDPERGISGQLTWTRLPQGFKNSPTLFDEALHRDLTDFRTQHPEVTLLQYVDDLLLAAPTKKACTQGTRHLLQELGEKGYRASAKKAQICQTKVTYLGYILSEGKRWLTPGRIETVARIPPPRNPREVREFLGTAGFCRLWIPGFAELAAPLYALTKESTPFTWQTEHQLAFEALKKALLSAPALGLPDTSKPFTLFLDERQGIAKGVLTQKLGPWKRPVAYLSKKLDPVAAGWPPCLRIMAATAMLVKDSAKLTLGQPLTVITPHTLEAIVRQPPDRWITNARLTHYQALLLDTDRVQFGPPVTLNPATLLPVPENQPSPHDCRQVLAETHGTREDLKDQELPDADHTWYTDGSSYLDSGTRRAGAAVVDGHNTIWAQSLPPGTSAQKAELIALTKALELSKGKKANIYTDSRYAFATAHTHGSIYERRGLLTSEGKEIKNKAEIIALLKALFLPQEVAIIHCPGHQKGQDPVAVGNRQADRVARQAAMAEVLTLATEPDNTSHITAGKRTADGSEFEKRTADGSEFESPKKKAKVE

SEQ ID NO: 6167 - protein, 2015 aa, synthetic construct
MPAAKRVKLDGGDKKYSIGLDIGTNSVGWAVITDEYKVPSKKFKVLGNTDRHSIKKNLIGALLFDSGETAEATRLKRTARRRYTRRKNRICYLQEIFSNEMAKVDDSFFHRLEESFLVEEDKKHERHPIFGNIVDEVAYHEKYPTIYHLRKKLVDSTDKADLRLIYLALAHMIKFRGHFLIEGDLNPDNSDVDKLFIQLVQTYNQLFEENPINASGVDAKAILSARLSKSRRLENLIAQLPGEKKNGLFGNLIALSLGLTPNFKSNFDLAEDAKLQLSKDTYDDDLDNLLAQIGDQYADLFLAAKNLSDAILLSDILRVNTEITKAPLSASMIKRYDEHHQDLTLLKALVRQQLPEKYKEIFFDQSKNGYAGYIDGGASQEEFYKFIKPILEKMDGTEELLVKLNREDLLRKQRTFDNGSIPHQIHLGELHAILRRQEDFYPFLKDNREKIEKILTFRIPYYVGPLARGNSRFAWMTRKSEETITPWNFEEVVDKGASAQSFIERMTNFDKNLPNEKVLPKHSLLYEYFTVYNELTKVKYVTEGMRKPAFLSGEQKKAIVDLLFKTNRKVTVKQLKEDYFKKIECFDSVEISGVEDRFNASLGTYHDLLKIIKDKDFLDNEENEDILEDIVLTLTLFEDREMIEERLKTYAHLFDDKVMKQLKRRRYTGWGRLSRKLINGIRDKQSGKTILDFLKSDGFANRNFMQLIHDDSLTFKEDIQKAQVSGQGDSLHEHIANLAGSPAIKKGILQTVKVVDELVKVMGRHKPENIVIEMARENQTTQKGQKNSRERMKRIEEGIKELGSQILKEHPVENTQLQNEKLYLYYLQNGRDMYVDQELDINRLSDYDVDHIVPQSFLKDDSIDNKVLTRSDKARGKSDNVPSEEVVKKMKNYWRQLLNAKLITQRKFDNLTKAERGGLSELDKAGFIKRQLVETRQITKHVAQILDSRMNTKYDENDKLIREVKVITLKSKLVSDFRKDFQFYKVREINNYHHAHDAYLNAVVGTALIKKYPKLESEFVYGDYKVYDVRKMIAKSEQEIGKATAKYFFYSNIMNFFKTEITLANGEIRKRPLIETNGETGEIVWDKGRDFATVRKVLSMPQVNIVKKTEVQTGGFSKESILPKRNSDKLIARKKDWDPKKYGGFDSPTVAYSVLVVAKVEKGKSKKLKSVKELLGITIMERSSFEKNPIDFLEAKGYKEVKKDLIIKLPKYSLFELENGRKRMLASAGELQKGNELALPSKYVNFLYLASHYEKLKGSPEDNEQKQLFVEQHKHYLDEIIEQISEFSKRVILADANLDKVLSAYNKHRDKPIREQAENIIHLFTLTNLGAPAAFKYFDTTIDRKRYTSTKEVLDATLIHQSITGLYETRIDLSQLGGDGGGGGGSGGGGSGGGGSGGGGSGGGGSGGGVLDAPPSHIGLEHLPPPPEVPQFPLNLERLQALQDLVHRSLEAGYISPWDGPGNNPVFPVRKPNGAWRFVHDLRVTNALTKPIPALSPGPPDLTAIPTHLPHIICLDLKDAFFQIPVEDRFRSYFAFTLPTPGGLQPHRRFAWRVLPQGFINSPALFQRALQEPLRQVSAAFSQSLLVSYMDDILYVSPTEEQRLQCYQTMAAHLRDLGFQVASEKTRQTPSPVPFLGQMVHERMVTYQSLPTLQISSPISLHQLQTVLGDLQWVSRGTPTTRRPLQLLYSSLKPIDDPRAIIHLSPEQQQGIAELRQALSHNARSRYNEQEPLLAYVHLTRAGSTLVLFQKGAQFPLAYFQTPLTDNQASPWGLLLLLGCQYLQAQALSSYAKTILKYYHNLPKTSLDNWIQSSEDPRVQELLQLWPQISSQGIQPPGPWKTLVTRAEVFLTPQFSPEPIPAALCLFSDGAARRGAYCLWKDHLLDFQAVPAPESAQKGELAGLLAGLAAAPPEPLNIWVDSKYLYSLLRTLVLGAWLQPDPVPSYALLYKSLLRHPAIFVGHVRSHSSASHPIASLNNYVDQLAGKRTADGSEFEKRTADGSEFESPKKKAKVE

SEQ ID NO: 6168 - protein, 2187 aa, synthetic construct
MPAAKRVKLDGGDKKYSIGLDIGTNSVGWAVITDEYKVPSKKFKVLGNTDRHSIKKNLIGALLFDSGETAEATRLKRTARRRYTRRKNRICYLQEIFSNEMAKVDDSFFHRLEESFLVEEDKKHERHPIFGNIVDEVAYHEKYPTIYHLRKKLVDSTDKADLRLIYLALAHMIKFRGHFLIEGDLNPDNSDVDKLFIQLVQTYNQLFEENPINASGVDAKAILSARLSKSRRLENLIAQLPGEKKNGLFGNLIALSLGLTPNFKSNFDLAEDAKLQLSKDTYDDDLDNLLAQIGDQYADLFLAAKNLSDAILLSDILRVNTEITKAPLSASMIKRYDEHHQDLTLLKALVRQQLPEKYKEIFFDQSKNGYAGYIDGGASQEEFYKFIKPILEKMDGTEELLVKLNREDLLRKQRTFDNGSIPHQIHLGELHAILRRQEDFYPFLKDNREKIEKILTFRIPYYVGPLARGNSRFAWMTRKSEETITPWNFEEVVDKGASAQSFIERMTNFDKNLPNEKVLPKHSLLYEYFTVYNELTKVKYVTEGMRKPAFLSGEQKKAIVDLLFKTNRKVTVKQLKEDYFKKIECFDSVEISGVEDRFNASLGTYHDLLKIIKDKDFLDNEENEDILEDIVLTLTLFEDREMIEERLKTYAHLFDDKVMKQLKRRRYTGWGRLSRKLINGIRDKQSGKTILDFLKSDGFANRNFMQLIHDDSLTFKEDIQKAQVSGQGDSLHEHIANLAGSPAIKKGILQTVKVVDELVKVMGRHKPENIVIEMARENQTTQKGQKNSRERMKRIEEGIKELGSQILKEHPVENTQLQNEKLYLYYLQNGRDMYVDQELDINRLSDYDVDHIVPQSFLKDDSIDNKVLTRSDKARGKSDNVPSEEVVKKMKNYWRQLLNAKLITQRKFDNLTKAERGGLSELDKAGFIKRQLVETRQITKHVAQILDSRMNTKYDENDKLIREVKVITLKSKLVSDFRKDFQFYKVREINNYHHAHDAYLNAVVGTALIKKYPKLESEFVYGDYKVYDVRKMIAKSEQEIGKATAKYFFYSNIMNFFKTEITLANGEIRKRPLIETNGETGEIVWDKGRDFATVRKVLSMPQVNIVKKTEVQTGGFSKESILPKRNSDKLIARKKDWDPKKYGGFDSPTVAYSVLVVAKVEKGKSKKLKSVKELLGITIMERSSFEKNPIDFLEAKGYKEVKKDLIIKLPKYSLFELENGRKRMLASAGELQKGNELALPSKYVNFLYLASHYEKLKGSPEDNEQKQLFVEQHKHYLDEIIEQISEFSKRVILADANLDKVLSAYNKHRDKPIREQAENIIHLFTLTNLGAPAAFKYFDTTIDRKRYTSTKEVLDATLIHQSITGLYETRIDLSQLGGDGGGGGGSGGGGSGGGGSGGGGSGGGGSGGMDLLKPLTVERKGVKIKGYWNSQADITCVPKDLLQGEEPVRQQNVTTIHGTQEGDVYYVNLKIDGRRINTEVIGTTLDYAIITPGDVPWILKKPLELTIKLDLEEQQGTLLNNSILSKKGKEELKQLFEKYSALWQSWENQVGHRRIRPHKIATGTVKPTPQKQYHINPKAKPDIQIVINDLLKQGVLIQKESTMNTPVYPVPKPNGRWRMVLDYRAVNKVTPLIAVQNQHSYGILGSLFKGRYKTTIDLSNGFWAHPIVPEDYWITAFTWQGKQYCWTVLPQGFLNSPGLFTGDVVDLLQGIPNVEVYVDDVYISHDSEKEHLEYLDILFNRLKEAGYIISLKKSNIANSIVDFLGFQITNEGRGLTDTFKEKLENITAPTTLKQLQSILGLLNFARNFIPDFTELIAPLYALIPKSTKNYVPWQIEHSTTLETLITKLNGAEYLQGRKGDKTLIMKVNASYTTGYIRYYNEGEKKPISYVSIVFSKTELKFTELEKLLTTVHKGLLKALDLSMGQNIHVYSPIVSMQNIQKTPQTAKKALASRWLSWLSYLEDPRIRFFYDPQMPALKDLPAVDTGKDNKKHPSNFQHIFYTDGSAITSPTKEGHLNAGMGIVYFINKDGNLQKQQEWSISLGNHTAQFAEIAAFEFALKKCLPLGGNILVVTDSNYVAKAYNEELDVWASNGFVNNRKKPLKHISKWKSVADLKRLRPDVVVTHEPGHQKLDSSPHAYGNNLADQLATQASFKVHAGKRTADGSEFEKRTADGSEFESPKKKAKVE

SEQ ID NO: 6169 - protein, 2101 aa, synthetic construct
MPAAKRVKLDGGDKKYSIGLDIGTNSVGWAVITDEYKVPSKKFKVLGNTDRHSIKKNLIGALLFDSGETAEATRLKRTARRRYTRRKNRICYLQEIFSNEMAKVDDSFFHRLEESFLVEEDKKHERHPIFGNIVDEVAYHEKYPTIYHLRKKLVDSTDKADLRLIYLALAHMIKFRGHFLIEGDLNPDNSDVDKLFIQLVQTYNQLFEENPINASGVDAKAILSARLSKSRRLENLIAQLPGEKKNGLFGNLIALSLGLTPNFKSNFDLAEDAKLQLSKDTYDDDLDNLLAQIGDQYADLFLAAKNLSDAILLSDILRVNTEITKAPLSASMIKRYDEHHQDLTLLKALVRQQLPEKYKEIFFDQSKNGYAGYIDGGASQEEFYKFIKPILEKMDGTEELLVKLNREDLLRKQRTFDNGSIPHQIHLGELHAILRRQEDFYPFLKDNREKIEKILTFRIPYYVGPLARGNSRFAWMTRKSEETITPWNFEEVVDKGASAQSFIERMTNFDKNLPNEKVLPKHSLLYEYFTVYNELTKVKYVTEGMRKPAFLSGEQKKAIVDLLFKTNRKVTVKQLKEDYFKKIECFDSVEISGVEDRFNASLGTYHDLLKIIKDKDFLDNEENEDILEDIVLTLTLFEDREMIEERLKTYAHLFDDKVMKQLKRRRYTGWGRLSRKLINGIRDKQSGKTILDFLKSDGFANRNFMQLIHDDSLTFKEDIQKAQVSGQGDSLHEHIANLAGSPAIKKGILQTVKVVDELVKVMGRHKPENIVIEMARENQTTQKGQKNSRERMKRIEEGIKELGSQILKEHPVENTQLQNEKLYLYYLQNGRDMYVDQELDINRLSDYDVDHIVPQSFLKDDSIDNKVLTRSDKARGKSDNVPSEEVVKKMKNYWRQLLNAKLITQRKFDNLTKAERGGLSELDKAGFIKRQLVETRQITKHVAQILDSRMNTKYDENDKLIREVKVITLKSKLVSDFRKDFQFYKVREINNYHHAHDAYLNAVVGTALIKKYPKLESEFVYGDYKVYDVRKMIAKSEQEIGKATAKYFFYSNIMNFFKTEITLANGEIRKRPLIETNGETGEIVWDKGRDFATVRKVLSMPQVNIVKKTEVQTGGFSKESILPKRNSDKLIARKKDWDPKKYGGFDSPTVAYSVLVVAKVEKGKSKKLKSVKELLGITIMERSSFEKNPIDFLEAKGYKEVKKDLIIKLPKYSLFELENGRKRMLASAGELQKGNELALPSKYVNFLYLASHYEKLKGSPEDNEQKQLFVEQHKHYLDEIIEQISEFSKRVILADANLDKVLSAYNKHRDKPIREQAENIIHLFTLTNLGAPAAFKYFDTTIDRKRYTSTKEVLDATLIHQSITGLYETRIDLSQLGGDGGGGGGSGGGGSGGGGSGGGGSGGGGSGGVPWILKKPLELTIKLDLEEQQGTLLNNSILSKKGKEELKQLFEKYSALWQSWENQVGHRRIRPHKIATGTVKPTPQKQYHINPKAKPDIQIVINDLLKQGVLIQKESTMNTPVYPVPKPNGRWRMVLDYRAVNKVTPLIAVQNQHSYGILGSLFKGRYKTTIDLSNGFWAHPIVPEDYWITAFTWQGKQYCWTVLPQGFLNSPGLFTGDVVDLLQGIPNVEVYVDDVYISHDSEKEHLEYLDILFNRLKEAGYIISLKKSNIANSIVDFLGFQITNEGRGLTDTFKEKLENITAPTTLKQLQSILGLLNFARNFIPDFTELIAPLYALIPKSTKNYVPWQIEHSTTLETLITKLNGAEYLQGRKGDKTLIMKVNASYTTGYIRYYNEGEKKPISYVSIVFSKTELKFTELEKLLTTVHKGLLKALDLSMGQNIHVYSPIVSMQNIQKTPQTAKKALASRWLSWLSYLEDPRIRFFYDPQMPALKDLPAVDTGKDNKKHPSNFQHIFYTDGSAITSPTKEGHLNAGMGIVYFINKDGNLQKQQEWSISLGNHTAQFAEIAAFEFALKKCLPLGGNILVVTDSNYVAKAYNEELDVWASNGFVNNRKKPLKHISKWKSVADLKRLRPDVVVTHEPGHQKLDSSPHAYGNNLADQLATQASFKVHAGKRTADGSEFEKRTADGSEFESPKKKAKVE

SEQ ID NO: 6170 - protein, 2101 aa, synthetic construct
MPAAKRVKLDGGDKKYSIGLDIGTNSVGWAVITDEYKVPSKKFKVLGNTDRHSIKKNLIGALLFDSGETAEATRLKRTARRRYTRRKNRICYLQEIFSNEMAKVDDSFFHRLEESFLVEEDKKHERHPIFGNIVDEVAYHEKYPTIYHLRKKLVDSTDKADLRLIYLALAHMIKFRGHFLIEGDLNPDNSDVDKLFIQLVQTYNQLFEENPINASGVDAKAILSARLSKSRRLENLIAQLPGEKKNGLFGNLIALSLGLTPNFKSNFDLAEDAKLQLSKDTYDDDLDNLLAQIGDQYADLFLAAKNLSDAILLSDILRVNTEITKAPLSASMIKRYDEHHQDLTLLKALVRQQLPEKYKEIFFDQSKNGYAGYIDGGASQEEFYKFIKPILEKMDGTEELLVKLNREDLLRKQRTFDNGSIPHQIHLGELHAILRRQEDFYPFLKDNREKIEKILTFRIPYYVGPLARGNSRFAWMTRKSEETITPWNFEEVVDKGASAQSFIERMTNFDKNLPNEKVLPKHSLLYEYFTVYNELTKVKYVTEGMRKPAFLSGEQKKAIVDLLFKTNRKVTVKQLKEDYFKKIECFDSVEISGVEDRFNASLGTYHDLLKIIKDKDFLDNEENEDILEDIVLTLTLFEDREMIEERLKTYAHLFDDKVMKQLKRRRYTGWGRLSRKLINGIRDKQSGKTILDFLKSDGFANRNFMQLIHDDSLTFKEDIQKAQVSGQGDSLHEHIANLAGSPAIKKGILQTVKVVDELVKVMGRHKPENIVIEMARENQTTQKGQKNSRERMKRIEEGIKELGSQILKEHPVENTQLQNEKLYLYYLQNGRDMYVDQELDINRLSDYDVDHIVPQSFLKDDSIDNKVLTRSDKARGKSDNVPSEEVVKKMKNYWRQLLNAKLITQRKFDNLTKAERGGLSELDKAGFIKRQLVETRQITKHVAQILDSRMNTKYDENDKLIREVKVITLKSKLVSDFRKDFQFYKVREINNYHHAHDAYLNAVVGTALIKKYPKLESEFVYGDYKVYDVRKMIAKSEQEIGKATAKYFFYSNIMNFFKTEITLANGEIRKRPLIETNGETGEIVWDKGRDFATVRKVLSMPQVNIVKKTEVQTGGFSKESILPKRNSDKLIARKKDWDPKKYGGFDSPTVAYSVLVVAKVEKGKSKKLKSVKELLGITIMERSSFEKNPIDFLEAKGYKEVKKDLIIKLPKYSLFELENGRKRMLASAGELQKGNELALPSKYVNFLYLASHYEKLKGSPEDNEQKQLFVEQHKHYLDEIIEQISEFSKRVILADANLDKVLSAYNKHRDKPIREQAENIIHLFTLTNLGAPAAFKYFDTTIDRKRYTSTKEVLDATLIHQSITGLYETRIDLSQLGGDGGGGGGSGGGGSGGGGSGGGGSGGGGSGGVPWILKKPLELTIKLDLEEQQGTLLNNSILSKKGKEELKQLFEKYSALWQSWENQVGHRRIRPHKIATGTVKPTPQKQYHINPKAKPDIQIVINDLLKQGVLIQKESTMNTPVYPVPKPNGRWRMVLDYRAVNKVTPLIAVQNQHSYGILGSLFKGRYKTTIDLSNGFWAHPIVPEDYWITAFTWQGKQYCWTVLPQGFLNSPGLFNGDVVDLLQGIPNVEVYVDDVYISHDSEKEHLEYLDILFNRLKEAGYIISLKKSNIANSIVDFLGFQITNEGRGLTDTFKEKLENITAPTTLKQLQSILGLLNFARNFIPDFTELIAPLYALIPKSPKNYVPWQIEHSTTLETLITKLNGAEYLQGRKGDKTLIMKVNASYTTGYIRYYNEGEKKPISYVSIVFSKTELKFTELEKLLTTVHKGLLKALDLSMGQNIHVYSPIVSMQNIQKTPQTAKKALASRWLSWLSYLEDPRIRFFYDPQMPALKDLPAVDTGKDNKKHPSNFQHIFYTDGSAITSPTKEGHLNAGMGIVYFINKDGNLQKQQEWSISLGNHTAQFAEIAAFEFALKKCLPLGGNILVVTDSNYVAKAYNEELDVWASNGFVNNRKKPLKHISKWKSVADLKRLRPDVVVTHEPGHQKLDSSPHAYGNNLADQLATQASFKVHAGKRTADGSEFEKRTADGSEFESPKKKAKVE

SEQ ID NO: 6171 - protein, 2109 aa, synthetic construct
MPAAKRVKLDGGDKKYSIGLDIGTNSVGWAVITDEYKVPSKKFKVLGNTDRHSIKKNLIGALLFDSGETAEATRLKRTARRRYTRRKNRICYLQEIFSNEMAKVDDSFFHRLEESFLVEEDKKHERHPIFGNIVDEVAYHEKYPTIYHLRKKLVDSTDKADLRLIYLALAHMIKFRGHFLIEGDLNPDNSDVDKLFIQLVQTYNQLFEENPINASGVDAKAILSARLSKSRRLENLIAQLPGEKKNGLFGNLIALSLGLTPNFKSNFDLAEDAKLQLSKDTYDDDLDNLLAQIGDQYADLFLAAKNLSDAILLSDILRVNTEITKAPLSASMIKRYDEHHQDLTLLKALVRQQLPEKYKEIFFDQSKNGYAGYIDGGASQEEFYKFIKPILEKMDGTEELLVKLNREDLLRKQRTFDNGSIPHQIHLGELHAILRRQEDFYPFLKDNREKIEKILTFRIPYYVGPLARGNSRFAWMTRKSEETITPWNFEEVVDKGASAQSFIERMTNFDKNLPNEKVLPKHSLLYEYFTVYNELTKVKYVTEGMRKPAFLSGEQKKAIVDLLFKTNRKVTVKQLKEDYFKKIECFDSVEISGVEDRFNASLGTYHDLLKIIKDKDFLDNEENEDILEDIVLTLTLFEDREMIEERLKTYAHLFDDKVMKQLKRRRYTGWGRLSRKLINGIRDKQSGKTILDFLKSDGFANRNFMQLIHDDSLTFKEDIQKAQVSGQGDSLHEHIANLAGSPAIKKGILQTVKVVDELVKVMGRHKPENIVIEMARENQTTQKGQKNSRERMKRIEEGIKELGSQILKEHPVENTQLQNEKLYLYYLQNGRDMYVDQELDINRLSDYDVDHIVPQSFLKDDSIDNKVLTRSDKARGKSDNVPSEEVVKKMKNYWRQLLNAKLITQRKFDNLTKAERGGLSELDKAGFIKRQLVETRQITKHVAQILDSRMNTKYDENDKLIREVKVITLKSKLVSDFRKDFQFYKVREINNYHHAHDAYLNAVVGTALIKKYPKLESEFVYGDYKVYDVRKMIAKSEQEIGKATAKYFFYSNIMNFFKTEITLANGEIRKRPLIETNGETGEIVWDKGRDFATVRKVLSMPQVNIVKKTEVQTGGFSKESILPKRNSDKLIARKKDWDPKKYGGFDSPTVAYSVLVVAKVEKGKSKKLKSVKELLGITIMERSSFEKNPIDFLEAKGYKEVKKDLIIKLPKYSLFELENGRKRMLASAGELQKGNELALPSKYVNFLYLASHYEKLKGSPEDNEQKQLFVEQHKHYLDEIIEQISEFSKRVILADANLDKVLSAYNKHRDKPIREQAENIIHLFTLTNLGAPAAFKYFDTTIDRKRYTSTKEVLDATLIHQSITGLYETRIDLSQLGGDGGGGGGSGGGGSGGGGSGGGGSGGGGSGGTLQLEEEYRLFEPESTQKQEMDIWLKNFPQAWAETGGMGTAHCQAPVLIQLKATATPISIRQYPMPHEAYQGIKPHIRRMLDQGILKPCQSPWNTPLLPVKKPGTEDYRPVQDLREVNKRVEDIHPTVPNPYNLLSTLPPSHPWYTVLDLKDAFFCLRLHSESQLLFAFEWRDPEIGLSGQLTWTRLPQGFKNSPTLFNEALHSDLADFRVRYPALVLLQYVDDLLLAAATRTECLEGTKALLETLGNKGYRASAKKAQICLQEVTYLGYSLKDGQRWLTKARKEAILSIPVPKNSRQVREFLGTAGYCRLWIPGFAELAAPLYPLTRPGTLFQWGTEQQLAFEDIKKALLSSPALGLPDITKPFELFIDENSGFAKGVLVQKLGPWKRPVAYLSKKLDTVASGWPPCLRMVAAIAILVKDAGKLTLGQPLTILTSHPVEALVRQPPNKWLSNARMTHYQAMLLDAERVHFGPTVSLNPATLLPLPSGGNHHDCLQILAETHGTRPDLTDQPLPDADLTWYTDGSSFIRNGEREAGAAVTTESEVIWAAPLPPGTSAQRAELIALTQALKMAEGKKLTVYTDSRYAFATTHVHGEIYRRRGWLTSEGKEIKNKNEILALLEALFLPKRLSIIHCPGHQKGDSPQAKGNRLADDTAKKAATETHSSLTVLPAGKRTADGSEFEKRTADGSEFESPKKKAKVE

SEQ ID NO: 6172 - protein, 2108 aa, synthetic construct
MPAAKRVKLDGGDKKYSIGLDIGTNSVGWAVITDEYKVPSKKFKVLGNTDRHSIKKNLIGALLFDSGETAEATRLKRTARRRYTRRKNRICYLQEIFSNEMAKVDDSFFHRLEESFLVEEDKKHERHPIFGNIVDEVAYHEKYPTIYHLRKKLVDSTDKADLRLIYLALAHMIKFRGHFLIEGDLNPDNSDVDKLFIQLVQTYNQLFEENPINASGVDAKAILSARLSKSRRLENLIAQLPGEKKNGLFGNLIALSLGLTPNFKSNFDLAEDAKLQLSKDTYDDDLDNLLAQIGDQYADLFLAAKNLSDAILLSDILRVNTEITKAPLSASMIKRYDEHHQDLTLLKALVRQQLPEKYKEIFFDQSKNGYAGYIDGGASQEEFYKFIKPILEKMDGTEELLVKLNREDLLRKQRTFDNGSIPHQIHLGELHAILRRQEDFYPFLKDNREKIEKILTFRIPYYVGPLARGNSRFAWMTRKSEETITPWNFEEVVDKGASAQSFIERMTNFDKNLPNEKVLPKHSLLYEYFTVYNELTKVKYVTEGMRKPAFLSGEQKKAIVDLLFKTNRKVTVKQLKEDYFKKIECFDSVEISGVEDRFNASLGTYHDLLKIIKDKDFLDNEENEDILEDIVLTLTLFEDREMIEERLKTYAHLFDDKVMKQLKRRRYTGWGRLSRKLINGIRDKQSGKTILDFLKSDGFANRNFMQLIHDDSLTFKEDIQKAQVSGQGDSLHEHIANLAGSPAIKKGILQTVKVVDELVKVMGRHKPENIVIEMARENQTTQKGQKNSRERMKRIEEGIKELGSQILKEHPVENTQLQNEKLYLYYLQNGRDMYVDQELDINRLSDYDVDHIVPQSFLKDDSIDNKVLTRSDKARGKSDNVPSEEVVKKMKNYWRQLLNAKLITQRKFDNLTKAERGGLSELDKAGFIKRQLVETRQITKHVAQILDSRMNTKYDENDKLIREVKVITLKSKLVSDFRKDFQFYKVREINNYHHAHDAYLNAVVGTALIKKYPKLESEFVYGDYKVYDVRKMIAKSEQEIGKATAKYFFYSNIMNFFKTEITLANGEIRKRPLIETNGETGEIVWDKGRDFATVRKVLSMPQVNIVKKTEVQTGGFSKESILPKRNSDKLIARKKDWDPKKYGGFDSPTVAYSVLVVAKVEKGKSKKLKSVKELLGITIMERSSFEKNPIDFLEAKGYKEVKKDLIIKLPKYSLFELENGRKRMLASAGELQKGNELALPSKYVNFLYLASHYEKLKGSPEDNEQKQLFVEQHKHYLDEIIEQISEFSKRVILADANLDKVLSAYNKHRDKPIREQAENIIHLFTLTNLGAPAAFKYFDTTIDRKRYTSTKEVLDATLIHQSITGLYETRIDLSQLGGDGGGGGGSGGGGSGGGGSGGGGSGGGGSGGVLNLEEEYRLHEKPVPSSIDPSWLQLFPTVWAERAGMGLANQVPPVVVELRSGASPVAVRQYPMSKEAREGIRPHIQKFLDLGVLVPCRSPWNTPLLPVKKPGTNDYRPVQDLREINKRVQDIHPTVPNPYNLLSSLPPSYTWYSVLDLKDAFFCLRLHPNSQPLFAFEWKDPEKGNTGQLTWTRLPQGFKNSPTLFNEALHRDLAPFRALNPQVVLLQYVDDLLVAAPTYEDCKKGTQKLLQELSKLGYRVSAKKAQLCQREVTYLGYLLKEGKRWLTPARKATVMKIPVPTTPRQVREFLGKAGFCRLFIPGFASLAAPLYPLTKPSIPFIWTEEHQQAFDHIKKALLSAPALALPDLTKPFTLYIDERAGVARGVLTQTLGPWRRPVAYLSKKLDPVASGWPTCLKAVAAVALLLKDADKLTLGQNVTVIASHSLESIVRQPPDRWMTNARMTHYQSLLLNERVSFAPPAVLNPATLLPVESEATPVHRCSEILAEETGTRRDLEDQPLPGVPTWYTDGSSFITEGKRRAGAPIVDGKRTVWASSLPEGTSAQKAELVALTQALRLAEGKNINIYTDSRYAFATAHIHGAIYKQRGWLTSAGKDIKNKEEILALLEAIHLPRRVAIIHCPGHQRGSNPVATGNRRADEAAKQAALSTRVLAGTTKPAGKRTADGSEFEKRTADGSEFESPKKKAKVE

SEQ ID NO: 6173 - protein, 2232 aa, synthetic construct
MPAAKRVKLDGGDKKYSIGLDIGTNSVGWAVITDEYKVPSKKFKVLGNTDRHSIKKNLIGALLFDSGETAEATRLKRTARRRYTRRKNRICYLQEIFSNEMAKVDDSFFHRLEESFLVEEDKKHERHPIFGNIVDEVAYHEKYPTIYHLRKKLVDSTDKADLRLIYLALAHMIKFRGHFLIEGDLNPDNSDVDKLFIQLVQTYNQLFEENPINASGVDAKAILSARLSKSRRLENLIAQLPGEKKNGLFGNLIALSLGLTPNFKSNFDLAEDAKLQLSKDTYDDDLDNLLAQIGDQYADLFLAAKNLSDAILLSDILRVNTEITKAPLSASMIKRYDEHHQDLTLLKALVRQQLPEKYKEIFFDQSKNGYAGYIDGGASQEEFYKFIKPILEKMDGTEELLVKLNREDLLRKQRTFDNGSIPHQIHLGELHAILRRQEDFYPFLKDNREKIEKILTFRIPYYVGPLARGNSRFAWMTRKSEETITPWNFEEVVDKGASAQSFIERMTNFDKNLPNEKVLPKHSLLYEYFTVYNELTKVKYVTEGMRKPAFLSGEQKKAIVDLLFKTNRKVTVKQLKEDYFKKIECFDSVEISGVEDRFNASLGTYHDLLKIIKDKDFLDNEENEDILEDIVLTLTLFEDREMIEERLKTYAHLFDDKVMKQLKRRRYTGWGRLSRKLINGIRDKQSGKTILDFLKSDGFANRNFMQLIHDDSLTFKEDIQKAQVSGQGDSLHEHIANLAGSPAIKKGILQTVKVVDELVKVMGRHKPENIVIEMARENQTTQKGQKNSRERMKRIEEGIKELGSQILKEHPVENTQLQNEKLYLYYLQNGRDMYVDQELDINRLSDYDVDHIVPQSFLKDDSIDNKVLTRSDKARGKSDNVPSEEVVKKMKNYWRQLLNAKLITQRKFDNLTKAERGGLSELDKAGFIKRQLVETRQITKHVAQILDSRMNTKYDENDKLIREVKVITLKSKLVSDFRKDFQFYKVREINNYHHAHDAYLNAVVGTALIKKYPKLESEFVYGDYKVYDVRKMIAKSEQEIGKATAKYFFYSNIMNFFKTEITLANGEIRKRPLIETNGETGEIVWDKGRDFATVRKVLSMPQVNIVKKTEVQTGGFSKESILPKRNSDKLIARKKDWDPKKYGGFDSPTVAYSVLVVAKVEKGKSKKLKSVKELLGITIMERSSFEKNPIDFLEAKGYKEVKKDLIIKLPKYSLFELENGRKRMLASAGELQKGNELALPSKYVNFLYLASHYEKLKGSPEDNEQKQLFVEQHKHYLDEIIEQISEFSKRVILADANLDKVLSAYNKHRDKPIREQAENIIHLFTLTNLGAPAAFKYFDTTIDRKRYTSTKEVLDATLIHQSITGLYETRIDLSQLGGDGGGGGGSGGGGSGGGGSGGGGSGGGGSGGTLGDQGSRGSDPLPEPRVTLTVEGIPTEFLVNTGAEHSVLTKPMGKMGSKRTVVAGATGSKVYPWTTKRLLKIGQKQVTHSFLVIPECPAPLLGRDLLTKLKAQIQFSTEGPQVTWEDRPAMCLVLNLEEEYRLHEKPVPPSIDPSWLQLFPMVWAEKAGMGLANQVPPVVVELKSDASPVAVRQYPMSKEAREGIRPHIQRFLDLGILVPCQSPWNTPLLPVKKPGTNDYRPVQDLREVNKRVQDIHPTVPNPYNLLSSLPPSHTWYSVLDLKDAFFCLKLHPNSQPLFAFEWRDPEKGNTGQLTWTRLPQGFKNSPTLFDEALHRDLASFRALNPQVVMLQYVDDLLVAAPTYRDCKEGTRRLLQELSKLGYRVSAKKAQLCREEVTYLGYLLKGGKRWLTPARKATVMKIPTPTTPRQVREFLGTAGFCRLWIPGFASLAAPLYPLTREKVPFTWTEAHQEAFGRIKEALLSAPALALPDLTKPFALYVDEKEGVARGVLTQTLGPWRRPVAYLSKKLDPVASGWPTCLKAIAAVALLLKDADKLTLGQNVLVIAPHNLESIVRQPPDRWMTNARMTHYQSLLLNERVSFAPPAILNPATLLPVESDDTPIHICSEILAEETGTRPDLRDQPLPGVPAWYTDGSSFIMDGRRQAGAAIVDNKRTVWASNLPEGTSAQKAELIALTQALRLAEGKSINIYTDSRYAFATAHVHGAIYKQRGLLTSAGKDIKNKEEILALLEAIHLPKRVAIIHCPGHQRGTDPVATGNRKADEAAKQAAQSTRILTETTKNAGKRTADGSEFEKRTADGSEFESPKKKAKVE

SEQ ID NO: 6174 - protein, 2141 aa, synthetic construct
MPAAKRVKLDGGDKKYSIGLDIGTNSVGWAVITDEYKVPSKKFKVLGNTDRHSIKKNLIGALLFDSGETAEATRLKRTARRRYTRRKNRICYLQEIFSNEMAKVDDSFFHRLEESFLVEEDKKHERHPIFGNIVDEVAYHEKYPTIYHLRKKLVDSTDKADLRLIYLALAHMIKFRGHFLIEGDLNPDNSDVDKLFIQLVQTYNQLFEENPINASGVDAKAILSARLSKSRRLENLIAQLPGEKKNGLFGNLIALSLGLTPNFKSNFDLAEDAKLQLSKDTYDDDLDNLLAQIGDQYADLFLAAKNLSDAILLSDILRVNTEITKAPLSASMIKRYDEHHQDLTLLKALVRQQLPEKYKEIFFDQSKNGYAGYIDGGASQEEFYKFIKPILEKMDGTEELLVKLNREDLLRKQRTFDNGSIPHQIHLGELHAILRRQEDFYPFLKDNREKIEKILTFRIPYYVGPLARGNSRFAWMTRKSEETITPWNFEEVVDKGASAQSFIERMTNFDKNLPNEKVLPKHSLLYEYFTVYNELTKVKYVTEGMRKPAFLSGEQKKAIVDLLFKTNRKVTVKQLKEDYFKKIECFDSVEISGVEDRFNASLGTYHDLLKIIKDKDFLDNEENEDILEDIVLTLTLFEDREMIEERLKTYAHLFDDKVMKQLKRRRYTGWGRLSRKLINGIRDKQSGKTILDFLKSDGFANRNFMQLIHDDSLTFKEDIQKAQVSGQGDSLHEHIANLAGSPAIKKGILQTVKVVDELVKVMGRHKPENIVIEMARENQTTQKGQKNSRERMKRIEEGIKELGSQILKEHPVENTQLQNEKLYLYYLQNGRDMYVDQELDINRLSDYDVDHIVPQSFLKDDSIDNKVLTRSDKARGKSDNVPSEEVVKKMKNYWRQLLNAKLITQRKFDNLTKAERGGLSELDKAGFIKRQLVETRQITKHVAQILDSRMNTKYDENDKLIREVKVITLKSKLVSDFRKDFQFYKVREINNYHHAHDAYLNAVVGTALIKKYPKLESEFVYGDYKVYDVRKMIAKSEQEIGKATAKYFFYSNIMNFFKTEITLANGEIRKRPLIETNGETGEIVWDKGRDFATVRKVLSMPQVNIVKKTEVQTGGFSKESILPKRNSDKLIARKKDWDPKKYGGFDSPTVAYSVLVVAKVEKGKSKKLKSVKELLGITIMERSSFEKNPIDFLEAKGYKEVKKDLIIKLPKYSLFELENGRKRMLASAGELQKGNELALPSKYVNFLYLASHYEKLKGSPEDNEQKQLFVEQHKHYLDEIIEQISEFSKRVILADANLDKVLSAYNKHRDKPIREQAENIIHLFTLTNLGAPAAFKYFDTTIDRKRYTSTKEVLDATLIHQSITGLYETRIDLSQLGGDGGGGGGSGGGGSGGGGSGGGGSGGGGSGGLLGRDLLTKLKAQIQFSTEGPQVTWEDRPAMCLVLNLEEEYRLHEKPVPPSIDPSWLQLFPMVWAEKAGMGLANQVPPVVVELKSDASPVAVRQYPMSKEAREGIRPHIQRFLDLGILVPCQSPWNTPLLPVKKPGTNDYRPVQDLREVNKRVQDIHPTVPNPYNLLSSLPPSHTWYSVLDLKDAFFCLKLHPNSQPLFAFEWRDPEKGNTGQLTWTRLPQGFKNSPTLFDEALHRDLASFRALNPQVVMLQYVDDLLVAAPTYRDCKEGTRRLLQELSKLGYRVSAKKAQLCREEVTYLGYLLKGGKRWLTPARKATVMKIPTPTTPRQVREFLGTAGFCRLWIPGFASLAAPLYPLTREKVPFTWTEAHQEAFGRIKEALLSAPALALPDLTKPFALYVDEKEGVARGVLTQTLGPWRRPVAYLSKKLDPVASGWPTCLKAIAAVALLLKDADKLTLGQNVLVIAPHNLESIVRQPPDRWMTNARMTHYQSLLLNERVSFAPPAILNPATLLPVESDDTPIHICSEILAEETGTRPDLRDQPLPGVPAWYTDGSSFIMDGRRQAGAAIVDNKRTVWASNLPEGTSAQKAELIALTQALRLAEGKSINIYTDSRYAFATAHVHGAIYKQRGLLTSAGKDIKNKEEILALLEAIHLPKRVAIIHCPGHQRGTDPVATGNRKADEAAKQAAQSTRILTETTKNAGKRTADGSEFEKRTADGSEFESPKKKAKVE

SEQ ID NO: 6175 - protein, 2141 aa, synthetic construct
MPAAKRVKLDGGDKKYSIGLDIGTNSVGWAVITDEYKVPSKKFKVLGNTDRHSIKKNLIGALLFDSGETAEATRLKRTARRRYTRRKNRICYLQEIFSNEMAKVDDSFFHRLEESFLVEEDKKHERHPIFGNIVDEVAYHEKYPTIYHLRKKLVDSTDKADLRLIYLALAHMIKFRGHFLIEGDLNPDNSDVDKLFIQLVQTYNQLFEENPINASGVDAKAILSARLSKSRRLENLIAQLPGEKKNGLFGNLIALSLGLTPNFKSNFDLAEDAKLQLSKDTYDDDLDNLLAQIGDQYADLFLAAKNLSDAILLSDILRVNTEITKAPLSASMIKRYDEHHQDLTLLKALVRQQLPEKYKEIFFDQSKNGYAGYIDGGASQEEFYKFIKPILEKMDGTEELLVKLNREDLLRKQRTFDNGSIPHQIHLGELHAILRRQEDFYPFLKDNREKIEKILTFRIPYYVGPLARGNSRFAWMTRKSEETITPWNFEEVVDKGASAQSFIERMTNFDKNLPNEKVLPKHSLLYEYFTVYNELTKVKYVTEGMRKPAFLSGEQKKAIVDLLFKTNRKVTVKQLKEDYFKKIECFDSVEISGVEDRFNASLGTYHDLLKIIKDKDFLDNEENEDILEDIVLTLTLFEDREMIEERLKTYAHLFDDKVMKQLKRRRYTGWGRLSRKLINGIRDKQSGKTILDFLKSDGFANRNFMQLIHDDSLTFKEDIQKAQVSGQGDSLHEHIANLAGSPAIKKGILQTVKVVDELVKVMGRHKPENIVIEMARENQTTQKGQKNSRERMKRIEEGIKELGSQILKEHPVENTQLQNEKLYLYYLQNGRDMYVDQELDINRLSDYDVDHIVPQSFLKDDSIDNKVLTRSDKARGKSDNVPSEEVVKKMKNYWRQLLNAKLITQRKFDNLTKAERGGLSELDKAGFIKRQLVETRQITKHVAQILDSRMNTKYDENDKLIREVKVITLKSKLVSDFRKDFQFYKVREINNYHHAHDAYLNAVVGTALIKKYPKLESEFVYGDYKVYDVRKMIAKSEQEIGKATAKYFFYSNIMNFFKTEITLANGEIRKRPLIETNGETGEIVWDKGRDFATVRKVLSMPQVNIVKKTEVQTGGFSKESILPKRNSDKLIARKKDWDPKKYGGFDSPTVAYSVLVVAKVEKGKSKKLKSVKELLGITIMERSSFEKNPIDFLEAKGYKEVKKDLIIKLPKYSLFELENGRKRMLASAGELQKGNELALPSKYVNFLYLASHYEKLKGSPEDNEQKQLFVEQHKHYLDEIIEQISEFSKRVILADANLDKVLSAYNKHRDKPIREQAENIIHLFTLTNLGAPAAFKYFDTTIDRKRYTSTKEVLDATLIHQSITGLYETRIDLSQLGGDGGGGGGSGGGGSGGGGSGGGGSGGGGSGGLLGRDLLTKLKAQIQFSTEGPQVTWEDRPAMCLVLNLEEEYRLHEKPVPPSIDPSWLQLFPMVWAEKAGMGLANQVPPVVVELKSDASPVAVRQYPMSKEAREGIRPHIQRFLDLGILVPCQSPWNTPLLPVKKPGTNDYRPVQDLREVNKRVQDIHPTVPNPYNLLSSLPPSHTWYSVLDLKDAFFCLKLHPNSQPLFAFEWRDPEKGNTGQLTWTRLPQGFKNSPTLFNEALHRDLASFRALNPQVVMLQYVDDLLVAAPTYRDCKEGTRRLLQELSKLGYRVSAKKAQLCREEVTYLGYLLKGGKRWLTPARKATVMKIPTPTTPRQVREFLGTAGFCRLWIPGFASLAAPLYPLTRPKVPFTWTEAHQEAFGRIKEALLSAPALALPDLTKPFALYVDEKEGVARGVLTQTLGPWRRPVAYLSKKLDPVASGWPTCLKAIAAVALLLKDADKLTLGQNVLVIAPHNLESIVRQPPDRWMTNARMTHYQSLLLNERVSFAPPAILNPATLLPVESDDTPIHICSEILAEETGTRPDLRDQPLPGVPAWYTDGSSFIMDGRRQAGAAIVDNKRTVWASNLPEGTSAQKAELIALTQALRLAEGKSINIYTDSRYAFATAHVHGAIYKQRGWLTSAGKDIKNKEEILALLEAIHLPKRVAIIHCPGHQRGTDPVATGNRKADEAAKQAAQSTRILTETTKNAGKRTADGSEFEKRTADGSEFESPKKKAKVE

SEQ ID NO: 6176 - protein, 2141 aa, synthetic construct
MPAAKRVKLDGGDKKYSIGLDIGTNSVGWAVITDEYKVPSKKFKVLGNTDRHSIKKNLIGALLFDSGETAEATRLKRTARRRYTRRKNRICYLQEIFSNEMAKVDDSFFHRLEESFLVEEDKKHERHPIFGNIVDEVAYHEKYPTIYHLRKKLVDSTDKADLRLIYLALAHMIKFRGHFLIEGDLNPDNSDVDKLFIQLVQTYNQLFEENPINASGVDAKAILSARLSKSRRLENLIAQLPGEKKNGLFGNLIALSLGLTPNFKSNFDLAEDAKLQLSKDTYDDDLDNLLAQIGDQYADLFLAAKNLSDAILLSDILRVNTEITKAPLSASMIKRYDEHHQDLTLLKALVRQQLPEKYKEIFFDQSKNGYAGYIDGGASQEEFYKFIKPILEKMDGTEELLVKLNREDLLRKQRTFDNGSIPHQIHLGELHAILRRQEDFYPFLKDNREKIEKILTFRIPYYVGPLARGNSRFAWMTRKSEETITPWNFEEVVDKGASAQSFIERMTNFDKNLPNEKVLPKHSLLYEYFTVYNELTKVKYVTEGMRKPAFLSGEQKKAIVDLLFKTNRKVTVKQLKEDYFKKIECFDSVEISGVEDRFNASLGTYHDLLKIIKDKDFLDNEENEDILEDIVLTLTLFEDREMIEERLKTYAHLFDDKVMKQLKRRRYTGWGRLSRKLINGIRDKQSGKTILDFLKSDGFANRNFMQLIHDDSLTFKEDIQKAQVSGQGDSLHEHIANLAGSPAIKKGILQTVKVVDELVKVMGRHKPENIVIEMARENQTTQKGQKNSRERMKRIEEGIKELGSQILKEHPVENTQLQNEKLYLYYLQNGRDMYVDQELDINRLSDYDVDHIVPQSFLKDDSIDNKVLTRSDKARGKSDNVPSEEVVKKMKNYWRQLLNAKLITQRKFDNLTKAERGGLSELDKAGFIKRQLVETRQITKHVAQILDSRMNTKYDENDKLIREVKVITLKSKLVSDFRKDFQFYKVREINNYHHAHDAYLNAVVGTALIKKYPKLESEFVYGDYKVYDVRKMIAKSEQEIGKATAKYFFYSNIMNFFKTEITLANGEIRKRPLIETNGETGEIVWDKGRDFATVRKVLSMPQVNIVKKTEVQTGGFSKESILPKRNSDKLIARKKDWDPKKYGGFDSPTVAYSVLVVAKVEKGKSKKLKSVKELLGITIMERSSFEKNPIDFLEAKGYKEVKKDLIIKLPKYSLFELENGRKRMLASAGELQKGNELALPSKYVNFLYLASHYEKLKGSPEDNEQKQLFVEQHKHYLDEIIEQISEFSKRVILADANLDKVLSAYNKHRDKPIREQAENIIHLFTLTNLGAPAAFKYFDTTIDRKRYTSTKEVLDATLIHQSITGLYETRIDLSQLGGDGGGGGGSGGGGSGGGGSGGGGSGGGGSGGLLGRDLLTKLKAQIQFSTEGPQVTWEDRPAMCLVLNLEEEYRLHEKPVPPSIDPSWLQLFPMVWAEKAGMGLANQVPPVVVELKSDASPVAVRQYPMSKEAREGIRPHIQRFLDLGILVPCQSPWNTPLLPVKKPGTNDYRPVQDLREVNKRVQDIHPTVPNPYNLLSSLPPSHTWYSVLDLKDAFFCLKLHPNSQPLFAFEWRDPEKGNTGQLTWTRLPQGFKNSPTLFNEALHRDLASFRALNPQVVMLQYVDDLLVAAPTYRDCKEGTRRLLQELSKLGYRVSAKKAQLCREEVTYLGYLLKGGKRWLTPARKATVMKIPTPTTPRQVREFLGKAGFCRLFIPGFASLAAPLYPLTRPKVPFTWTEAHQEAFGRIKEALLSAPALALPDLTKPFALYVDEKEGVARGVLTQTLGPWRRPVAYLSKKLDPVASGWPTCLKAIAAVALLLKDADKLTLGQNVLVIAPHNLESIVRQPPDRWMTNARMTHYQSLLLNERVSFAPPAILNPATLLPVESDDTPIHICSEILAEETGTRPDLRDQPLPGVPAWYTDGSSFIMDGRRQAGAAIVDNKRTVWASNLPEGTSAQKAELIALTQALRLAEGKSINIYTDSRYAFATAHVHGAIYKQRGWLTSAGKDIKNKEEILALLEAIHLPKRVAIIHCPGHQRGTDPVATGNRKADEAAKQAAQSTRILTETTKNAGKRTADGSEFEKRTADGSEFESPKKKAKVE

SEQ ID NO: 6177 - protein, 2232 aa, synthetic construct
MPAAKRVKLDGGDKKYSIGLDIGTNSVGWAVITDEYKVPSKKFKVLGNTDRHSIKKNLIGALLFDSGETAEATRLKRTARRRYTRRKNRICYLQEIFSNEMAKVDDSFFHRLEESFLVEEDKKHERHPIFGNIVDEVAYHEKYPTIYHLRKKLVDSTDKADLRLIYLALAHMIKFRGHFLIEGDLNPDNSDVDKLFIQLVQTYNQLFEENPINASGVDAKAILSARLSKSRRLENLIAQLPGEKKNGLFGNLIALSLGLTPNFKSNFDLAEDAKLQLSKDTYDDDLDNLLAQIGDQYADLFLAAKNLSDAILLSDILRVNTEITKAPLSASMIKRYDEHHQDLTLLKALVRQQLPEKYKEIFFDQSKNGYAGYIDGGASQEEFYKFIKPILEKMDGTEELLVKLNREDLLRKQRTFDNGSIPHQIHLGELHAILRRQEDFYPFLKDNREKIEKILTFRIPYYVGPLARGNSRFAWMTRKSEETITPWNFEEVVDKGASAQSFIERMTNFDKNLPNEKVLPKHSLLYEYFTVYNELTKVKYVTEGMRKPAFLSGEQKKAIVDLLFKTNRKVTVKQLKEDYFKKIECFDSVEISGVEDRFNASLGTYHDLLKIIKDKDFLDNEENEDILEDIVLTLTLFEDREMIEERLKTYAHLFDDKVMKQLKRRRYTGWGRLSRKLINGIRDKQSGKTILDFLKSDGFANRNFMQLIHDDSLTFKEDIQKAQVSGQGDSLHEHIANLAGSPAIKKGILQTVKVVDELVKVMGRHKPENIVIEMARENQTTQKGQKNSRERMKRIEEGIKELGSQILKEHPVENTQLQNEKLYLYYLQNGRDMYVDQELDINRLSDYDVDHIVPQSFLKDDSIDNKVLTRSDKARGKSDNVPSEEVVKKMKNYWRQLLNAKLITQRKFDNLTKAERGGLSELDKAGFIKRQLVETRQITKHVAQILDSRMNTKYDENDKLIREVKVITLKSKLVSDFRKDFQFYKVREINNYHHAHDAYLNAVVGTALIKKYPKLESEFVYGDYKVYDVRKMIAKSEQEIGKATAKYFFYSNIMNFFKTEITLANGEIRKRPLIETNGETGEIVWDKGRDFATVRKVLSMPQVNIVKKTEVQTGGFSKESILPKRNSDKLIARKKDWDPKKYGGFDSPTVAYSVLVVAKVEKGKSKKLKSVKELLGITIMERSSFEKNPIDFLEAKGYKEVKKDLIIKLPKYSLFELENGRKRMLASAGELQKGNELALPSKYVNFLYLASHYEKLKGSPEDNEQKQLFVEQHKHYLDEIIEQISEFSKRVILADANLDKVLSAYNKHRDKPIREQAENIIHLFTLTNLGAPAAFKYFDTTIDRKRYTSTKEVLDATLIHQSITGLYETRIDLSQLGGDGGGGGGSGGGGSGGGGSGGGGSGGGGSGGTLGDQGSRGSDPLPEPRVTLTVEGIPTEFLVNTGAEHSVLTKPMGKMGSKRTVVAGATGSKVYPWTTKRLLKIGQKQVTHSFLVIPECPAPLLGRDLLTKLKAQIQFSTEGPQVTWEDRPAMCLVLNLEEEYRLHEKPVPPSIDPSWLQLFPMVWAEKAGMGLANQVPPVVVELKSDASPVAVRQYPMSKEAREGIRPHIQRFLDLGILVPCQSPWNTPLLPVKKPGTNDYRPVQDLREVNKRVQDIHPTVPNPYNLLSSLPPSHTWYSVLDLKDAFFCLKLHPNSQPLFAFEWRDPEKGNTGQLTWTRLPQGFKNSPTLFNEALHRDLASFRALNPQVVMLQYVDDLLVAAPTYRDCKEGTRRLLQELSKLGYRVSAKKAQLCREEVTYLGYLLKGGKRWLTPARKATVMKIPTPTTPRQVREFLGTAGFCRLWIPGFASLAAPLYPLTRPKVPFTWTEAHQEAFGRIKEALLSAPALALPDLTKPFALYVDEKEGVARGVLTQTLGPWRRPVAYLSKKLDPVASGWPTCLKAIAAVALLLKDADKLTLGQNVLVIAPHNLESIVRQPPDRWMTNARMTHYQSLLLNERVSFAPPAILNPATLLPVESDDTPIHICSEILAEETGTRPDLRDQPLPGVPAWYTDGSSFIMDGRRQAGAAIVDNKRTVWASNLPEGTSAQKAELIALTQALRLAEGKSINIYTDSRYAFATAHVHGAIYKQRGWLTSAGKDIKNKEEILALLEAIHLPKRVAIIHCPGHQRGTDPVATGNRKADEAAKQAAQSTRILTETTKNAGKRTADGSEFEKRTADGSEFESPKKKAKVE

SEQ ID NO: 6178 - protein, 2110 aa, synthetic construct
MPAAKRVKLDGGDKKYSIGLDIGTNSVGWAVITDEYKVPSKKFKVLGNTDRHSIKKNLIGALLFDSGETAEATRLKRTARRRYTRRKNRICYLQEIFSNEMAKVDDSFFHRLEESFLVEEDKKHERHPIFGNIVDEVAYHEKYPTIYHLRKKLVDSTDKADLRLIYLALAHMIKFRGHFLIEGDLNPDNSDVDKLFIQLVQTYNQLFEENPINASGVDAKAILSARLSKSRRLENLIAQLPGEKKNGLFGNLIALSLGLTPNFKSNFDLAEDAKLQLSKDTYDDDLDNLLAQIGDQYADLFLAAKNLSDAILLSDILRVNTEITKAPLSASMIKRYDEHHQDLTLLKALVRQQLPEKYKEIFFDQSKNGYAGYIDGGASQEEFYKFIKPILEKMDGTEELLVKLNREDLLRKQRTFDNGSIPHQIHLGELHAILRRQEDFYPFLKDNREKIEKILTFRIPYYVGPLARGNSRFAWMTRKSEETITPWNFEEVVDKGASAQSFIERMTNFDKNLPNEKVLPKHSLLYEYFTVYNELTKVKYVTEGMRKPAFLSGEQKKAIVDLLFKTNRKVTVKQLKEDYFKKIECFDSVEISGVEDRFNASLGTYHDLLKIIKDKDFLDNEENEDILEDIVLTLTLFEDREMIEERLKTYAHLFDDKVMKQLKRRRYTGWGRLSRKLINGIRDKQSGKTILDFLKSDGFANRNFMQLIHDDSLTFKEDIQKAQVSGQGDSLHEHIANLAGSPAIKKGILQTVKVVDELVKVMGRHKPENIVIEMARENQTTQKGQKNSRERMKRIEEGIKELGSQILKEHPVENTQLQNEKLYLYYLQNGRDMYVDQELDINRLSDYDVDHIVPQSFLKDDSIDNKVLTRSDKARGKSDNVPSEEVVKKMKNYWRQLLNAKLITQRKFDNLTKAERGGLSELDKAGFIKRQLVETRQITKHVAQILDSRMNTKYDENDKLIREVKVITLKSKLVSDFRKDFQFYKVREINNYHHAHDAYLNAVVGTALIKKYPKLESEFVYGDYKVYDVRKMIAKSEQEIGKATAKYFFYSNIMNFFKTEITLANGEIRKRPLIETNGETGEIVWDKGRDFATVRKVLSMPQVNIVKKTEVQTGGFSKESILPKRNSDKLIARKKDWDPKKYGGFDSPTVAYSVLVVAKVEKGKSKKLKSVKELLGITIMERSSFEKNPIDFLEAKGYKEVKKDLIIKLPKYSLFELENGRKRMLASAGELQKGNELALPSKYVNFLYLASHYEKLKGSPEDNEQKQLFVEQHKHYLDEIIEQISEFSKRVILADANLDKVLSAYNKHRDKPIREQAENIIHLFTLTNLGAPAAFKYFDTTIDRKRYTSTKEVLDATLIHQSITGLYETRIDLSQLGGDGGGGGGSGGGGSGGGGSGGGGSGGGGSGGTLNLEDEYRLYETSAEPEVSPGSTWLSDFPQAWAETGGMGLAVRQAPLIIPLKATSTPVSIKQYPMSQEAKLGIKPHIQRLLDQGILVPCQSPWNTPLLPVKKPGTNDYRPVQDLREVNKRVEDIHPTVPNPYNLLSGLPPSHRWYTVLDLKDAFFCLRLHPTSQPLFAFEWRDPGMGISGQLTWTRLPQGFKNSPTLFNEALHRDLADFRIQHPDLILLQYVDDILLAATSELDCQQGTRALLLTLGNLGYRASAKKAQLCQKQVKYLGYLLKEGQRWLTEARKETVMGQPTPKTPRQLREFLGKAGFCRLFIPGFAEMAAPLYPLTKPGTLFNWGPDQQKAYQEIKQALLTAPALGLPDLTKPFELFVDEKQGYAKGVLTQKLGPWRRPVAYLSKKLDPVAAGWPPCLRMVAAIAVLRKDAGKLTMGQPLVILAPHAVEALVKQPPDRWLSNARMTHYQAMLLDTDRVQFGPVVALNPATLLPLPEEGAPHDCLEILAETHGTRPDLTDQPIPDADHTWYTDGSSFLQEGQRKAGAAVTTETEVIWARALPAGTSAQRAELIALTQALKMAEGKRLNVYTDSRYAFATAHIHGEIYRRRGWLTSEGREIKNKSEILALLKALFLPKRLSIIHCLGHQKGDSAEARGNRLADQAAREAAIKTPPDTSTLLAGKRTADGSEFEKRTADGSEFESPKKKAKVE

SEQ ID NO: 6179 - protein, 2110 aa, synthetic construct
MPAAKRVKLDGGDKKYSIGLDIGTNSVGWAVITDEYKVPSKKFKVLGNTDRHSIKKNLIGALLFDSGETAEATRLKRTARRRYTRRKNRICYLQEIFSNEMAKVDDSFFHRLEESFLVEEDKKHERHPIFGNIVDEVAYHEKYPTIYHLRKKLVDSTDKADLRLIYLALAHMIKFRGHFLIEGDLNPDNSDVDKLFIQLVQTYNQLFEENPINASGVDAKAILSARLSKSRRLENLIAQLPGEKKNGLFGNLIALSLGLTPNFKSNFDLAEDAKLQLSKDTYDDDLDNLLAQIGDQYADLFLAAKNLSDAILLSDILRVNTEITKAPLSASMIKRYDEHHQDLTLLKALVRQQLPEKYKEIFFDQSKNGYAGYIDGGASQEEFYKFIKPILEKMDGTEELLVKLNREDLLRKQRTFDNGSIPHQIHLGELHAILRRQEDFYPFLKDNREKIEKILTFRIPYYVGPLARGNSRFAWMTRKSEETITPWNFEEVVDKGASAQSFIERMTNFDKNLPNEKVLPKHSLLYEYFTVYNELTKVKYVTEGMRKPAFLSGEQKKAIVDLLFKTNRKVTVKQLKEDYFKKIECFDSVEISGVEDRFNASLGTYHDLLKIIKDKDFLDNEENEDILEDIVLTLTLFEDREMIEERLKTYAHLFDDKVMKQLKRRRYTGWGRLSRKLINGIRDKQSGKTILDFLKSDGFANRNFMQLIHDDSLTFKEDIQKAQVSGQGDSLHEHIANLAGSPAIKKGILQTVKVVDELVKVMGRHKPENIVIEMARENQTTQKGQKNSRERMKRIEEGIKELGSQILKEHPVENTQLQNEKLYLYYLQNGRDMYVDQELDINRLSDYDVDHIVPQSFLKDDSIDNKVLTRSDKARGKSDNVPSEEVVKKMKNYWRQLLNAKLITQRKFDNLTKAERGGLSELDKAGFIKRQLVETRQITKHVAQILDSRMNTKYDENDKLIREVKVITLKSKLVSDFRKDFQFYKVREINNYHHAHDAYLNAVVGTALIKKYPKLESEFVYGDYKVYDVRKMIAKSEQEIGKATAKYFFYSNIMNFFKTEITLANGEIRKRPLIETNGETGEIVWDKGRDFATVRKVLSMPQVNIVKKTEVQTGGFSKESILPKRNSDKLIARKKDWDPKKYGGFDSPTVAYSVLVVAKVEKGKSKKLKSVKELLGITIMERSSFEKNPIDFLEAKGYKEVKKDLIIKLPKYSLFELENGRKRMLASAGELQKGNELALPSKYVNFLYLASHYEKLKGSPEDNEQKQLFVEQHKHYLDEIIEQISEFSKRVILADANLDKVLSAYNKHRDKPIREQAENIIHLFTLTNLGAPAAFKYFDTTIDRKRYTSTKEVLDATLIHQSITGLYETRIDLSQLGGDGGGGGGSGGGGSGGGGSGGGGSGGGGSGGTLNIEDEYRLHETSKGPDVPLGSTWLSDFPQAWAETGGMGLAFRQAPLIISLKATSTPVSIKQYPMSQEARLGIKPHIQRLLDQGILVPCQSPWNTPLLPVKKPGTNDYRPVQDLREVNKRVEDIHPTVPNPYNLLSGLPPSHQWYTVLDLKDAFFCLRLHPTSQSLFAFEWKDPEMGISGQLTWTRLPQGFKNSPTLFNEALHRDLADFRIQHPDLILLQYVDDLLLAATSELDCQQGTRALLQTLGDLGYRASAKKAQICQKQVKYLGYLLKEGQRWLTEARKETVMGQPTPKTPRQLREFLGTAGLCRLWIPGFAEMAAPLYPLTKPGTLFKWGPDQQKAYQEIKQALLTAPALGLPDLTKPFELFVDEKQGYAKGVLTQKLGPWRRPVAYLSKKLDPVAAGWPPCLRMVAAIAVLTKDVGKLTMGQPLVILAPHAVEALVKQPPDRWLSNARMTHYQALLLDTDRVQFGPIVALNPATLLPLPEEGLQHDCLDILAEAHGTRPDLTDQPLPDADHTWYTDGSSFLQEGQRRAGAAVTTETEVIWAKALPAGTSAQRAELIALTQALKMAAGKKLNVYTDSRYAFATAHIHGEIYRRRGWLTSEGKEIKNKDEILALLKALFLPKRLSIIHCPGHQKGNHAEARGNRMADQAAREVATRETPETSTLLAGKRTADGSEFEKRTADGSEFESPKKKAKVE

SEQ ID NO: 6180 - protein, 2110 aa, synthetic construct
MPAAKRVKLDGGDKKYSIGLDIGTNSVGWAVITDEYKVPSKKFKVLGNTDRHSIKKNLIGALLFDSGETAEATRLKRTARRRYTRRKNRICYLQEIFSNEMAKVDDSFFHRLEESFLVEEDKKHERHPIFGNIVDEVAYHEKYPTIYHLRKKLVDSTDKADLRLIYLALAHMIKFRGHFLIEGDLNPDNSDVDKLFIQLVQTYNQLFEENPINASGVDAKAILSARLSKSRRLENLIAQLPGEKKNGLFGNLIALSLGLTPNFKSNFDLAEDAKLQLSKDTYDDDLDNLLAQIGDQYADLFLAAKNLSDAILLSDILRVNTEITKAPLSASMIKRYDEHHQDLTLLKALVRQQLPEKYKEIFFDQSKNGYAGYIDGGASQEEFYKFIKPILEKMDGTEELLVKLNREDLLRKQRTFDNGSIPHQIHLGELHAILRRQEDFYPFLKDNREKIEKILTFRIPYYVGPLARGNSRFAWMTRKSEETITPWNFEEVVDKGASAQSFIERMTNFDKNLPNEKVLPKHSLLYEYFTVYNELTKVKYVTEGMRKPAFLSGEQKKAIVDLLFKTNRKVTVKQLKEDYFKKIECFDSVEISGVEDRFNASLGTYHDLLKIIKDKDFLDNEENEDILEDIVLTLTLFEDREMIEERLKTYAHLFDDKVMKQLKRRRYTGWGRLSRKLINGIRDKQSGKTILDFLKSDGFANRNFMQLIHDDSLTFKEDIQKAQVSGQGDSLHEHIANLAGSPAIKKGILQTVKVVDELVKVMGRHKPENIVIEMARENQTTQKGQKNSRERMKRIEEGIKELGSQILKEHPVENTQLQNEKLYLYYLQNGRDMYVDQELDINRLSDYDVDHIVPQSFLKDDSIDNKVLTRSDKARGKSDNVPSEEVVKKMKNYWRQLLNAKLITQRKFDNLTKAERGGLSELDKAGFIKRQLVETRQITKHVAQILDSRMNTKYDENDKLIREVKVITLKSKLVSDFRKDFQFYKVREINNYHHAHDAYLNAVVGTALIKKYPKLESEFVYGDYKVYDVRKMIAKSEQEIGKATAKYFFYSNIMNFFKTEITLANGEIRKRPLIETNGETGEIVWDKGRDFATVRKVLSMPQVNIVKKTEVQTGGFSKESILPKRNSDKLIARKKDWDPKKYGGFDSPTVAYSVLVVAKVEKGKSKKLKSVKELLGITIMERSSFEKNPIDFLEAKGYKEVKKDLIIKLPKYSLFELENGRKRMLASAGELQKGNELALPSKYVNFLYLASHYEKLKGSPEDNEQKQLFVEQHKHYLDEIIEQISEFSKRVILADANLDKVLSAYNKHRDKPIREQAENIIHLFTLTNLGAPAAFKYFDTTIDRKRYTSTKEVLDATLIHQSITGLYETRIDLSQLGGDGGGGGGSGGGGSGGGGSGGGGSGGGGSGGTLNIEDEHRLHETSKEPDVSLGSTWLSDFPQAWAETGGMGLAVRQAPLIIPLKATSTPVSIKQYPMSQEARLGIKPHIQRLLDQGILVPCQSPWNTPLLPVKKPGTNDYRPVQDLREVNKRVEDIHPTVPNPYNLLSGLPPSHQWYTVLDLKDAFFCLRLHPTSQPLFAFEWRDPEMGISGQLTWTRLPQGFKNSPTLFNEALHRDLADFRIQHPDLILLQYVDDLLLAATSELDCQQGTRALLQTLGNLGYRASAKKAQICQKQVKYLGYLLKEGQRWLTEARKETVMGQPTPKTPRQLREFLGTAGFCRLWIPGFAEMAAPLYPLTKPGTLFNWGPDQQKAYQEIKQALLTAPALGLPDLTKPFELFVDEKQGYAKGVLTQKLGPWRRPVAYLSKKLDPVAAGWPPCLRMVAAIAVLTKDAGKLTMGQPLVILAPHAVEALVKQPPDRWLSNARMTHYQALLLDTDRVQFGPVVALNPATLLPLPEEGLQHNCLDILAEAHGTRPDLTDQPLPDADHTWYTDGSSLLQEGQRKAGAAVTTETEVIWAKALPAGTSAQRAELIALTQALKMAEGKKLNVYTDSRYAFATAHIHGEIYRRRGWLTSEGKEIKNKDEILALLKALFLPKRLSIIHCPGHQKGHSAEARGNRMADQAARKAAITETPDTSTLLAGKRTADGSEFEKRTADGSEFESPKKKAKVE

SEQ ID NO: 6181 - protein, 2110 aa, synthetic construct; identical to SEQ ID NO: 4504

SEQ ID NO: 6182 - protein, 2110 aa, synthetic construct; identical to SEQ ID NO: 6180

SEQ ID NO: 6183 - protein, 2110 aa, synthetic construct; identical to SEQ ID NO: 4504

SEQ ID NO: 6184 - protein, 2130 aa, synthetic construct
MPAAKRVKLDGGDKKYSIGLDIGTNSVGWAVITDEYKVPSKKFKVLGNTDRHSIKKNLIGALLFDSGETAEATRLKRTARRRYTRRKNRICYLQEIFSNEMAKVDDSFFHRLEESFLVEEDKKHERHPIFGNIVDEVAYHEKYPTIYHLRKKLVDSTDKADLRLIYLALAHMIKFRGHFLIEGDLNPDNSDVDKLFIQLVQTYNQLFEENPINASGVDAKAILSARLSKSRRLENLIAQLPGEKKNGLFGNLIALSLGLTPNFKSNFDLAEDAKLQLSKDTYDDDLDNLLAQIGDQYADLFLAAKNLSDAILLSDILRVNTEITKAPLSASMIKRYDEHHQDLTLLKALVRQQLPEKYKEIFFDQSKNGYAGYIDGGASQEEFYKFIKPILEKMDGTEELLVKLNREDLLRKQRTFDNGSIPHQIHLGELHAILRRQEDFYPFLKDNREKIEKILTFRIPYYVGPLARGNSRFAWMTRKSEETITPWNFEEVVDKGASAQSFIERMTNFDKNLPNEKVLPKHSLLYEYFTVYNELTKVKYVTEGMRKPAFLSGEQKKAIVDLLFKTNRKVTVKQLKEDYFKKIECFDSVEISGVEDRFNASLGTYHDLLKIIKDKDFLDNEENEDILEDIVLTLTLFEDREMIEERLKTYAHLFDDKVMKQLKRRRYTGWGRLSRKLINGIRDKQSGKTILDFLKSDGFANRNFMQLIHDDSLTFKEDIQKAQVSGQGDSLHEHIANLAGSPAIKKGILQTVKVVDELVKVMGRHKPENIVIEMARENQTTQKGQKNSRERMKRIEEGIKELGSQILKEHPVENTQLQNEKLYLYYLQNGRDMYVDQELDINRLSDYDVDHIVPQSFLKDDSIDNKVLTRSDKARGKSDNVPSEEVVKKMKNYWRQLLNAKLITQRKFDNLTKAERGGLSELDKAGFIKRQLVETRQITKHVAQILDSRMNTKYDENDKLIREVKVITLKSKLVSDFRKDFQFYKVREINNYHHAHDAYLNAVVGTALIKKYPKLESEFVYGDYKVYDVRKMIAKSEQEIGKATAKYFFYSNIMNFFKTEITLANGEIRKRPLIETNGETGEIVWDKGRDFATVRKVLSMPQVNIVKKTEVQTGGFSKESILPKRNSDKLIARKKDWDPKKYGGFDSPTVAYSVLVVAKVEKGKSKKLKSVKELLGITIMERSSFEKNPIDFLEAKGYKEVKKDLIIKLPKYSLFELENGRKRMLASAGELQKGNELALPSKYVNFLYLASHYEKLKGSPEDNEQKQLFVEQHKHYLDEIIEQISEFSKRVILADANLDKVLSAYNKHRDKPIREQAENIIHLFTLTNLGAPAAFKYFDTTIDRKRYTSTKEVLDATLIHQSITGLYETRIDLSQLGGDGGGGGGSGGGGSGGGGSGGGGSGGGGSGGVQEISDSRPMLHIYLNGRRFLGLLDTGADKTCIAGRDWPANWPIHQTESSLQGLGMACGVARSSQPLRWQHEDKSGIIHPFVIPTLPFTLWGRDIMKDIKVRLMTDSPDDSQDLMIGAIESNLFADQISWKSDQPVWLNQWPLKQEKLQALQQLVTEQLQLGHLEESNSPWNTPVFVIKKKSGKWRLLQDLRAVNATMHDMGALQPGLPSPVAVPKGWEIIIIDLQDCFFNIKLHPEDCKRFAFSVPSPNFKRPYQRFQWKVLPQGMKNSPTLCQKFVDKAILTVRDKYQDSYIVHYMDDILLAHPSRSIVDEILTSMIQALNKHGLVVSTEKIQKYDNLKYLGTHIQGDSVSYQKLQIRTDKLRTLNDFQKLLGNINWIRPFLKLTTGELKPLFEILNGDSNPISTRKLTPEACKALQLMNERLSTARVKRLDLSQPWSLCILKTEYTPTACLWQDGVVEWIHLPHISPKVITPYDIFCTQLIIKGRHRSKELFSKDPDYIVVPYTKVQFDLLLQEKEDWPISLLGFLGEVHFHLPKDPLLTFTLQTAIIFPHMTSTTPLEKGIVIFTDGSANGRSVTYIQGREPIIKENTQNTAQQAEIVAVITAFEEVSQPFNLYTDSKYVTGLFPEIETATLSPRTKIYTELKHLQRLIHKRQEKFYIGHIRGHTGLPGPLAQGNAYADSLTRILTAAGKRTADGSEFEKRTADGSEFESPKKKAKVE

SEQ ID NO: 6185 - protein, 2130 aa, synthetic construct
MPAAKRVKLDGGDKKYSIGLDIGTNSVGWAVITDEYKVPSKKFKVLGNTDRHSIKKNLIGALLFDSGETAEATRLKRTARRRYTRRKNRICYLQEIFSNEMAKVDDSFFHRLEESFLVEEDKKHERHPIFGNIVDEVAYHEKYPTIYHLRKKLVDSTDKADLRLIYLALAHMIKFRGHFLIEGDLNPDNSDVDKLFIQLVQTYNQLFEENPINASGVDAKAILSARLSKSRRLENLIAQLPGEKKNGLFGNLIALSLGLTPNFKSNFDLAEDAKLQLSKDTYDDDLDNLLAQIGDQYADLFLAAKNLSDAILLSDILRVNTEITKAPLSASMIKRYDEHHQDLTLLKALVRQQLPEKYKEIFFDQSKNGYAGYIDGGASQEEFYKFIKPILEKMDGTEELLVKLNREDLLRKQRTFDNGSIPHQIHLGELHAILRRQEDFYPFLKDNREKIEKILTFRIPYYVGPLARGNSRFAWMTRKSEETITPWNFEEVVDKGASAQSFIERMTNFDKNLPNEKVLPKHSLLYEYFTVYNELTKVKYVTEGMRKPAFLSGEQKKAIVDLLFKTNRKVTVKQLKEDYFKKIECFDSVEISGVEDRFNASLGTYHDLLKIIKDKDFLDNEENEDILEDIVLTLTLFEDREMIEERLKTYAHLFDDKVMKQLKRRRYTGWGRLSRKLINGIRDKQSGKTILDFLKSDGFANRNFMQLIHDDSLTFKEDIQKAQVSGQGDSLHEHIANLAGSPAIKKGILQTVKVVDELVKVMGRHKPENIVIEMARENQTTQKGQKNSRERMKRIEEGIKELGSQILKEHPVENTQLQNEKLYLYYLQNGRDMYVDQELDINRLSDYDVDHIVPQSFLKDDSIDNKVLTRSDKARGKSDNVPSEEVVKKMKNYWRQLLNAKLITQRKFDNLTKAERGGLSELDKAGFIKRQLVETRQITKHVAQILDSRMNTKYDENDKLIREVKVITLKSKLVSDFRKDFQFYKVREINNYHHAHDAYLNAVVGTALIKKYPKLESEFVYGDYKVYDVRKMIAKSEQEIGKATAKYFFYSNIMNFFKTEITLANGEIRKRPLIETNGETGEIVWDKGRDFATVRKVLSMPQVNIVKKTEVQTGGFSKESILPKRNSDKLIARKKDWDPKKYGGFDSPTVAYSVLVVAKVEKGKSKKLKSVKELLGITIMERSSFEKNPIDFLEAKGYKEVKKDLIIKLPKYSLFELENGRKRMLASAGELQKGNELALPSKYVNFLYLASHYEKLKGSPEDNEQKQLFVEQHKHYLDEIIEQISEFSKRVILADANLDKVLSAYNKHRDKPIREQAENIIHLFTLTNLGAPAAFKYFDTTIDRKRYTSTKEVLDATLIHQSITGLYETRIDLSQLGGDGGGGGGSGGGGSGGGGSGGGGSGGGGSGGWVQEISDSRPMLHIYLNGRRFLGLLNTGADKTCIAGRDWPANWPIHQTESSLQGLGMACGVARSSQPLRWQHEDKSGIIHPFVIPTLPFTLWGRDIMKDIKVRLMTDSPDDSQDLMIGAIESNLFADQISWKSDQPVWLNQWPLKQEKLQALQQLVTEQLQLGHLEESNSPWNTPVFVIKKKSGKWRLLQDLRAVNATMHDMGALQPGLPSPVAVPKGWEIIIIDLQDCFFNIKLHPEDCKRFAFSVPSPNFKRPYQRFQWKVLPQGMKNSPTLCQKFVDKAILTVRDKYQDSYIVHYMDDILLAHPSRSIVDEILTSMIQALNKHGLVVSTEKIQKYDNLKYLGTHIQGDSVSYQKLQIRTDKLRTLNDFQKLLGNINWIRPFLKLTTGELKPLFEILNGDSNPISTRKLTPEACKALQLMNERLSTARVKRLDLSQPWSLCILKTEYTPTACLWQDGVVEWIHLPHISPKVITPYDIFCTQLIIKGRHRSKELFSKDPDYIVVPYTKVQFDLLLQEKEDWPISLLGFLGEVHFHLPKDPLLTFTLQTAIIFPHMTSTTPLEKGIVIFTDGSANGRSVTYIQGREPIIKENTQNTAQQAEIVAVITAFEEVSQPFNLYTDSKYVTGLFPEIETATLSPRTKIYTELKHLQRLIHKRQEKFYIGHIRGHTGLPGPLAQGNAYADSLTRILTAGKRTADGSEFEKRTADGSEFESPKKKAKVE

SEQ ID NO: 6186 - protein, 2130 aa, synthetic construct; identical to SEQ ID NO: 6185

SEQ ID NO: 6187 - protein, 2038 aa, synthetic construct
MPAAKRVKLDGGDKKYSIGLDIGTNSVGWAVITDEYKVPSKKFKVLGNTDRHSIKKNLIGALLFDSGETAEATRLKRTARRRYTRRKNRICYLQEIFSNEMAKVDDSFFHRLEESFLVEEDKKHERHPIFGNIVDEVAYHEKYPTIYHLRKKLVDSTDKADLRLIYLALAHMIKFRGHFLIEGDLNPDNSDVDKLFIQLVQTYNQLFEENPINASGVDAKAILSARLSKSRRLENLIAQLPGEKKNGLFGNLIALSLGLTPNFKSNFDLAEDAKLQLSKDTYDDDLDNLLAQIGDQYADLFLAAKNLSDAILLSDILRVNTEITKAPLSASMIKRYDEHHQDLTLLKALVRQQLPEKYKEIFFDQSKNGYAGYIDGGASQEEFYKFIKPILEKMDGTEELLVKLNREDLLRKQRTFDNGSIPHQIHLGELHAILRRQEDFYPFLKDNREKIEKILTFRIPYYVGPLARGNSRFAWMTRKSEETITPWNFEEVVDKGASAQSFIERMTNFDKNLPNEKVLPKHSLLYEYFTVYNELTKVKYVTEGMRKPAFLSGEQKKAIVDLLFKTNRKVTVKQLKEDYFKKIECFDSVEISGVEDRFNASLGTYHDLLKIIKDKDFLDNEENEDILEDIVLTLTLFEDREMIEERLKTYAHLFDDKVMKQLKRRRYTGWGRLSRKLINGIRDKQSGKTILDFLKSDGFANRNFMQLIHDDSLTFKEDIQKAQVSGQGDSLHEHIANLAGSPAIKKGILQTVKVVDELVKVMGRHKPENIVIEMARENQTTQKGQKNSRERMKRIEEGIKELGSQILKEHPVENTQLQNEKLYLYYLQNGRDMYVDQELDINRLSDYDVDHIVPQSFLKDDSIDNKVLTRSDKARGKSDNVPSEEVVKKMKNYWRQLLNAKLITQRKFDNLTKAERGGLSELDKAGFIKRQLVETRQITKHVAQILDSRMNTKYDENDKLIREVKVITLKSKLVSDFRKDFQFYKVREINNYHHAHDAYLNAVVGTALIKKYPKLESEFVYGDYKVYDVRKMIAKSEQEIGKATAKYFFYSNIMNFFKTEITLANGEIRKRPLIETNGETGEIVWDKGRDFATVRKVLSMPQVNIVKKTEVQTGGFSKESILPKRNSDKLIARKKDWDPKKYGGFDSPTVAYSVLVVAKVEKGKSKKLKSVKELLGITIMERSSFEKNPIDFLEAKGYKEVKKDLIIKLPKYSLFELENGRKRMLASAGELQKGNELALPSKYVNFLYLASHYEKLKGSPEDNEQKQLFVEQHKHYLDEIIEQISEFSKRVILADANLDKVLSAYNKHRDKPIREQAENIIHLFTLTNLGAPAAFKYFDTTIDRKRYTSTKEVLDATLIHQSITGLYETRIDLSQLGGDGGGGGGSGGGGSGGGGSGGGGSGGGGSGGGRDIMKDIKVRLMTDSPDDSQDLMIGAIESNLFADQISWKSDQPVWLNQWPLKQEKLQALQQLVTEQLQLGHLEESNSPWNTPVFVIKKKSGKWRLLQDLRAVNATMHDMGALQPGLPSPVAVPKGWEIIIIDLQDCFFNIKLHPEDCKRFAFSVPSPNFKRPYQRFQWKVLPQGMKNSPTLCQKFVDKAILTVRDKYQDSYIVHYMDDILLAHPSRSIVDEILTSMIQALNKHGLVVSTEKIQKYDNLKYLGTHIQGDSVSYQKLQIRTDKLRTLNDFQKLLGNINWIRPFLKLTTGELKPLFEILNGDSNPISTRKLTPEACKALQLMNERLSTARVKRLDLSQPWSLCILKTEYTPTACLWQDGVVEWIHLPHISPKVITPYDIFCTQLIIKGRHRSKELFSKDPDYIVVPYTKVQFDLLLQEKEDWPISLLGFLGEVHFHLPKDPLLTFTLQTAIIFPHMTSTTPLEKGIVIFTDGSANGRSVTYIQGREPIIKENTQNTAQQAEIVAVITAFEEVSQPFNLYTDSKYVTGLFPEIETATLSPRTKIYTELKHLQRLIHKRQEKFYIGHIRGHTGLPGPLAQGNAYADSLTRILTAGKRTADGSEFEKRTADGSEFESPKKKAKVE

SEQ ID NO: 6188 - protein, 2102 aa, synthetic construct
MPAAKRVKLDGGDKKYSIGLDIGTNSVGWAVITDEYKVPSKKFKVLGNTDRHSIKKNLIGALLFDSGETAEATRLKRTARRRYTRRKNRICYLQEIFSNEMAKVDDSFFHRLEESFLVEEDKKHERHPIFGNIVDEVAYHEKYPTIYHLRKKLVDSTDKADLRLIYLALAHMIKFRGHFLIEGDLNPDNSDVDKLFIQLVQTYNQLFEENPINASGVDAKAILSARLSKSRRLENLIAQLPGEKKNGLFGNLIALSLGLTPNFKSNFDLAEDAKLQLSKDTYDDDLDNLLAQIGDQYADLFLAAKNLSDAILLSDILRVNTEITKAPLSASMIKRYDEHHQDLTLLKALVRQQLPEKYKEIFFDQSKNGYAGYIDGGASQEEFYKFIKPILEKMDGTEELLVKLNREDLLRKQRTFDNGSIPHQIHLGELHAILRRQEDFYPFLKDNREKIEKILTFRIPYYVGPLARGNSRFAWMTRKSEETITPWNFEEVVDKGASAQSFIERMTNFDKNLPNEKVLPKHSLLYEYFTVYNELTKVKYVTEGMRKPAFLSGEQKKAIVDLLFKTNRKVTVKQLKEDYFKKIECFDSVEISGVEDRFNASLGTYHDLLKIIKDKDFLDNEENEDILEDIVLTLTLFEDREMIEERLKTYAHLFDDKVMKQLKRRRYTGWGRLSRKLINGIRDKQSGKTILDFLKSDGFANRNFMQLIHDDSLTFKEDIQKAQVSGQGDSLHEHIANLAGSPAIKKGILQTVKVVDELVKVMGRHKPENIVIEMARENQTTQKGQKNSRERMKRIEEGIKELGSQILKEHPVENTQLQNEKLYLYYLQNGRDMYVDQELDINRLSDYDVDHIVPQSFLKDDSIDNKVLTRSDKARGKSDNVPSEEVVKKMKNYWRQLLNAKLITQRKFDNLTKAERGGLSELDKAGFIKRQLVETRQITKHVAQILDSRMNTKYDENDKLIREVKVITLKSKLVSDFRKDFQFYKVREINNYHHAHDAYLNAVVGTALIKKYPKLESEFVYGDYKVYDVRKMIAKSEQEIGKATAKYFFYSNIMNFFKTEITLANGEIRKRPLIETNGETGEIVWDKGRDFATVRKVLSMPQVNIVKKTEVQTGGFSKESILPKRNSDKLIARKKDWDPKKYGGFDSPTVAYSVLVVAKVEKGKSKKLKSVKELLGITIMERSSFEKNPIDFLEAKGYKEVKKDLIIKLPKYSLFELENGRKRMLASAGELQKGNELALPSKYVNFLYLASHYEKLKGSPEDNEQKQLFVEQHKHYLDEIIEQISEFSKRVILADANLDKVLSAYNKHRDKPIREQAENIIHLFTLTNLGAPAAFKYFDTTIDRKRYTSTKEVLDATLIHQSITGLYETRIDLSQLGGDGGGGGGSGGGGSGGGGSGGGGSGGGGSGGLDDEYRLYSPLVKPDQNIQFWLEQFPQAWAETAGMGLAKQVPPQVIQLKASATPVSVRQYPLSKEAQEGIRPHVQRLIQQGILVPVQSPWNTPLLPVRKPGTNDYRPVQDLREVNKRVQDIHPTVPNPYNLLCALPPQRSWYTVLDLKDAFFCLRLHPTSQPLFAFEWRDPGTGRTGQLTWTRLPQGFKNSPTIFNEALHRDLANFRIQHPQVTLLQYVDDLLLAGATKQDCLEGTKALLLELSDLGYRASAKKAQICRREVTYLGYSLRDGQRWLTEARKKTVVQIPAPTTAKQVREFLGKAGFCRLFIPGFATLAAPLYPLTKPKGEFSWAPEHQKAFDAIKKALLSAPALALPDVTKPFTLYVDERKGVARGVLTQTLGPWRRPVAYLSKKLDPVASGWPVCLKAIAAVAILVKDADKLTLGQNITVIAPHALENIVRQPPDRWMTNARMTHYQSLLLTERVTFAPPAALNPATLLPEETDEPVTHDCHQLLIEETGVRKDLTDIPLTGEVLTWFTDGSSYVVEGKRMAGAAVVDGTRTIWASSLPEGTSAQKAELMALTQALRLAEGKSINIYTDSRYAFATAHVHGAIYKQRGWLTSAGREIKNKEEILSLLEALHLPKRLAIIHCPGHQKAKDPISRGNQMADRVAKQAAQGVNLLPAGKRTADGSEFEKRTADGSEFESPKKKAKVE

SEQ ID NO: 6189 - protein, 2104 aa, synthetic construct
MPAAKRVKLDGGDKKYSIGLDIGTNSVGWAVITDEYKVPSKKFKVLGNTDRHSIKKNLIGALLFDSGETAEATRLKRTARRRYTRRKNRICYLQEIFSNEMAKVDDSFFHRLEESFLVEEDKKHERHPIFGNIVDEVAYHEKYPTIYHLRKKLVDSTDKADLRLIYLALAHMIKFRGHFLIEGDLNPDNSDVDKLFIQLVQTYNQLFEENPINASGVDAKAILSARLSKSRRLENLIAQLPGEKKNGLFGNLIALSLGLTPNFKSNFDLAEDAKLQLSKDTYDDDLDNLLAQIGDQYADLFLAAKNLSDAILLSDILRVNTEITKAPLSASMIKRYDEHHQDLTLLKALVRQQLPEKYKEIFFDQSKNGYAGYIDGGASQEEFYKFIKPILEKMDGTEELLVKLNREDLLRKQRTFDNGSIPHQIHLGELHAILRRQEDFYPFLKDNREKIEKILTFRIPYYVGPLARGNSRFAWMTRKSEETITPWNFEEVVDKGASAQSFIERMTNFDKNLPNEKVLPKHSLLYEYFTVYNELTKVKYVTEGMRKPAFLSGEQKKAIVDLLFKTNRKVTVKQLKEDYFKKIECFDSVEISGVEDRFNASLGTYHDLLKIIKDKDFLDNEENEDILEDIVLTLTLFEDREMIEERLKTYAHLFDDKVMKQLKRRRYTGWGRLSRKLINGIRDKQSGKTILDFLKSDGFANRNFMQLIHDDSLTFKEDIQKAQVSGQGDSLHEHIANLAGSPAIKKGILQTVKVVDELVKVMGRHKPENIVIEMARENQTTQKGQKNSRERMKRIEEGIKELGSQILKEHPVENTQLQNEKLYLYYLQNGRDMYVDQELDINRLSDYDVDHIVPQSFLKDDSIDNKVLTRSDKARGKSDNVPSEEVVKKMKNYWRQLLNAKLITQRKFDNLTKAERGGLSELDKAGFIKRQLVETRQITKHVAQILDSRMNTKYDENDKLIREVKVITLKSKLVSDFRKDFQFYKVREINNYHHAHDAYLNAVVGTALIKKYPKLESEFVYGDYKVYDVRKMIAKSEQEIGKATAKYFFYSNIMNFFKTEITLANGEIRKRPLIETNGETGEIVWDKGRDFATVRKVLSMPQVNIVKKTEVQTGGFSKESILPKRNSDKLIARKKDWDPKKYGGFDSPTVAYSVLVVAKVEKGKSKKLKSVKELLGITIMERSSFEKNPIDFLEAKGYKEVKKDLIIKLPKYSLFELENGRKRMLASAGELQKGNELALPSKYVNFLYLASHYEKLKGSPEDNEQKQLFVEQHKHYLDEIIEQISEFSKRVILADANLDKVLSAYNKHRDKPIREQAENIIHLFTLTNLGAPAAFKYFDTTIDRKRYTSTKEVLDATLIHQSITGLYETRIDLSQLGGDGGGGGGSGGGGSGGGGSGGGGSGGGGSGGTLQLDDEYRLYSPLVKPDQNIQFWLEQFPQAWAETAGMGLAKQVPPQVIQLKASATPVSVRQYPLSKEAQEGIRPHVQRLIQQGILVPVQSPWNTPLLPVRKPGTNDYRPVQDLREVNKRVQDIHPTVPNPYNLLCALPPQRSWYTVLDLKDAFFCLRLHPTSQPLFAFEWRDPGTGRTGQLTWTRLPQGFKNSPTIFDEALHRDLANFRIQHPQVTLLQYVDDLLLAGATKQDCLEGTKALLLELSDLGYRASAKKAQICRREVTYLGYSLRDGQRWLTEARKKTVVQIPAPTTAKQVREFLGTAGFCRLWIPGFATLAAPLYPLTKEKGEFSWAPEHQKAFDAIKKALLSAPALALPDVTKPFTLYVDERKGVARGVLTQTLGPWRRPVAYLSKKLDPVASGWPVCLKAIAAVAILVKDADKLTLGQNITVIAPHALENIVRQPPDRWMTNARMTHYQSLLLTERVTFAPPAALNPATLLPEETDEPVTHDCHQLLIEETGVRKDLTDIPLTGEVLTWFTDGSSYVVEGKRMAGAAVVDGTRTIWASSLPEGTSAQKAELMALTQALRLAEGKSINIYTDSRYAFATAHVHGAIYKQRGLLTSAGREIKNKEEILSLLEALHLPKRLAIIHCPGHQKAKDPISRGNQMADRVAKQAAQGVNLLAGKRTADGSEFEKRTADGSEFESPKKKAKVE

SEQ ID NO: 6190 - protein, 2104 aa, synthetic construct
MPAAKRVKLDGGDKKYSIGLDIGTNSVGWAVITDEYKVPSKKFKVLGNTDRHSIKKNLIGALLFDSGETAEATRLKRTARRRYTRRKNRICYLQEIFSNEMAKVDDSFFHRLEESFLVEEDKKHERHPIFGNIVDEVAYHEKYPTIYHLRKKLVDSTDKADLRLIYLALAHMIKFRGHFLIEGDLNPDNSDVDKLFIQLVQTYNQLFEENPINASGVDAKAILSARLSKSRRLENLIAQLPGEKKNGLFGNLIALSLGLTPNFKSNFDLAEDAKLQLSKDTYDDDLDNLLAQIGDQYADLFLAAKNLSDAILLSDILRVNTEITKAPLSASMIKRYDEHHQDLTLLKALVRQQLPEKYKEIFFDQSKNGYAGYIDGGASQEEFYKFIKPILEKMDGTEELLVKLNREDLLRKQRTFDNGSIPHQIHLGELHAILRRQEDFYPFLKDNREKIEKILTFRIPYYVGPLARGNSRFAWMTRKSEETITPWNFEEVVDKGASAQSFIERMTNFDKNLPNEKVLPKHSLLYEYFTVYNELTKVKYVTEGMRKPAFLSGEQKKAIVDLLFKTNRKVTVKQLKEDYFKKIECFDSVEISGVEDRFNASLGTYHDLLKIIKDKDFLDNEENEDILEDIVLTLTLFEDREMIEERLKTYAHLFDDKVMKQLKRRRYTGWGRLSRKLINGIRDKQSGKTILDFLKSDGFANRNFMQLIHDDSLTFKEDIQKAQVSGQGDSLHEHIANLAGSPAIKKGILQTVKVVDELVKVMGRHKPENIVIEMARENQTTQKGQKNSRERMKRIEEGIKELGSQILKEHPVENTQLQNEKLYLYYLQNGRDMYVDQELDINRLSDYDVDHIVPQSFLKDDSIDNKVLTRSDKARGKSDNVPSEEVVKKMKNYWRQLLNAKLITQRKFDNLTKAERGGLSELDKAGFIKRQLVETRQITKHVAQILDSRMNTKYDENDKLIREVKVITLKSKLVSDFRKDFQFYKVREINNYHHAHDAYLNAVVGTALIKKYPKLESEFVYGDYKVYDVRKMIAKSEQEIGKATAKYFFYSNIMNFFKTEITLANGEIRKRPLIETNGETGEIVWDKGRDFATVRKVLSMPQVNIVKKTEVQTGGFSKESILPKRNSDKLIARKKDWDPKKYGGFDSPTVAYSVLVVAKVEKGKSKKLKSVKELLGITIMERSSFEKNPIDFLEAKGYKEVKKDLIIKLPKYSLFELENGRKRMLASAGELQKGNELALPSKYVNFLYLASHYEKLKGSPEDNEQKQLFVEQHKHYLDEIIEQISEFSKRVILADANLDKVLSAYNKHRDKPIREQAENIIHLFTLTNLGAPAAFKYFDTTIDRKRYTSTKEVLDATLIHQSITGLYETRIDLSQLGGDGGGGGGSGGGGSGGGGSGGGGSGGGGSGGTLQLDDEYRLYSPLVKPDQNIQFWLEQFPQAWAETAGMGLAKQVPPQVIQLKASATPVSVRQYPLSKEAQEGIRPHVQRLIQQGILVPVQSPWNTPLLPVRKPGTNDYRPVQDLREVNKRVQDIHPTVPNPYNLLCALPPQRSWYTVLDLKDAFFCLRLHPTSQPLFAFEWRDPGTGRTGQLTWTRLPQGFKNSPTIFNEALHRDLANFRIQHPQVTLLQYVDDLLLAGATKQDCLEGTKALLLELSDLGYRASAKKAQICRREVTYLGYSLRDGQRWLTEARKKTVVQIPAPTTAKQVREFLGTAGFCRLWIPGFATLAAPLYPLTKPKGEFSWAPEHQKAFDAIKKALLSAPALALPDVTKPFTLYVDERKGVARGVLTQTLGPWRRPVAYLSKKLDPVASGWPVCLKAIAAVAILVKDADKLTLGQNITVIAPHALENIVRQPPDRWMTNARMTHYQSLLLTERVTFAPPAALNPATLLPEETDEPVTHDCHQLLIEETGVRKDLTDIPLTGEVLTWFTDGSSYVVEGKRMAGAAVVDGTRTIWASSLPEGTSAQKAELMALTQALRLAEGKSINIYTDSRYAFATAHVHGAIYKQRGWLTSAGREIKNKEEILSLLEALHLPKRLAIIHCPGHQKAKDPISRGNQMADRVAKQAAQGVNLLAGKRTADGSEFEKRTADGSEFESPKKKAKVE

SEQ ID NO: 6191 - protein, 2190 aa, synthetic construct
MPAAKRVKLDGGDKKYSIGLDIGTNSVGWAVITDEYKVPSKKFKVLGNTDRHSIKKNLIGALLFDSGETAEATRLKRTARRRYTRRKNRICYLQEIFSNEMAKVDDSFFHRLEESFLVEEDKKHERHPIFGNIVDEVAYHEKYPTIYHLRKKLVDSTDKADLRLIYLALAHMIKFRGHFLIEGDLNPDNSDVDKLFIQLVQTYNQLFEENPINASGVDAKAILSARLSKSRRLENLIAQLPGEKKNGLFGNLIALSLGLTPNFKSNFDLAEDAKLQLSKDTYDDDLDNLLAQIGDQYADLFLAAKNLSDAILLSDILRVNTEITKAPLSASMIKRYDEHHQDLTLLKALVRQQLPEKYKEIFFDQSKNGYAGYIDGGASQEEFYKFIKPILEKMDGTEELLVKLNREDLLRKQRTFDNGSIPHQIHLGELHAILRRQEDFYPFLKDNREKIEKILTFRIPYYVGPLARGNSRFAWMTRKSEETITPWNFEEVVDKGASAQSFIERMTNFDKNLPNEKVLPKHSLLYEYFTVYNELTKVKYVTEGMRKPAFLSGEQKKAIVDLLFKTNRKVTVKQLKEDYFKKIECFDSVEISGVEDRFNASLGTYHDLLKIIKDKDFLDNEENEDILEDIVLTLTLFEDREMIEERLKTYAHLFDDKVMKQLKRRRYTGWGRLSRKLINGIRDKQSGKTILDFLKSDGFANRNFMQLIHDDSLTFKEDIQKAQVSGQGDSLHEHIANLAGSPAIKKGILQTVKVVDELVKVMGRHKPENIVIEMARENQTTQKGQKNSRERMKRIEEGIKELGSQILKEHPVENTQLQNEKLYLYYLQNGRDMYVDQELDINRLSDYDVDHIVPQSFLKDDSIDNKVLTRSDKARGKSDNVPSEEVVKKMKNYWRQLLNAKLITQRKFDNLTKAERGGLSELDKAGFIKRQLVETRQITKHVAQILDSRMNTKYDENDKLIREVKVITLKSKLVSDFRKDFQFYKVREINNYHHAHDAYLNAVVGTALIKKYPKLESEFVYGDYKVYDVRKMIAKSEQEIGKATAKYFFYSNIMNFFKTEITLANGEIRKRPLIETNGETGEIVWDKGRDFATVRKVLSMPQVNIVKKTEVQTGGFSKESILPKRNSDKLIARKKDWDPKKYGGFDSPTVAYSVLVVAKVEKGKSKKLKSVKELLGITIMERSSFEKNPIDFLEAKGYKEVKKDLIIKLPKYSLFELENGRKRMLASAGELQKGNELALPSKYVNFLYLASHYEKLKGSPEDNEQKQLFVEQHKHYLDEIIEQISEFSKRVILADANLDKVLSAYNKHRDKPIREQAENIIHLFTLTNLGAPAAFKYFDTTIDRKRYTSTKEVLDATLIHQSITGLYETRIDLSQLGGDGGGGGGSGGGGSGGGGSGGGGSGGGGSGGMDPLQLLQPLEAEIKGTKLKAHWNSGATITCVPEAFLEDERPIQTMLIKTIHGEKQQDVYYLTFKVQGRKVEAEVLASPYDYILLNPSDVPWLMKKPLQLTVLVPLHEYQERLLQQTALPKEQKELLQKLFLKYDALWQHWENQVGHRRIKPHNIATGTLAPRPQKQYPINPKAKPSIQIVIDDLLKQGVLIQQNSTMNTPVYPVPKPDGKWRMVLDYREVNKTIPLIAAQNQHSAGILSSIYRGKYKTTLDLTNGFWAHPITPESYWLTAFTWQGKQYCWTRLPQGFLNSPALFTADVVDLLKEIPNVQAYVDDIYISHDDPQEHLEQLEKIFSILLNAGYVVSLKKSEIAQREVEFLGFNITKEGRGLTDTFKQKLLNITPPKDLKQLQSILGLLNFARNFIPNYSELVKPLYTIVANANGKFISWTEDNSNQLQHIISVLNQADNLEERNPETRLIIKVNSSPSAGYIRYYNEGSKRPIMYVNYIFSKAEAKFTQTEKLLTTMHKGLIKAMDLAMGQEILVYSPIVSMTKIQRTPLPERKALPVRWITWMTYLEDPRIQFHYDKSLPELQQIPNVTEDVIAKTKHPSEFAMVFYTDGSAIKHPDVNKSHSAGMGIAQVQFIPEYKIVHQWSIPLGDHTAQLAEIAAVEFACKKALKISGPVLIVTDSFYVAESANKELPYWKSNGFLNNKKKPLRHVSKWKSIAECLQLKPDIIIMHEKGHQQPMTTLHTEGNNLADKLATQGSYVVHAGKRTADGSEFEKRTADGSEFESPKKKAKVE

SEQ ID NO: 6192 - protein, 2101 aa, synthetic construct
MPAAKRVKLDGGDKKYSIGLDIGTNSVGWAVITDEYKVPSKKFKVLGNTDRHSIKKNLIGALLFDSGETAEATRLKRTARRRYTRRKNRICYLQEIFSNEMAKVDDSFFHRLEESFLVEEDKKHERHPIFGNIVDEVAYHEKYPTIYHLRKKLVDSTDKADLRLIYLALAHMIKFRGHFLIEGDLNPDNSDVDKLFIQLVQTYNQLFEENPINASGVDAKAILSARLSKSRRLENLIAQLPGEKKNGLFGNLIALSLGLTPNFKSNFDLAEDAKLQLSKDTYDDDLDNLLAQIGDQYADLFLAAKNLSDAILLSDILRVNTEITKAPLSASMIKRYDEHHQDLTLLKALVRQQLPEKYKEIFFDQSKNGYAGYIDGGASQEEFYKFIKPILEKMDGTEELLVKLNREDLLRKQRTFDNGSIPHQIHLGELHAILRRQEDFYPFLKDNREKIEKILTFRIPYYVGPLARGNSRFAWMTRKSEETITPWNFEEVVDKGASAQSFIERMTNFDKNLPNEKVLPKHSLLYEYFTVYNELTKVKYVTEGMRKPAFLSGEQKKAIVDLLFKTNRKVTVKQLKEDYFKKIECFDSVEISGVEDRFNASLGTYHDLLKIIKDKDFLDNEENEDILEDIVLTLTLFEDREMIEERLKTYAHLFDDKVMKQLKRRRYTGWGRLSRKLINGIRDKQSGKTILDFLKSDGFANRNFMQLIHDDSLTFKEDIQKAQVSGQGDSLHEHIANLAGSPAIKKGILQTVKVVDELVKVMGRHKPENIVIEMARENQTTQKGQKNSRERMKRIEEGIKELGSQILKEHPVENTQLQNEKLYLYYLQNGRDMYVDQELDINRLSDYDVDHIVPQSFLKDDSIDNKVLTRSDKARGKSDNVPSEEVVKKMKNYWRQLLNAKLITQRKFDNLTKAERGGLSELDKAGFIKRQLVETRQITKHVAQILDSRMNTKYDENDKLIREVKVITLKSKLVSDFRKDFQFYKVREINNYHHAHDAYLNAVVGTALIKKYPKLESEFVYGDYKVYDVRKMIAKSEQEIGKATAKYFFYSNIMNFFKTEITLANGEIRKRPLIETNGETGEIVWDKGRDFATVRKVLSMPQVNIVKKTEVQTGGFSKESILPKRNSDKLIARKKDWDPKKYGGFDSPTVAYSVLVVAKVEKGKSKKLKSVKELLGITIMERSSFEKNPIDFLEAKGYKEVKKDLIIKLPKYSLFELENGRKRMLASAGELQKGNELALPSKYVNFLYLASHYEKLKGSPEDNEQKQLFVEQHKHYLDEIIEQISEFSKRVILADANLDKVLSAYNKHRDKPIREQAENIIHLFTLTNLGAPAAFKYFDTTIDRKRYTSTKEVLDATLIHQSITGLYETRIDLSQLGGDGGGGGGSGGGGSGGGGSGGGGSGGGGSGGVPWLMKKPLQLTVLVPLHEYQERLLQQTALPKEQKELLQKLFLKYDALWQHWENQVGHRRIKPHNIATGTLAPRPQKQYPINPKAKPSIQIVIDDLLKQGVLIQQNSTMNTPVYPVPKPDGKWRMVLDYREVNKTIPLIAAQNQHSAGILSSIYRGKYKTTLDLTNGFWAHPITPESYWLTAFTWQGKQYCWTRLPQGFLNSPALFNADVVDLLKEIPNVQAYVDDIYISHDDPQEHLEQLEKIFSILLNAGYVVSLKKSEIAQREVEFLGFNITKEGRGLTDTFKQKLLNITPPKDLKQLQSILGKLNFARNFIPNYSELVKPLYTIVAPANGKFISWTEDNSNQLQHIISVLNQADNLEERNPETRLIIKVNSSPSAGYIRYYNEGSKRPIMYVNYIFSKAEAKFTQTEKLLTTMHKGLIKAMDLAMGQEILVYSPIVSMTKIQRTPLPERKALPVRWITWMTYLEDPRIQFHYDKSLPELQQIPNVTEDVIAKTKHPSEFAMVFYTDGSAIKHPDVNKSHSAGMGIAQVQFIPEYKIVHQWSIPLGDHTAQLAEIAAVEFACKKALKISGPVLIVTDSFYVAESANKELPYWKSNGFLNNKKKPLRHVSKWKSIAECLQLKPDIIIMHEKGHQQPMTTLHTEGNNLADKLATQGSYVVHAGKRTADGSEFEKRTADGSEFESPKKKAKVE

SEQ ID NO: 6193 - protein, 2190 aa, synthetic construct
MPAAKRVKLDGGDKKYSIGLDIGTNSVGWAVITDEYKVPSKKFKVLGNTDRHSIKKNLIGALLFDSGETAEATRLKRTARRRYTRRKNRICYLQEIFSNEMAKVDDSFFHRLEESFLVEEDKKHERHPIFGNIVDEVAYHEKYPTIYHLRKKLVDSTDKADLRLIYLALAHMIKFRGHFLIEGDLNPDNSDVDKLFIQLVQTYNQLFEENPINASGVDAKAILSARLSKSRRLENLIAQLPGEKKNGLFGNLIALSLGLTPNFKSNFDLAEDAKLQLSKDTYDDDLDNLLAQIGDQYADLFLAAKNLSDAILLSDILRVNTEITKAPLSASMIKRYDEHHQDLTLLKALVRQQLPEKYKEIFFDQSKNGYAGYIDGGASQEEFYKFIKPILEKMDGTEELLVKLNREDLLRKQRTFDNGSIPHQIHLGELHAILRRQEDFYPFLKDNREKIEKILTFRIPYYVGPLARGNSRFAWMTRKSEETITPWNFEEVVDKGASAQSFIERMTNFDKNLPNEKVLPKHSLLYEYFTVYNELTKVKYVTEGMRKPAFLSGEQKKAIVDLLFKTNRKVTVKQLKEDYFKKIECFDSVEISGVEDRFNASLGTYHDLLKIIKDKDFLDNEENEDILEDIVLTLTLFEDREMIEERLKTYAHLFDDKVMKQLKRRRYTGWGRLSRKLINGIRDKQSGKTILDFLKSDGFANRNFMQLIHDDSLTFKEDIQKAQVSGQGDSLHEHIANLAGSPAIKKGILQTVKVVDELVKVMGRHKPENIVIEMARENQTTQKGQKNSRERMKRIEEGIKELGSQILKEHPVENTQLQNEKLYLYYLQNGRDMYVDQELDINRLSDYDVDHIVPQSFLKDDSIDNKVLTRSDKARGKSDNVPSEEVVKKMKNYWRQLLNAKLITQRKFDNLTKAERGGLSELDKAGFIKRQLVETRQITKHVAQILDSRMNTKYDENDKLIREVKVITLKSKLVSDFRKDFQFYKVREINNYHHAHDAYLNAVVGTALIKKYPKLESEFVYGDYKVYDVRKMIAKSEQEIGKATAKYFFYSNIMNFFKTEITLANGEIRKRPLIETNGETGEIVWDKGRDFATVRKVLSMPQVNIVKKTEVQTGGFSKESILPKRNSDKLIARKKDWDPKKYGGFDSPTVAYSVLVVAKVEKGKSKKLKSVKELLGITIMERSSFEKNPIDFLEAKGYKEVKKDLIIKLPKYSLFELENGRKRMLASAGELQKGNELALPSKYVNFLYLASHYEKLKGSPEDNEQKQLFVEQHKHYLDEIIEQISEFSKRVILADANLDKVLSAYNKHRDKPIREQAENIIHLFTLTNLGAPAAFKYFDTTIDRKRYTSTKEVLDATLIHQSITGLYETRIDLSQLGGDGGGGGGSGGGGSGGGGSGGGGSGGGGSGGMDPLQLLQPLEAEIKGTKLKAHWNSGATITCVPEAFLEDERPIQTMLIKTIHGEKQQDVYYLTFKVQGRKVEAEVLASPYDYILLNPSDVPWLMKKPLQLTVLVPLHEYQERLLQQTALPKEQKELLQKLFLKYDALWQHWENQVGHRRIKPHNIATGTLAPRPQKQYPINPKAKPSIQIVIDDLLKQGVLIQQNSTMNTPVYPVPKPDGKWRMVLDYREVNKTIPLIAAQNQHSAGILSSIYRGKYKTTLDLTNGFWAHPITPESYWLTAFTWQGKQYCWTRLPQGFLNSPALFNADVVDLLKEIPNVQAYVDDIYISHDDPQEHLEQLEKIFSILLNAGYVVSLKKSEIAQREVEFLGFNITKEGRGLTDTFKQKLLNITPPKDLKQLQSILGLLNFARNFIPNYSELVKPLYTIVAPANGKFISWTEDNSNQLQHIISVLNQADNLEERNPETRLIIKVNSSPSAGYIRYYNEGSKRPIMYVNYIFSKAEAKFTQTEKLLTTMHKGLIKAMDLAMGQEILVYSPIVSMTKIQRTPLPERKALPVRWITWMTYLEDPRIQFHYDKSLPELQQIPNVTEDVIAKTKHPSEFAMVFYTDGSAIKHPDVNKSHSAGMGIAQVQFIPEYKIVHQWSIPLGDHTAQLAEIAAVEFACKKALKISGPVLIVTDSFYVAESANKELPYWKSNGFLNNKKKPLRHVSKWKSIAECLQLKPDIIIMHEKGHQQPMTTLHTEGNNLADKLATQGSYVVHAGKRTADGSEFEKRTADGSEFESPKKKAKVE

SEQ ID NO: 6194 - protein, 2190 aa, synthetic construct
MPAAKRVKLDGGDKKYSIGLDIGTNSVGWAVITDEYKVPSKKFKVLGNTDRHSIKKNLIGALLFDSGETAEATRLKRTARRRYTRRKNRICYLQEIFSNEMAKVDDSFFHRLEESFLVEEDKKHERHPIFGNIVDEVAYHEKYPTIYHLRKKLVDSTDKADLRLIYLALAHMIKFRGHFLIEGDLNPDNSDVDKLFIQLVQTYNQLFEENPINASGVDAKAILSARLSKSRRLENLIAQLPGEKKNGLFGNLIALSLGLTPNFKSNFDLAEDAKLQLSKDTYDDDLDNLLAQIGDQYADLFLAAKNLSDAILLSDILRVNTEITKAPLSASMIKRYDEHHQDLTLLKALVRQQLPEKYKEIFFDQSKNGYAGYIDGGASQEEFYKFIKPILEKMDGTEELLVKLNREDLLRKQRTFDNGSIPHQIHLGELHAILRRQEDFYPFLKDNREKIEKILTFRIPYYVGPLARGNSRFAWMTRKSEETITPWNFEEVVDKGASAQSFIERMTNFDKNLPNEKVLPKHSLLYEYFTVYNELTKVKYVTEGMRKPAFLSGEQKKAIVDLLFKTNRKVTVKQLKEDYFKKIECFDSVEISGVEDRFNASLGTYHDLLKIIKDKDFLDNEENEDILEDIVLTLTLFEDREMIEERLKTYAHLFDDKVMKQLKRRRYTGWGRLSRKLINGIRDKQSGKTILDFLKSDGFANRNFMQLIHDDSLTFKEDIQKAQVSGQGDSLHEHIANLAGSPAIKKGILQTVKVVDELVKVMGRHKPENIVIEMARENQTTQKGQKNSRERMKRIEEGIKELGSQILKEHPVENTQLQNEKLYLYYLQNGRDMYVDQELDINRLSDYDVDHIVPQSFLKDDSIDNKVLTRSDKARGKSDNVPSEEVVKKMKNYWRQLLNAKLITQRKFDNLTKAERGGLSELDKAGFIKRQLVETRQITKHVAQILDSRMNTKYDENDKLIREVKVITLKSKLVSDFRKDFQFYKVREINNYHHAHDAYLNAVVGTALIKKYPKLESEFVYGDYKVYDVRKMIAKSEQEIGKATAKYFFYSNIMNFFKTEITLANGEIRKRPLIETNGETGEIVWDKGRDFATVRKVLSMPQVNIVKKTEVQTGGFSKESILPKRNSDKLIARKKDWDPKKYGGFDSPTVAYSVLVVAKVEKGKSKKLKSVKELLGITIMERSSFEKNPIDFLEAKGYKEVKKDLIIKLPKYSLFELENGRKRMLASAGELQKGNELALPSKYVNFLYLASHYEKLKGSPEDNEQKQLFVEQHKHYLDEIIEQISEFSKRVILADANLDKVLSAYNKHRDKPIREQAENIIHLFTLTNLGAPAAFKYFDTTIDRKRYTSTKEVLDATLIHQSITGLYETRIDLSQLGGDGGGGGGSGGGGSGGGGSGGGGSGGGGSGGMDPLQLLQPLEAEIKGTKLKAHWNSGATITCVPEAFLEDERPIQTMLIKTIHGEKQQDVYYLTFKVQGRKVEAEVLASPYDYILLNPSDVPWLMKKPLQLTVLVPLHEYQERLLQQTALPKEQKELLQKLFLKYDALWQHWENQVGHRRIKPHNIATGTLAPRPQKQYPINPKAKPSIQIVIDDLLKQGVLIQQNSTMNTPVYPVPKPDGKWRMVLDYREVNKTIPLIAAQNQHSAGILSSIYRGKYKTTLDLTNGFWAHPITPESYWLTAFTWQGKQYCWTRLPQGFLNSPALFNADVVDLLKEIPNVQAYVDDIYISHDDPQEHLEQLEKIFSILLNAGYVVSLKKSEIAQREVEFLGFNITKEGRGLTDTFKQKLLNITPPKDLKQLQSILGKLNFARNFIPNYSELVKPLYTIVAPANGKFISWTEDNSNQLQHIISVLNQADNLEERNPETRLIIKVNSSPSAGYIRYYNEGSKRPIMYVNYIFSKAEAKFTQTEKLLTTMHKGLIKAMDLAMGQEILVYSPIVSMTKIQRTPLPERKALPVRWITWMTYLEDPRIQFHYDKSLPELQQIPNVTEDVIAKTKHPSEFAMVFYTDGSAIKHPDVNKSHSAGMGIAQVQFIPEYKIVHQWSIPLGDHTAQLAEIAAVEFACKKALKISGPVLIVTDSFYVAESANKELPYWKSNGFLNNKKKPLRHVSKWKSIAECLQLKPDIIIMHEKGHQQPMTTLHTEGNNLADKLATQGSYVVHAGKRTADGSEFEKRTADGSEFESPKKKAKVE

SEQ ID NO: 6195 - protein, 2101 aa, synthetic construct
MPAAKRVKLDGGDKKYSIGLDIGTNSVGWAVITDEYKVPSKKFKVLGNTDRHSIKKNLIGALLFDSGETAEATRLKRTARRRYTRRKNRICYLQEIFSNEMAKVDDSFFHRLEESFLVEEDKKHERHPIFGNIVDEVAYHEKYPTIYHLRKKLVDSTDKADLRLIYLALAHMIKFRGHFLIEGDLNPDNSDVDKLFIQLVQTYNQLFEENPINASGVDAKAILSARLSKSRRLENLIAQLPGEKKNGLFGNLIALSLGLTPNFKSNFDLAEDAKLQLSKDTYDDDLDNLLAQIGDQYADLFLAAKNLSDAILLSDILRVNTEITKAPLSASMIKRYDEHHQDLTLLKALVRQQLPEKYKEIFFDQSKNGYAGYIDGGASQEEFYKFIKPILEKMDGTEELLVKLNREDLLRKQRTFDNGSIPHQIHLGELHAILRRQEDFYPFLKDNREKIEKILTFRIPYYVGPLARGNSRFAWMTRKSEETITPWNFEEVVDKGASAQSFIERMTNFDKNLPNEKVLPKHSLLYEYFTVYNELTKVKYVTEGMRKPAFLSGEQKKAIVDLLFKTNRKVTVKQLKEDYFKKIECFDSVEISGVEDRFNASLGTYHDLLKIIKDKDFLDNEENEDILEDIVLTLTLFEDREMIEERLKTYAHLFDDKVMKQLKRRRYTGWGRLSRKLINGIRDKQSGKTILDFLKSDGFANRNFMQLIHDDSLTFKEDIQKAQVSGQGDSLHEHIANLAGSPAIKKGILQTVKVVDELVKVMGRHKPENIVIEMARENQTTQKGQKNSRERMKRIEEGIKELGSQILKEHPVENTQLQNEKLYLYYLQNGRDMYVDQELDINRLSDYDVDHIVPQSFLKDDSIDNKVLTRSDKARGKSDNVPSEEVVKKMKNYWRQLLNAKLITQRKFDNLTKAERGGLSELDKAGFIKRQLVETRQITKHVAQILDSRMNTKYDENDKLIREVKVITLKSKLVSDFRKDFQFYKVREINNYHHAHDAYLNAVVGTALIKKYPKLESEFVYGDYKVYDVRKMIAKSEQEIGKATAKYFFYSNIMNFFKTEITLANGEIRKRPLIETNGETGEIVWDKGRDFATVRKVLSMPQVNIVKKTEVQTGGFSKESILPKRNSDKLIARKKDWDPKKYGGFDSPTVAYSVLVVAKVEKGKSKKLKSVKELLGITIMERSSFEKNPIDFLEAKGYKEVKKDLIIKLPKYSLFELENGRKRMLASAGELQKGNELALPSKYVNFLYLASHYEKLKGSPEDNEQKQLFVEQHKHYLDEIIEQISEFSKRVILADANLDKVLSAYNKHRDKPIREQAENIIHLFTLTNLGAPAAFKYFDTTIDRKRYTSTKEVLDATLIHQSITGLYETRIDLSQLGGDGGGGGGSGGGGSGGGGSGGGGSGGGGSGGIPWLMKKPLQLTTLVPLQEYEERLLKQTMLTGSYKEKLQSLFLKYDALWQHWENQVGHRRIKPHHIATGTVNPRPQKQYPINPKAKASIQTVINDLLKQGVLIQQNSIMNTPVYPVPKPDGKWRMVLDYREVNKTIPLIAAQNQHSAGILSSIFRGKYKTTLDLSNGFWAHSITPESYWLTAFTWLGQQYCWTRLPQGFLNSPALFNADVVDLLKEVPNVQVYVDDIYISHDDPREHLEQLEKVFSLLLNAGYVVSLKKSEIAQHEVEFLGFNITKEGRGLTETFKQKLLNITPPRDLKQLQSILGKLNFARNFIPNFSELVKPLYNIIATAPGKYITWTTDNSQQLQNIISMLNSAENLEERNPEVRLIMKVNTSPSAGYIRFYNEFAKRPIMYLNYVYTKAEVKFTNTEKLLTTIHKGLIKALDLGMGQEILVYSPIVSMTKIQKTPLPERKALPIRWITWMSYLEDPRIQFHYDKTLPELQQVPTVTDDIIAKIKHPSEFSMVFYTDGSAIKHPNVNKSHNAGMGIAQVQFKPEFTVINTWSIPLGDHTAQLAEVAAVEFACKKALKIDGPVLIVTDSFYVAESVNKELPYWQSNGFFNNKKKPLKHVSKWKSIADCIQLKPDIIIIHEKGHQPTASTFHTEGNNLADKLATQGSYVVNAGKRTADGSEFEKRTADGSEFESPKKKAKVE

SEQ ID NO: 6196 - protein, 2190 aa, synthetic construct
MPAAKRVKLDGGDKKYSIGLDIGTNSVGWAVITDEYKVPSKKFKVLGNTDRHSIKKNLIGALLFDSGETAEATRLKRTARRRYTRRKNRICYLQEIFSNEMAKVDDSFFHRLEESFLVEEDKKHERHPIFGNIVDEVAYHEKYPTIYHLRKKLVDSTDKADLRLIYLALAHMIKFRGHFLIEGDLNPDNSDVDKLFIQLVQTYNQLFEENPINASGVDAKAILSARLSKSRRLENLIAQLPGEKKNGLFGNLIALSLGLTPNFKSNFDLAEDAKLQLSKDTYDDDLDNLLAQIGDQYADLFLAAKNLSDAILLSDILRVNTEITKAPLSASMIKRYDEHHQDLTLLKALVRQQLPEKYKEIFFDQSKNGYAGYIDGGASQEEFYKFIKPILEKMDGTEELLVKLNREDLLRKQRTFDNGSIPHQIHLGELHAILRRQEDFYPFLKDNREKIEKILTFRIPYYVGPLARGNSRFAWMTRKSEETITPWNFEEVVDKGASAQSFIERMTNFDKNLPNEKVLPKHSLLYEYFTVYNELTKVKYVTEGMRKPAFLSGEQKKAIVDLLFKTNRKVTVKQLKEDYFKKIECFDSVEISGVEDRFNASLGTYHDLLKIIKDKDFLDNEENEDILEDIVLTLTLFEDREMIEERLKTYAHLFDDKVMKQLKRRRYTGWGRLSRKLINGIRDKQSGKTILDFLKSDGFANRNFMQLIHDDSLTFKEDIQKAQVSGQGDSLHEHIANLAGSPAIKKGILQTVKVVDELVKVMGRHKPENIVIEMARENQTTQKGQKNSRERMKRIEEGIKELGSQILKEHPVENTQLQNEKLYLYYLQNGRDMYVDQELDINRLSDYDVDHIVPQSFLKDDSIDNKVLTRSDKARGKSDNVPSEEVVKKMKNYWRQLLNAKLITQRKFDNLTKAERGGLSELDKAGFIKRQLVETRQITKHVAQILDSRMNTKYDENDKLIREVKVITLKSKLVSDFRKDFQFYKVREINNYHHAHDAYLNAVVGTALIKKYPKLESEFVYGDYKVYDVRKMIAKSEQEIGKATAKYFFYSNIMNFFKTEITLANGEIRKRPLIETNGETGEIVWDKGRDFATVRKVLSMPQVNIVKKTEVQTGGFSKESILPKRNSDKLIARKKDWDPKKYGGFDSPTVAYSVLVVAKVEKGKSKKLKSVKELLGITIMERSSFEKNPIDFLEAKGYKEVKKDLIIKLPKYSLFELENGRKRMLASAGELQKGNELALPSKYVNFLYLASHYEKLKGSPEDNEQKQLFVEQHKHYLDEIIEQISEFSKRVILADANLDKVLSAYNKHRDKPIREQAENIIHLFTLTNLGAPAAFKYFDTTIDRKRYTSTKEVLDATLIHQSITGLYETRIDLSQLGGDGGGGGGSGGGGSGGGGSGGGGSGGGGSGGMDPLQLLQPLEAEIKGTKLKAHWNSGATITCVPQAFLEEEVPIKNIWIKTIHGEKEQPVYYLTFKIQGRKVEAEVISSPYDYILVSPSDIPWLMKKPLQLTTLVPLQEYEERLLKQTMLTGSYKEKLQSLFLKYDALWQHWENQVGHRRIKPHHIATGTVNPRPQKQYPINPKAKASIQTVINDLLKQGVLIQQNSIMNTPVYPVPKPDGKWRMVLDYREVNKTIPLIAAQNQHSAGILSSIFRGKYKTTLDLSNGFWAHSITPESYWLTAFTWLGQQYCWTRLPQGFLNSPALFNADVVDLLKEVPNVQVYVDDIYISHDDPREHLEQLEKVFSLLLNAGYVVSLKKSEIAQHEVEFLGFNITKEGRGLTETFKQKLLNITPPRDLKQLQSILGLLNFARNFIPNFSELVKPLYNIIATAPGKYITWTTDNSQQLQNIISMLNSAENLEERNPEVRLIMKVNTSPSAGYIRFYNEFAKRPIMYLNYVYTKAEVKFTNTEKLLTTIHKGLIKALDLGMGQEILVYSPIVSMTKIQKTPLPERKALPIRWITWMSYLEDPRIQFHYDKTLPELQQVPTVTDDIIAKIKHPSEFSMVFYTDGSAIKHPNVNKSHNAGMGIAQVQFKPEFTVINTWSIPLGDHTAQLAEVAAVEFACKKALKIDGPVLIVTDSFYVAESVNKELPYWQSNGFFNNKKKPLKHVSKWKSIADCIQLKPDIIIIHEKGHQPTASTFHTEGNNLADKLATQGSYVVNAGKRTADGSEFEKRTADGSEFESPKKKAKVE

SEQ ID NO: 6197 - protein, 2190 aa, synthetic construct
MPAAKRVKLDGGDKKYSIGLDIGTNSVGWAVITDEYKVPSKKFKVLGNTDRHSIKKNLIGALLFDSGETAEATRLKRTARRRYTRRKNRICYLQEIFSNEMAKVDDSFFHRLEESFLVEEDKKHERHPIFGNIVDEVAYHEKYPTIYHLRKKLVDSTDKADLRLIYLALAHMIKFRGHFLIEGDLNPDNSDVDKLFIQLVQTYNQLFEENPINASGVDAKAILSARLSKSRRLENLIAQLPGEKKNGLFGNLIALSLGLTPNFKSNFDLAEDAKLQLSKDTYDDDLDNLLAQIGDQYADLFLAAKNLSDAILLSDILRVNTEITKAPLSASMIKRYDEHHQDLTLLKALVRQQLPEKYKEIFFDQSKNGYAGYIDGGASQEEFYKFIKPILEKMDGTEELLVKLNREDLLRKQRTFDNGSIPHQIHLGELHAILRRQEDFYPFLKDNREKIEKILTFRIPYYVGPLARGNSRFAWMTRKSEETITPWNFEEVVDKGASAQSFIERMTNFDKNLPNEKVLPKHSLLYEYFTVYNELTKVKYVTEGMRKPAFLSGEQKKAIVDLLFKTNRKVTVKQLKEDYFKKIECFDSVEISGVEDRFNASLGTYHDLLKIIKDKDFLDNEENEDILEDIVLTLTLFEDREMIEERLKTYAHLFDDKVMKQLKRRRYTGWGRLSRKLINGIRDKQSGKTILDFLKSDGFANRNFMQLIHDDSLTFKEDIQKAQVSGQGDSLHEHIANLAGSPAIKKGILQTVKVVDELVKVMGRHKPENIVIEMARENQTTQKGQKNSRERMKRIEEGIKELGSQILKEHPVENTQLQNEKLYLYYLQNGRDMYVDQELDINRLSDYDVDHIVPQSFLKDDSIDNKVLTRSDKARGKSDNVPSEEVVKKMKNYWRQLLNAKLITQRKFDNLTKAERGGLSELDKAGFIKRQLVETRQITKHVAQILDSRMNTKYDENDKLIREVKVITLKSKLVSDFRKDFQFYKVREINNYHHAHDAYLNAVVGTALIKKYPKLESEFVYGDYKVYDVRKMIAKSEQEIGKATAKYFFYSNIMNFFKTEITLANGEIRKRPLIETNGETGEIVWDKGRDFATVRKVLSMPQVNIVKKTEVQTGGFSKESILPKRNSDKLIARKKDWDPKKYGGFDSPTVAYSVLVVAKVEKGKSKKLKSVKELLGITIMERSSFEKNPIDFLEAKGYKEVKKDLIIKLPKYSLFELENGRKRMLASAGELQKGNELALPSKYVNFLYLASHYEKLKGSPEDNEQKQLFVEQHKHYLDEIIEQISEFSKRVILADANLDKVLSAYNKHRDKPIREQAENIIHLFTLTNLGAPAAFKYFDTTIDRKRYTSTKEVLDATLIHQSITGLYETRIDLSQLGGDGGGGGGSGGGGSGGGGSGGGGSGGGGSGGMDPLQLLQPLEAEIKGTKLKAHWNSGATITCVPQAFLEEEVPIKNIWIKTIHGEKEQPVYYLTFKIQGRKVEAEVISSPYDYILVSPSDIPWLMKKPLQLTTLVPLQEYEERLLKQTMLTGSYKEKLQSLFLKYDALWQHWENQVGHRRIKPHHIATGTVNPRPQKQYPINPKAKASIQTVINDLLKQGVLIQQNSIMNTPVYPVPKPDGKWRMVLDYREVNKTIPLIAAQNQHSAGILSSIFRGKYKTTLDLSNGFWAHSITPESYWLTAFTWLGQQYCWTRLPQGFLNSPALFNADVVDLLKEVPNVQVYVDDIYISHDDPREHLEQLEKVFSLLLNAGYVVSLKKSEIAQHEVEFLGFNITKEGRGLTETFKQKLLNITPPRDLKQLQSILGKLNFARNFIPNFSELVKPLYNIIATAPGKYITWTTDNSQQLQNIISMLNSAENLEERNPEVRLIMKVNTSPSAGYIRFYNEFAKRPIMYLNYVYTKAEVKFTNTEKLLTTIHKGLIKALDLGMGQEILVYSPIVSMTKIQKTPLPERKALPIRWITWMSYLEDPRIQFHYDKTLPELQQVPTVTDDIIAKIKHPSEFSMVFYTDGSAIKHPNVNKSHNAGMGIAQVQFKPEFTVINTWSIPLGDHTAQLAEVAAVEFACKKALKIDGPVLIVTDSFYVAESVNKELPYWQSNGFFNNKKKPLKHVSKWKSIADCIQLKPDIIIIHEKGHQPTASTFHTEGNNLADKLATQGSYVVNAGKRTADGSEFEKRTADGSEFESPKKKAKVE

SEQ ID NO: 6198 - protein, 2108 aa, synthetic construct
MPAAKRVKLDGGDKKYSIGLDIGTNSVGWAVITDEYKVPSKKFKVLGNTDRHSIKKNLIGALLFDSGETAEATRLKRTARRRYTRRKNRICYLQEIFSNEMAKVDDSFFHRLEESFLVEEDKKHERHPIFGNIVDEVAYHEKYPTIYHLRKKLVDSTDKADLRLIYLALAHMIKFRGHFLIEGDLNPDNSDVDKLFIQLVQTYNQLFEENPINASGVDAKAILSARLSKSRRLENLIAQLPGEKKNGLFGNLIALSLGLTPNFKSNFDLAEDAKLQLSKDTYDDDLDNLLAQIGDQYADLFLAAKNLSDAILLSDILRVNTEITKAPLSASMIKRYDEHHQDLTLLKALVRQQLPEKYKEIFFDQSKNGYAGYIDGGASQEEFYKFIKPILEKMDGTEELLVKLNREDLLRKQRTFDNGSIPHQIHLGELHAILRRQEDFYPFLKDNREKIEKILTFRIPYYVGPLARGNSRFAWMTRKSEETITPWNFEEVVDKGASAQSFIERMTNFDKNLPNEKVLPKHSLLYEYFTVYNELTKVKYVTEGMRKPAFLSGEQKKAIVDLLFKTNRKVTVKQLKEDYFKKIECFDSVEISGVEDRFNASLGTYHDLLKIIKDKDFLDNEENEDILEDIVLTLTLFEDREMIEERLKTYAHLFDDKVMKQLKRRRYTGWGRLSRKLINGIRDKQSGKTILDFLKSDGFANRNFMQLIHDDSLTFKEDIQKAQVSGQGDSLHEHIANLAGSPAIKKGILQTVKVVDELVKVMGRHKPENIVIEMARENQTTQKGQKNSRERMKRIEEGIKELGSQILKEHPVENTQLQNEKLYLYYLQNGRDMYVDQELDINRLSDYDVDHIVPQSFLKDDSIDNKVLTRSDKARGKSDNVPSEEVVKKMKNYWRQLLNAKLITQRKFDNLTKAERGGLSELDKAGFIKRQLVETRQITKHVAQILDSRMNTKYDENDKLIREVKVITLKSKLVSDFRKDFQFYKVREINNYHHAHDAYLNAVVGTALIKKYPKLESEFVYGDYKVYDVRKMIAKSEQEIGKATAKYFFYSNIMNFFKTEITLANGEIRKRPLIETNGETGEIVWDKGRDFATVRKVLSMPQVNIVKKTEVQTGGFSKESILPKRNSDKLIARKKDWDPKKYGGFDSPTVAYSVLVVAKVEKGKSKKLKSVKELLGITIMERSSFEKNPIDFLEAKGYKEVKKDLIIKLPKYSLFELENGRKRMLASAGELQKGNELALPSKYVNFLYLASHYEKLKGSPEDNEQKQLFVEQHKHYLDEIIEQISEFSKRVILADANLDKVLSAYNKHRDKPIREQAENIIHLFTLTNLGAPAAFKYFDTTIDRKRYTSTKEVLDATLIHQSITGLYETRIDLSQLGGDGGGGGGSGGGGSGGGGSGGGGSGGGGSGGVLNLEEEYRLHEKPVPSSIDPSWLQLFPTVWAERAGMGLANQVPPVVVELRSGASPVAVRQYPMSKEAREGIRPHIQRFLDLGVLVPCQSPWNTPLLPVKKPGTNDYRPVQDLREINKRVQDIHPTVPNPYNLLSSLPPSHTWYSVLDLKDAFFCLKLHPNSQPLFAFEWRDPEKGNTGQLTWTRLPQGFKNSPTLFNEALHRDLAPFRALNPQVVLLQYVDDLLVAAPTYRDCKEGTQKLLQELSKLGYRVSAKKAQLCQKEVTYLGYLLKEGKRWLTPARKATVMKIPPPTTPRQVREFLGTAGFCRLWIPGFASLAAPLYPLTKPSIPFIWTEEHQKAFDRIKEALLSAPALALPDLTKPFTLYVDERAGVARGVLTQTLGPWRRPVAYLSKKLDPVASGWPTCLKAVAAVALLLKDADKLTLGQNVTVIASHSLESIVRQPPDRWMTNARMTHYQSLLLNERVSFAPPAVLNPATLLPVESEATPVHRCSEILAEETGTRRDLKDQPLPGVPAWYTDGSSFIAEGKRRAGAAIVDGKRTVWASSLPEGTSAQKAELVALTQALRLAEGKDINIYTDSRYAFATAHIHGAIYKQRGWLTSAGKDIKNKEEILALLEAIHLPKRVAIIHCPGHQKGNDPVATGNRRADEAAKQAALSTRVLAETTKPAGKRTADGSEFEKRTADGSEFESPKKKAKVE

SEQ ID NO: 6199 - protein, 2110 aa, synthetic construct
MPAAKRVKLDGGDKKYSIGLDIGTNSVGWAVITDEYKVPSKKFKVLGNTDRHSIKKNLIGALLFDSGETAEATRLKRTARRRYTRRKNRICYLQEIFSNEMAKVDDSFFHRLEESFLVEEDKKHERHPIFGNIVDEVAYHEKYPTIYHLRKKLVDSTDKADLRLIYLALAHMIKFRGHFLIEGDLNPDNSDVDKLFIQLVQTYNQLFEENPINASGVDAKAILSARLSKSRRLENLIAQLPGEKKNGLFGNLIALSLGLTPNFKSNFDLAEDAKLQLSKDTYDDDLDNLLAQIGDQYADLFLAAKNLSDAILLSDILRVNTEITKAPLSASMIKRYDEHHQDLTLLKALVRQQLPEKYKEIFFDQSKNGYAGYIDGGASQEEFYKFIKPILEKMDGTEELLVKLNREDLLRKQRTFDNGSIPHQIHLGELHAILRRQEDFYPFLKDNREKIEKILTFRIPYYVGPLARGNSRFAWMTRKSEETITPWNFEEVVDKGASAQSFIERMTNFDKNLPNEKVLPKHSLLYEYFTVYNELTKVKYVTEGMRKPAFLSGEQKKAIVDLLFKTNRKVTVKQLKEDYFKKIECFDSVEISGVEDRFNASLGTYHDLLKIIKDKDFLDNEENEDILEDIVLTLTLFEDREMIEERLKTYAHLFDDKVMKQLKRRRYTGWGRLSRKLINGIRDKQSGKTILDFLKSDGFANRNFMQLIHDDSLTFKEDIQKAQVSGQGDSLHEHIANLAGSPAIKKGILQTVKVVDELVKVMGRHKPENIVIEMARENQTTQKGQKNSRERMKRIEEGIKELGSQILKEHPVENTQLQNEKLYLYYLQNGRDMYVDQELDINRLSDYDVDHIVPQSFLKDDSIDNKVLTRSDKARGKSDNVPSEEVVKKMKNYWRQLLNAKLITQRKFDNLTKAERGGLSELDKAGFIKRQLVETRQITKHVAQILDSRMNTKYDENDKLIREVKVITLKSKLVSDFRKDFQFYKVREINNYHHAHDAYLNAVVGTALIKKYPKLESEFVYGDYKVYDVRKMIAKSEQEIGKATAKYFFYSNIMNFFKTEITLANGEIRKRPLIETNGETGEIVWDKGRDFATVRKVLSMPQVNIVKKTEVQTGGFSKESILPKRNSDKLIARKKDWDPKKYGGFDSPTVAYSVLVVAKVEKGKSKKLKSVKELLGITIMERSSFEKNPIDFLEAKGYKEVKKDLIIKLPKYSLFELENGRKRMLASAGELQKGNELALPSKYVNFLYLASHYEKLKGSPEDNEQKQLFVEQHKHYLDEIIEQISEFSKRVILADANLDKVLSAYNKHRDKPIREQAENIIHLFTLTNLGAPAAFKYFDTTIDRKRYTSTKEVLDATLIHQSITGLYETRIDLSQLGGDGGGGGGSGGGGSGGGGSGGGGSGGGGSGGTLNIEDEYRLHETSKEPDVPLGSTWLSDFPQAWAETGGMGLAVRQAPLIIPLKATSTPVSIKQYPMSQEARLGIKPHIQRLLDQGILVPCQSPWNTPLLPVKKPGTNDYRPVQDLREVNKRVEDIHPTVPNPYNLLSGLPPSHQWYTVLDLKDAFFCLRLHPTSQPLFAFEWRDPEMGISGQLTWTRLPQGFKNSPTLFNEALHRDLADFRIQHPDLILLQYVDDLLLAATSEQDCQRGTRALLQTLGNLGYRASAKKAQICQKQVKYLGYLLKEGQRWLTEARKETVMGQPTPKTPRQLREFLGTAGFCRLWIPGFAEMAAPLYPLTKPGTLFNWGPDQQKAYQEIKQALLTAPALGLPDLTKPFELFVDEKQGYAKGVLTQKLGPWRRPVAYLSKKLDPVAAGWPPCLRMVAAIAVLTKDAGKLTMGQPLVILAPHAVEALVKQPPDRWLSNARMTHYQAMLLDTDRVQFGPVVALNPATLLPLPEKEAPHDCLEILAETHGTRPDLTDQPIPDADYTWYTDGSSFLQEGQRRAGAAVTTETEVIWARALPAGTSAQRAELIALTQALKMAEGKKLNVYTDSRYAFATAHVHGEIYRRRGWLTSEGREIKNKNEILALLKALFLPKRLSIIHCPGHQKGNSAEARGNRMADQAAREAAMKAVLETSTLLAGKRTADGSEFEKRTADGSEFESPKKKAKVE

SEQ ID NO: 6200 - protein, 2117 aa, synthetic construct
MPAAKRVKLDGGDKKYSIGLDIGTNSVGWAVITDEYKVPSKKFKVLGNTDRHSIKKNLIGALLFDSGETAEATRLKRTARRRYTRRKNRICYLQEIFSNEMAKVDDSFFHRLEESFLVEEDKKHERHPIFGNIVDEVAYHEKYPTIYHLRKKLVDSTDKADLRLIYLALAHMIKFRGHFLIEGDLNPDNSDVDKLFIQLVQTYNQLFEENPINASGVDAKAILSARLSKSRRLENLIAQLPGEKKNGLFGNLIALSLGLTPNFKSNFDLAEDAKLQLSKDTYDDDLDNLLAQIGDQYADLFLAAKNLSDAILLSDILRVNTEITKAPLSASMIKRYDEHHQDLTLLKALVRQQLPEKYKEIFFDQSKNGYAGYIDGGASQEEFYKFIKPILEKMDGTEELLVKLNREDLLRKQRTFDNGSIPHQIHLGELHAILRRQEDFYPFLKDNREKIEKILTFRIPYYVGPLARGNSRFAWMTRKSEETITPWNFEEVVDKGASAQSFIERMTNFDKNLPNEKVLPKHSLLYEYFTVYNELTKVKYVTEGMRKPAFLSGEQKKAIVDLLFKTNRKVTVKQLKEDYFKKIECFDSVEISGVEDRFNASLGTYHDLLKIIKDKDFLDNEENEDILEDIVLTLTLFEDREMIEERLKTYAHLFDDKVMKQLKRRRYTGWGRLSRKLINGIRDKQSGKTILDFLKSDGFANRNFMQLIHDDSLTFKEDIQKAQVSGQGDSLHEHIANLAGSPAIKKGILQTVKVVDELVKVMGRHKPENIVIEMARENQTTQKGQKNSRERMKRIEEGIKELGSQILKEHPVENTQLQNEKLYLYYLQNGRDMYVDQELDINRLSDYDVDHIVPQSFLKDDSIDNKVLTRSDKARGKSDNVPSEEVVKKMKNYWRQLLNAKLITQRKFDNLTKAERGGLSELDKAGFIKRQLVETRQITKHVAQILDSRMNTKYDENDKLIREVKVITLKSKLVSDFRKDFQFYKVREINNYHHAHDAYLNAVVGTALIKKYPKLESEFVYGDYKVYDVRKMIAKSEQEIGKATAKYFFYSNIMNFFKTEITLANGEIRKRPLIETNGETGEIVWDKGRDFATVRKVLSMPQVNIVKKTEVQTGGFSKESILPKRNSDKLIARKKDWDPKKYGGFDSPTVAYSVLVVAKVEKGKSKKLKSVKELLGITIMERSSFEKNPIDFLEAKGYKEVKKDLIIKLPKYSLFELENGRKRMLASAGELQKGNELALPSKYVNFLYLASHYEKLKGSPEDNEQKQLFVEQHKHYLDEIIEQISEFSKRVILADANLDKVLSAYNKHRDKPIREQAENIIHLFTLTNLGAPAAFKYFDTTIDRKRYTSTKEVLDATLIHQSITGLYETRIDLSQLGGDGGGGGGSGGGGSGGGGSGGGGSGGGGSGGGGSGGTAPLEEEYRLFLEAPIQNVTLLEQWKREIPKVWAEINPPGLASTQAPIHVQLLSTALPVRVRQYPITLEAKRSLRETIRKFRAAGILRPVHSPWNTPLLPVRKSGTSEYRMVQDLREVNKRVETIHPTVPNPYTLLSLLPPDRIWYSVLDLKDAFFCIPLAPESQLIFAFEWADAEEGESGQLTWTRLPQGFKNSPTLFDEALNRDLQGFRLDHPSVSLLQYVDDLLIAADTQAACLSATRDLLMTLAELGYRVSGKKAQLCQEEVTYLGFKIHKGSRSLSNSRTQAILQIPVPKTKRQVREFLGTIGYCRLWIPGFAELAQPLYAATRGGNDPLVWGEKEEEAFQSLKLALTQPPALALPSLDKPFQLFVEETSGAAKGVLTQALGPWKRPVAYLSKRLDPVAAGWPRCLRAIAAAALLTREASKLTFGQDIEITSSHNLESLLRSPPDKWLTNARITQYQVLLLDPPRVRFKQTAALNPATLLPETDDTLPIHHCLDTLDSLTSTRPDLTDQPLAQAEATLFTDGSSYIRDGKRYAGAAVVTLDSVIWAEPLPIGTSAQKAELIALTKALEWSKDKSVNIYTDSRYAFATLHVHGMIYRERGLLTAGGKAIKNAPEILALLTAVWLPKRVAVMHCKGHQKDDAPTSTGNRRADEVAREVAIRPLSTQATISAGKRTADGSEFEKRTADGSEFESPKKKAKVE

SEQ ID NO: 6201 - protein, 2117 aa, synthetic construct
MPAAKRVKLDGGDKKYSIGLDIGTNSVGWAVITDEYKVPSKKFKVLGNTDRHSIKKNLIGALLFDSGETAEATRLKRTARRRYTRRKNRICYLQEIFSNEMAKVDDSFFHRLEESFLVEEDKKHERHPIFGNIVDEVAYHEKYPTIYHLRKKLVDSTDKADLRLIYLALAHMIKFRGHFLIEGDLNPDNSDVDKLFIQLVQTYNQLFEENPINASGVDAKAILSARLSKSRRLENLIAQLPGEKKNGLFGNLIALSLGLTPNFKSNFDLAEDAKLQLSKDTYDDDLDNLLAQIGDQYADLFLAAKNLSDAILLSDILRVNTEITKAPLSASMIKRYDEHHQDLTLLKALVRQQLPEKYKEIFFDQSKNGYAGYIDGGASQEEFYKFIKPILEKMDGTEELLVKLNREDLLRKQRTFDNGSIPHQIHLGELHAILRRQEDFYPFLKDNREKIEKILTFRIPYYVGPLARGNSRFAWMTRKSEETITPWNFEEVVDKGASAQSFIERMTNFDKNLPNEKVLPKHSLLYEYFTVYNELTKVKYVTEGMRKPAFLSGEQKKAIVDLLFKTNRKVTVKQLKEDYFKKIECFDSVEISGVEDRFNASLGTYHDLLKIIKDKDFLDNEENEDILEDIVLTLTLFEDREMIEERLKTYAHLFDDKVMKQLKRRRYTGWGRLSRKLINGIRDKQSGKTILDFLKSDGFANRNFMQLIHDDSLTFKEDIQKAQVSGQGDSLHEHIANLAGSPAIKKGILQTVKVVDELVKVMGRHKPENIVIEMARENQTTQKGQKNSRERMKRIEEGIKELGSQILKEHPVENTQLQNEKLYLYYLQNGRDMYVDQELDINRLSDYDVDHIVPQSFLKDDSIDNKVLTRSDKARGKSDNVPSEEVVKKMKNYWRQLLNAKLITQRKFDNLTKAERGGLSELDKAGFIKRQLVETRQITKHVAQILDSRMNTKYDENDKLIREVKVITLKSKLVSDFRKDFQFYKVREINNYHHAHDAYLNAVVGTALIKKYPKLESEFVYGDYKVYDVRKMIAKSEQEIGKATAKYFFYSNIMNFFKTEITLANGEIRKRPLIETNGETGEIVWDKGRDFATVRKVLSMPQVNIVKKTEVQTGGFSKESILPKRNSDKLIARKKDWDPKKYGGFDSPTVAYSVLVVAKVEKGKSKKLKSVKELLGITIMERSSFEKNPIDFLEAKGYKEVKKDLIIKLPKYSLFELENGRKRMLASAGELQKGNELALPSKYVNFLYLASHYEKLKGSPEDNEQKQLFVEQHKHYLDEIIEQISEFSKRVILADANLDKVLSAYNKHRDKPIREQAENIIHLFTLTNLGAPAAFKYFDTTIDRKRYTSTKEVLDATLIHQSITGLYETRIDLSQLGGDGGGGGGSGGGGSGGGGSGGGGSGGGGSGGGGSGGTAPLEEEYRLFLEAPIQNVTLLEQWKREIPKVWAEINPPGLASTQAPIHVQLLSTALPVRVRQYPITLEAKRSLRETIRKFRAAGILRPVHSPWNTPLLPVRKSGTSEYRMVQDLREVNKRVETIHPTVPNPYTLLSLLPPDRIWYSVLDLKDAFFCIPLAPESQLIFAFEWADAEEGESGQLTWTRLPQGFKNSPTLFNEALNRDLQGFRLDHPSVSLLQYVDDLLIAADTQAACLSATRDLLMTLAELGYRVSGKKAQLCQEEVTYLGFKIHKGSRSLSNSRTQAILQIPVPKTKRQVREFLGTIGYCRLWIPGFAELAQPLYAATRPGNDPLVWGEKEEEAFQSLKLALTQPPALALPSLDKPFQLFVEETSGAAKGVLTQALGPWKRPVAYLSKRLDPVAAGWPRCLRAIAAAALLTREASKLTFGQDIEITSSHNLESLLRSPPDKWLTNARITQYQVLLLDPPRVRFKQTAALNPATLLPETDDTLPIHHCLDTLDSLTSTRPDLTDQPLAQAEATLFTDGSSYIRDGKRYAGAAVVTLDSVIWAEPLPIGTSAQKAELIALTKALEWSKDKSVNIYTDSRYAFATLHVHGMIYRERGWLTAGGKAIKNAPEILALLTAVWLPKRVAVMHCKGHQKDDAPTSTGNRRADEVAREVAIRPLSTQATISAGKRTADGSEFEKRTADGSEFESPKKKAKVE

SEQ ID NO: 6202 - protein, 2121 aa, synthetic construct
MPAAKRVKLDGGDKKYSIGLDIGTNSVGWAVITDEYKVPSKKFKVLGNTDRHSIKKNLIGALLFDSGETAEATRLKRTARRRYTRRKNRICYLQEIFSNEMAKVDDSFFHRLEESFLVEEDKKHERHPIFGNIVDEVAYHEKYPTIYHLRKKLVDSTDKADLRLIYLALAHMIKFRGHFLIEGDLNPDNSDVDKLFIQLVQTYNQLFEENPINASGVDAKAILSARLSKSRRLENLIAQLPGEKKNGLFGNLIALSLGLTPNFKSNFDLAEDAKLQLSKDTYDDDLDNLLAQIGDQYADLFLAAKNLSDAILLSDILRVNTEITKAPLSASMIKRYDEHHQDLTLLKALVRQQLPEKYKEIFFDQSKNGYAGYIDGGASQEEFYKFIKPILEKMDGTEELLVKLNREDLLRKQRTFDNGSIPHQIHLGELHAILRRQEDFYPFLKDNREKIEKILTFRIPYYVGPLARGNSRFAWMTRKSEETITPWNFEEVVDKGASAQSFIERMTNFDKNLPNEKVLPKHSLLYEYFTVYNELTKVKYVTEGMRKPAFLSGEQKKAIVDLLFKTNRKVTVKQLKEDYFKKIECFDSVEISGVEDRFNASLGTYHDLLKIIKDKDFLDNEENEDILEDIVLTLTLFEDREMIEERLKTYAHLFDDKVMKQLKRRRYTGWGRLSRKLINGIRDKQSGKTILDFLKSDGFANRNFMQLIHDDSLTFKEDIQKAQVSGQGDSLHEHIANLAGSPAIKKGILQTVKVVDELVKVMGRHKPENIVIEMARENQTTQKGQKNSRERMKRIEEGIKELGSQILKEHPVENTQLQNEKLYLYYLQNGRDMYVDQELDINRLSDYDVDHIVPQSFLKDDSIDNKVLTRSDKARGKSDNVPSEEVVKKMKNYWRQLLNAKLITQRKFDNLTKAERGGLSELDKAGFIKRQLVETRQITKHVAQILDSRMNTKYDENDKLIREVKVITLKSKLVSDFRKDFQFYKVREINNYHHAHDAYLNAVVGTALIKKYPKLESEFVYGDYKVYDVRKMIAKSEQEIGKATAKYFFYSNIMNFFKTEITLANGEIRKRPLIETNGETGEIVWDKGRDFATVRKVLSMPQVNIVKKTEVQTGGFSKESILPKRNSDKLIARKKDWDPKKYGGFDSPTVAYSVLVVAKVEKGKSKKLKSVKELLGITIMERSSFEKNPIDFLEAKGYKEVKKDLIIKLPKYSLFELENGRKRMLASAGELQKGNELALPSKYVNFLYLASHYEKLKGSPEDNEQKQLFVEQHKHYLDEIIEQISEFSKRVILADANLDKVLSAYNKHRDKPIREQAENIIHLFTLTNLGAPAAFKYFDTTIDRKRYTSTKEVLDATLIHQSITGLYETRIDLSQLGGDGGGGGGSGGGGSGGGGSGGGGSGGGGSGGGGSGGTVSLQDEHRLFDIPVTTSLPDVWLQDFPQAWAETGGLGRAKCQAPIIIDLKPTAVPVSIKQYPMSLEAHMGIRQHIIKFLELGVLRPCRSPWNTPLLPVKKPGTQDYRPVQDLREINKRTVDIHPTVPNPYNLLSTLKPDYSWYTVLDLKDAFFCLPLAPQSQELFAFEWKDPERGISGQLTWTRLPQGFKNSPTLFDEALHRDLTDFRTQHPEVTLLQYVDDLLLAAPTKKACTQGTRHLLQELGEKGYRASAKKAQICQTKVTYLGYILSEGKRWLTPGRIETVARIPPPRNPREVREFLGTAGFCRLWIPGFAELAAPLYALTKESTPFTWQTEHQLAFEALKKALLSAPALGLPDTSKPFTLFLDERQGIAKGVLTQKLGPWKRPVAYLSKKLDPVAAGWPPCLRIMAATAMLVKDSAKLTLGQPLTVITPHTLEAIVRQPPDRWITNARLTHYQALLLDTDRVQFGPPVTLNPATLLPVPENQPSPHDCRQVLAETHGTREDLKDQELPDADHTWYTDGSSYLDSGTRRAGAAVVDGHNTIWAQSLPPGTSAQKAELIALTKALELSKGKKANIYTDSRYAFATAHTHGSIYERRGLLTSEGKEIKNKAEIIALLKALFLPQEVAIIHCPGHQKGQDPVAVGNRQADRVARQAAMAEVLTLATEPDNTSHITAGKRTADGSEFEKRTADGSEFESPKKKAKVE

SEQ ID NO: 6203 - protein, 2121 aa, synthetic construct
MPAAKRVKLDGGDKKYSIGLDIGTNSVGWAVITDEYKVPSKKFKVLGNTDRHSIKKNLIGALLFDSGETAEATRLKRTARRRYTRRKNRICYLQEIFSNEMAKVDDSFFHRLEESFLVEEDKKHERHPIFGNIVDEVAYHEKYPTIYHLRKKLVDSTDKADLRLIYLALAHMIKFRGHFLIEGDLNPDNSDVDKLFIQLVQTYNQLFEENPINASGVDAKAILSARLSKSRRLENLIAQLPGEKKNGLFGNLIALSLGLTPNFKSNFDLAEDAKLQLSKDTYDDDLDNLLAQIGDQYADLFLAAKNLSDAILLSDILRVNTEITKAPLSASMIKRYDEHHQDLTLLKALVRQQLPEKYKEIFFDQSKNGYAGYIDGGASQEEFYKFIKPILEKMDGTEELLVKLNREDLLRKQRTFDNGSIPHQIHLGELHAILRRQEDFYPFLKDNREKIEKILTFRIPYYVGPLARGNSRFAWMTRKSEETITPWNFEEVVDKGASAQSFIERMTNFDKNLPNEKVLPKHSLLYEYFTVYNELTKVKYVTEGMRKPAFLSGEQKKAIVDLLFKTNRKVTVKQLKEDYFKKIECFDSVEISGVEDRFNASLGTYHDLLKIIKDKDFLDNEENEDILEDIVLTLTLFEDREMIEERLKTYAHLFDDKVMKQLKRRRYTGWGRLSRKLINGIRDKQSGKTILDFLKSDGFANRNFMQLIHDDSLTFKEDIQKAQVSGQGDSLHEHIANLAGSPAIKKGILQTVKVVDELVKVMGRHKPENIVIEMARENQTTQKGQKNSRERMKRIEEGIKELGSQILKEHPVENTQLQNEKLYLYYLQNGRDMYVDQELDINRLSDYDVDHIVPQSFLKDDSIDNKVLTRSDKARGKSDNVPSEEVVKKMKNYWRQLLNAKLITQRKFDNLTKAERGGLSELDKAGFIKRQLVETRQITKHVAQILDSRMNTKYDENDKLIREVKVITLKSKLVSDFRKDFQFYKVREINNYHHAHDAYLNAVVGTALIKKYPKLESEFVYGDYKVYDVRKMIAKSEQEIGKATAKYFFYSNIMNFFKTEITLANGEIRKRPLIETNGETGEIVWDKGRDFATVRKVLSMPQVNIVKKTEVQTGGFSKESILPKRNSDKLIARKKDWDPKKYGGFDSPTVAYSVLVVAKVEKGKSKKLKSVKELLGITIMERSSFEKNPIDFLEAKGYKEVKKDLIIKLPKYSLFELENGRKRMLASAGELQKGNELALPSKYVNFLYLASHYEKLKGSPEDNEQKQLFVEQHKHYLDEIIEQISEFSKRVILADANLDKVLSAYNKHRDKPIREQAENIIHLFTLTNLGAPAAFKYFDTTIDRKRYTSTKEVLDATLIHQSITGLYETRIDLSQLGGDGGGGGGSGGGGSGGGGSGGGGSGGGGSGGGGSGGTVSLQDEHRLFDIPVTTSLPDVWLQDFPQAWAETGGLGRAKCQAPIIIDLKPTAVPVSIKQYPMSLEAHMGIRQHIIKFLELGVLRPCRSPWNTPLLPVKKPGTQDYRPVQDLREINKRTVDIHPTVPNPYNLLSTLKPDYSWYTVLDLKDAFFCLPLAPQSQELFAFEWKDPERGISGQLTWTRLPQGFKNSPTLFNEALHRDLTDFRTQHPEVTLLQYVDDLLLAAPTKKACTQGTRHLLQELGEKGYRASAKKAQICQTKVTYLGYILSEGKRWLTPGRIETVARIPPPRNPREVREFLGTAGFCRLWIPGFAELAAPLYALTKPSTPFTWQTEHQLAFEALKKALLSAPALGLPDTSKPFTLFLDERQGIAKGVLTQKLGPWKRPVAYLSKKLDPVAAGWPPCLRIMAATAMLVKDSAKLTLGQPLTVITPHTLEAIVRQPPDRWITNARLTHYQALLLDTDRVQFGPPVTLNPATLLPVPENQPSPHDCRQVLAETHGTREDLKDQELPDADHTWYTDGSSYLDSGTRRAGAAVVDGHNTIWAQSLPPGTSAQKAELIALTKALELSKGKKANIYTDSRYAFATAHTHGSIYERRGWLTSEGKEIKNKAEIIALLKALFLPQEVAIIHCPGHQKGQDPVAVGNRQADRVARQAAMAEVLTLATEPDNTSHITAGKRTADGSEFEKRTADGSEFESPKKKAKVE

SEQ ID NO: 6204 - protein, 2106 aa, synthetic construct
MPAAKRVKLDGGDKKYSIGLDIGTNSVGWAVITDEYKVPSKKFKVLGNTDRHSIKKNLIGALLFDSGETAEATRLKRTARRRYTRRKNRICYLQEIFSNEMAKVDDSFFHRLEESFLVEEDKKHERHPIFGNIVDEVAYHEKYPTIYHLRKKLVDSTDKADLRLIYLALAHMIKFRGHFLIEGDLNPDNSDVDKLFIQLVQTYNQLFEENPINASGVDAKAILSARLSKSRRLENLIAQLPGEKKNGLFGNLIALSLGLTPNFKSNFDLAEDAKLQLSKDTYDDDLDNLLAQIGDQYADLFLAAKNLSDAILLSDILRVNTEITKAPLSASMIKRYDEHHQDLTLLKALVRQQLPEKYKEIFFDQSKNGYAGYIDGGASQEEFYKFIKPILEKMDGTEELLVKLNREDLLRKQRTFDNGSIPHQIHLGELHAILRRQEDFYPFLKDNREKIEKILTFRIPYYVGPLARGNSRFAWMTRKSEETITPWNFEEVVDKGASAQSFIERMTNFDKNLPNEKVLPKHSLLYEYFTVYNELTKVKYVTEGMRKPAFLSGEQKKAIVDLLFKTNRKVTVKQLKEDYFKKIECFDSVEISGVEDRFNASLGTYHDLLKIIKDKDFLDNEENEDILEDIVLTLTLFEDREMIEERLKTYAHLFDDKVMKQLKRRRYTGWGRLSRKLINGIRDKQSGKTILDFLKSDGFANRNFMQLIHDDSLTFKEDIQKAQVSGQGDSLHEHIANLAGSPAIKKGILQTVKVVDELVKVMGRHKPENIVIEMARENQTTQKGQKNSRERMKRIEEGIKELGSQILKEHPVENTQLQNEKLYLYYLQNGRDMYVDQELDINRLSDYDVDHIVPQSFLKDDSIDNKVLTRSDKARGKSDNVPSEEVVKKMKNYWRQLLNAKLITQRKFDNLTKAERGGLSELDKAGFIKRQLVETRQITKHVAQILDSRMNTKYDENDKLIREVKVITLKSKLVSDFRKDFQFYKVREINNYHHAHDAYLNAVVGTALIKKYPKLESEFVYGDYKVYDVRKMIAKSEQEIGKATAKYFFYSNIMNFFKTEITLANGEIRKRPLIETNGETGEIVWDKGRDFATVRKVLSMPQVNIVKKTEVQTGGFSKESILPKRNSDKLIARKKDWDPKKYGGFDSPTVAYSVLVVAKVEKGKSKKLKSVKELLGITIMERSSFEKNPIDFLEAKGYKEVKKDLIIKLPKYSLFELENGRKRMLASAGELQKGNELALPSKYVNFLYLASHYEKLKGSPEDNEQKQLFVEQHKHYLDEIIEQISEFSKRVILADANLDKVLSAYNKHRDKPIREQAENIIHLFTLTNLGAPAAFKYFDTTIDRKRYTSTKEVLDATLIHQSITGLYETRIDLSQLGGDGGGGGGSGGGGSGGGGSGGGGSGGGGSGGGGSGGVPWILKKPLELTIKLDLEEQQGTLLNNSILSKKGKEELKQLFEKYSALWQSWENQVGHRRIRPHKIATGTVKPTPQKQYHINPKAKPDIQIVINDLLKQGVLIQKESTMNTPVYPVPKPNGRWRMVLDYRAVNKVTPLIAVQNQHSYGILGSLFKGRYKTTIDLSNGFWAHPIVPEDYWITAFTWQGKQYCWTVLPQGFLNSPGLFNGDVVDLLQGIPNVEVYVDDVYISHDSEKEHLEYLDILFNRLKEAGYIISLKKSNIANSIVDFLGFQITNEGRGLTDTFKEKLENITAPTTLKQLQSILGLLNFARNFIPDFTELIAPLYALIPKSPKNYVPWQIEHSTTLETLITKLNGAEYLQGRKGDKTLIMKVNASYTTGYIRYYNEGEKKPISYVSIVFSKTELKFTELEKLLTTVHKGLLKALDLSMGQNIHVYSPIVSMQNIQKTPQTAKKALASRWLSWLSYLEDPRIRFFYDPQMPALKDLPAVDTGKDNKKHPSNFQHIFYTDGSAITSPTKEGHLNAGMGIVYFINKDGNLQKQQEWSISLGNHTAQFAEIAAFEFALKKCLPLGGNILVVTDSNYVAKAYNEELDVWASNGFVNNRKKPLKHISKWKSVADLKRLRPDVVVTHEPGHQKLDSSPHAYGNNLADQLATQASFKVHAGKRTADGSEFEKRTADGSEFESPKKKAKVE

SEQ ID NO: 6205 - protein, 2114 aa, synthetic construct
MPAAKRVKLDGGDKKYSIGLDIGTNSVGWAVITDEYKVPSKKFKVLGNTDRHSIKKNLIGALLFDSGETAEATRLKRTARRRYTRRKNRICYLQEIFSNEMAKVDDSFFHRLEESFLVEEDKKHERHPIFGNIVDEVAYHEKYPTIYHLRKKLVDSTDKADLRLIYLALAHMIKFRGHFLIEGDLNPDNSDVDKLFIQLVQTYNQLFEENPINASGVDAKAILSARLSKSRRLENLIAQLPGEKKNGLFGNLIALSLGLTPNFKSNFDLAEDAKLQLSKDTYDDDLDNLLAQIGDQYADLFLAAKNLSDAILLSDILRVNTEITKAPLSASMIKRYDEHHQDLTLLKALVRQQLPEKYKEIFFDQSKNGYAGYIDGGASQEEFYKFIKPILEKMDGTEELLVKLNREDLLRKQRTFDNGSIPHQIHLGELHAILRRQEDFYPFLKDNREKIEKILTFRIPYYVGPLARGNSRFAWMTRKSEETITPWNFEEVVDKGASAQSFIERMTNFDKNLPNEKVLPKHSLLYEYFTVYNELTKVKYVTEGMRKPAFLSGEQKKAIVDLLFKTNRKVTVKQLKEDYFKKIECFDSVEISGVEDRFNASLGTYHDLLKIIKDKDFLDNEENEDILEDIVLTLTLFEDREMIEERLKTYAHLFDDKVMKQLKRRRYTGWGRLSRKLINGIRDKQSGKTILDFLKSDGFANRNFMQLIHDDSLTFKEDIQKAQVSGQGDSLHEHIANLAGSPAIKKGILQTVKVVDELVKVMGRHKPENIVIEMARENQTTQKGQKNSRERMKRIEEGIKELGSQILKEHPVENTQLQNEKLYLYYLQNGRDMYVDQELDINRLSDYDVDHIVPQSFLKDDSIDNKVLTRSDKARGKSDNVPSEEVVKKMKNYWRQLLNAKLITQRKFDNLTKAERGGLSELDKAGFIKRQLVETRQITKHVAQILDSRMNTKYDENDKLIREVKVITLKSKLVSDFRKDFQFYKVREINNYHHAHDAYLNAVVGTALIKKYPKLESEFVYGDYKVYDVRKMIAKSEQEIGKATAKYFFYSNIMNFFKTEITLANGEIRKRPLIETNGETGEIVWDKGRDFATVRKVLSMPQVNIVKKTEVQTGGFSKESILPKRNSDKLIARKKDWDPKKYGGFDSPTVAYSVLVVAKVEKGKSKKLKSVKELLGITIMERSSFEKNPIDFLEAKGYKEVKKDLIIKLPKYSLFELENGRKRMLASAGELQKGNELALPSKYVNFLYLASHYEKLKGSPEDNEQKQLFVEQHKHYLDEIIEQISEFSKRVILADANLDKVLSAYNKHRDKPIREQAENIIHLFTLTNLGAPAAFKYFDTTIDRKRYTSTKEVLDATLIHQSITGLYETRIDLSQLGGDGGGGGGSGGGGSGGGGSGGGGSGGGGSGGGGSGGTLQLEEEYRLFEPESTQKQEMDIWLKNFPQAWAETGGMGTAHCQAPVLIQLKATATPISIRQYPMPHEAYQGIKPHIRRMLDQGILKPCQSPWNTPLLPVKKPGTEDYRPVQDLREVNKRVEDIHPTVPNPYNLLSTLPPSHPWYTVLDLKDAFFCLRLHSESQLLFAFEWRDPEIGLSGQLTWTRLPQGFKNSPTLFNEALHSDLADFRVRYPALVLLQYVDDLLLAAATRTECLEGTKALLETLGNKGYRASAKKAQICLQEVTYLGYSLKDGQRWLTKARKEAILSIPVPKNSRQVREFLGTAGYCRLWIPGFAELAAPLYPLTRPGTLFQWGTEQQLAFEDIKKALLSSPALGLPDITKPFELFIDENSGFAKGVLVQKLGPWKRPVAYLSKKLDTVASGWPPCLRMVAAIAILVKDAGKLTLGQPLTILTSHPVEALVRQPPNKWLSNARMTHYQAMLLDAERVHFGPTVSLNPATLLPLPSGGNHHDCLQILAETHGTRPDLTDQPLPDADLTWYTDGSSFIRNGEREAGAAVTTESEVIWAAPLPPGTSAQRAELIALTQALKMAEGKKLTVYTDSRYAFATTHVHGEIYRRRGWLTSEGKEIKNKNEILALLEALFLPKRLSIIHCPGHQKGDSPQAKGNRLADDTAKKAATETHSSLTVLPAGKRTADGSEFEKRTADGSEFESPKKKAKVE

SEQ ID NO: 6206 - protein, 2106 aa, synthetic construct
MPAAKRVKLDGGDKKYSIGLDIGTNSVGWAVITDEYKVPSKKFKVLGNTDRHSIKKNLIGALLFDSGETAEATRLKRTARRRYTRRKNRICYLQEIFSNEMAKVDDSFFHRLEESFLVEEDKKHERHPIFGNIVDEVAYHEKYPTIYHLRKKLVDSTDKADLRLIYLALAHMIKFRGHFLIEGDLNPDNSDVDKLFIQLVQTYNQLFEENPINASGVDAKAILSARLSKSRRLENLIAQLPGEKKNGLFGNLIALSLGLTPNFKSNFDLAEDAKLQLSKDTYDDDLDNLLAQIGDQYADLFLAAKNLSDAILLSDILRVNTEITKAPLSASMIKRYDEHHQDLTLLKALVRQQLPEKYKEIFFDQSKNGYAGYIDGGASQEEFYKFIKPILEKMDGTEELLVKLNREDLLRKQRTFDNGSIPHQIHLGELHAILRRQEDFYPFLKDNREKIEKILTFRIPYYVGPLARGNSRFAWMTRKSEETITPWNFEEVVDKGASAQSFIERMTNFDKNLPNEKVLPKHSLLYEYFTVYNELTKVKYVTEGMRKPAFLSGEQKKAIVDLLFKTNRKVTVKQLKEDYFKKIECFDSVEISGVEDRFNASLGTYHDLLKIIKDKDFLDNEENEDILEDIVLTLTLFEDREMIEERLKTYAHLFDDKVMKQLKRRRYTGWGRLSRKLINGIRDKQSGKTILDFLKSDGFANRNFMQLIHDDSLTFKEDIQKAQVSGQGDSLHEHIANLAGSPAIKKGILQTVKVVDELVKVMGRHKPENIVIEMARENQTTQKGQKNSRERMKRIEEGIKELGSQILKEHPVENTQLQNEKLYLYYLQNGRDMYVDQELDINRLSDYDVDHIVPQSFLKDDSIDNKVLTRSDKARGKSDNVPSEEVVKKMKNYWRQLLNAKLITQRKFDNLTKAERGGLSELDKAGFIKRQLVETRQITKHVAQILDSRMNTKYDENDKLIREVKVITLKSKLVSDFRKDFQFYKVREINNYHHAHDAYLNAVVGTALIKKYPKLESEFVYGDYKVYDVRKMIAKSEQEIGKATAKYFFYSNIMNFFKTEITLANGEIRKRPLIETNGETGEIVWDKGRDFATVRKVLSMPQVNIVKKTEVQTGGFSKESILPKRNSDKLIARKKDWDPKKYGGFDSPTVAYSVLVVAKVEKGKSKKLKSVKELLGITIMERSSFEKNPIDFLEAKGYKEVKKDLIIKLPKYSLFELENGRKRMLASAGELQKGNELALPSKYVNFLYLASHYEKLKGSPEDNEQKQLFVEQHKHYLDEIIEQISEFSKRVILADANLDKVLSAYNKHRDKPIREQAENIIHLFTLTNLGAPAAFKYFDTTIDRKRYTSTKEVLDATLIHQSITGLYETRIDLSQLGGDGGGGGGSGGGGSGGGGSGGGGSGGGGSGGGGSGGVPWLTQQPLQLTILVPLQEYQEKILSKTALPEDQKQQLKTLFVKYDNLWQHWENQVGHRKIRPHNIATGDYPPRPQKQYPINPKAKPSIQIVIDDLLKQGVLTPQNSTMNTPVYPVPKPDGRWRMVLDYREVNKTIPLTAAQNQHSAGILATIVRQKYKTTLDLANGFWAHPITPESYWLTAFTWQGKQYCWTRLPQGFLNSPALFNADVVDLLKEIPNVQVYVDDIYLSHDDPKEHVQQLEKVFQILLQAGYVVSLKKSEIGQKTVEFLGFNITKEGRGLTDTFKTKLLNITPPKDLKQLQSILGLLNFARNFIPNFAELVQPLYNLIAPAKGKYIEWSEENTKQLNMVIEALNTASNLEERLPEQRLVIKVNTSPSAGYVRYYNETGKKPIMYLNYVFSKAELKFSMLEKLLTTMHKALIKAMDLAMGQEILVYSPIVSMTKIQKTPLPERKALPIRWITWMTYLEDPRIQFHYDKTLPELKHIPDVYTSSQSPVKHPSQYEGVFYTDGSAIKSPDPTKSNNAGMGIVHATYKPEYQVLNQWSIPLGNHTAQMAEIAAVEFACKKALKIPGPVLVITDSFYVAESANKELPYWKSNGFVNNKKKPLKHISKWKSIAECLSMKPDITIQHEKGISLQIPVFILKGNALADKLATQGSYVVNAGKRTADGSEFEKRTADGSEFESPKKKAKVE

SEQ ID NO: 6207 - protein, 2106 aa, synthetic construct
MPAAKRVKLDGGDKKYSIGLDIGTNSVGWAVITDEYKVPSKKFKVLGNTDRHSIKKNLIGALLFDSGETAEATRLKRTARRRYTRRKNRICYLQEIFSNEMAKVDDSFFHRLEESFLVEEDKKHERHPIFGNIVDEVAYHEKYPTIYHLRKKLVDSTDKADLRLIYLALAHMIKFRGHFLIEGDLNPDNSDVDKLFIQLVQTYNQLFEENPINASGVDAKAILSARLSKSRRLENLIAQLPGEKKNGLFGNLIALSLGLTPNFKSNFDLAEDAKLQLSKDTYDDDLDNLLAQIGDQYADLFLAAKNLSDAILLSDILRVNTEITKAPLSASMIKRYDEHHQDLTLLKALVRQQLPEKYKEIFFDQSKNGYAGYIDGGASQEEFYKFIKPILEKMDGTEELLVKLNREDLLRKQRTFDNGSIPHQIHLGELHAILRRQEDFYPFLKDNREKIEKILTFRIPYYVGPLARGNSRFAWMTRKSEETITPWNFEEVVDKGASAQSFIERMTNFDKNLPNEKVLPKHSLLYEYFTVYNELTKVKYVTEGMRKPAFLSGEQKKAIVDLLFKTNRKVTVKQLKEDYFKKIECFDSVEISGVEDRFNASLGTYHDLLKIIKDKDFLDNEENEDILEDIVLTLTLFEDREMIEERLKTYAHLFDDKVMKQLKRRRYTGWGRLSRKLINGIRDKQSGKTILDFLKSDGFANRNFMQLIHDDSLTFKEDIQKAQVSGQGDSLHEHIANLAGSPAIKKGILQTVKVVDELVKVMGRHKPENIVIEMARENQTTQKGQKNSRERMKRIEEGIKELGSQILKEHPVENTQLQNEKLYLYYLQNGRDMYVDQELDINRLSDYDVDHIVPQSFLKDDSIDNKVLTRSDKARGKSDNVPSEEVVKKMKNYWRQLLNAKLITQRKFDNLTKAERGGLSELDKAGFIKRQLVETRQITKHVAQILDSRMNTKYDENDKLIREVKVITLKSKLVSDFRKDFQFYKVREINNYHHAHDAYLNAVVGTALIKKYPKLESEFVYGDYKVYDVRKMIAKSEQEIGKATAKYFFYSNIMNFFKTEITLANGEIRKRPLIETNGETGEIVWDKGRDFATVRKVLSMPQVNIVKKTEVQTGGFSKESILPKRNSDKLIARKKDWDPKKYGGFDSPTVAYSVLVVAKVEKGKSKKLKSVKELLGITIMERSSFEKNPIDFLEAKGYKEVKKDLIIKLPKYSLFELENGRKRMLASAGELQKGNELALPSKYVNFLYLASHYEKLKGSPEDNEQKQLFVEQHKHYLDEIIEQISEFSKRVILADANLDKVLSAYNKHRDKPIREQAENIIHLFTLTNLGAPAAFKYFDTTIDRKRYTSTKEVLDATLIHQSITGLYETRIDLSQLGGDGGGGGGSGGGGSGGGGSGGGGSGGGGSGGGGSGGVPWLTQQPLQLTILVPLQEYQEKILSKTALPEDQKQQLKTLFVKYDNLWQHWENQVGHRKIRPHNIATGDYPPRPQKQYPINPKAKPSIQIVIDDLLKQGVLTPQNSTMNTPVYPVPKPDGRWRMVLDYREVNKTIPLTAAQNQHSAGILATIVRQKYKTTLDLANGFWAHPITPESYWLTAFTWQGKQYCWTRLPQGFLNSPALFNADVVDLLKEIPNVQVYVDDIYLSHDDPKEHVQQLEKVFQILLQAGYVVSLKKSEIGQKTVEFLGFNITKEGRGLTDTFKTKLLNITPPKDLKQLQSILGKLNFARNFIPNFAELVQPLYNLIAPAKGKYIEWSEENTKQLNMVIEALNTASNLEERLPEQRLVIKVNTSPSAGYVRYYNETGKKPIMYLNYVFSKAELKFSMLEKLLTTMHKALIKAMDLAMGQEILVYSPIVSMTKIQKTPLPERKALPIRWITWMTYLEDPRIQFHYDKTLPELKHIPDVYTSSQSPVKHPSQYEGVFYTDGSAIKSPDPTKSNNAGMGIVHATYKPEYQVLNQWSIPLGNHTAQMAEIAAVEFACKKALKIPGPVLVITDSFYVAESANKELPYWKSNGFVNNKKKPLKHISKWKSIAECLSMKPDITIQHEKGISLQIPVFILKGNALADKLATQGSYVVNAGKRTADGSEFEKRTADGSEFESPKKKAKVE

SEQ ID NO: 6208 - protein, 2195 aa, synthetic construct
MPAAKRVKLDGGDKKYSIGLDIGTNSVGWAVITDEYKVPSKKFKVLGNTDRHSIKKNLIGALLFDSGETAEATRLKRTARRRYTRRKNRICYLQEIFSNEMAKVDDSFFHRLEESFLVEEDKKHERHPIFGNIVDEVAYHEKYPTIYHLRKKLVDSTDKADLRLIYLALAHMIKFRGHFLIEGDLNPDNSDVDKLFIQLVQTYNQLFEENPINASGVDAKAILSARLSKSRRLENLIAQLPGEKKNGLFGNLIALSLGLTPNFKSNFDLAEDAKLQLSKDTYDDDLDNLLAQIGDQYADLFLAAKNLSDAILLSDILRVNTEITKAPLSASMIKRYDEHHQDLTLLKALVRQQLPEKYKEIFFDQSKNGYAGYIDGGASQEEFYKFIKPILEKMDGTEELLVKLNREDLLRKQRTFDNGSIPHQIHLGELHAILRRQEDFYPFLKDNREKIEKILTFRIPYYVGPLARGNSRFAWMTRKSEETITPWNFEEVVDKGASAQSFIERMTNFDKNLPNEKVLPKHSLLYEYFTVYNELTKVKYVTEGMRKPAFLSGEQKKAIVDLLFKTNRKVTVKQLKEDYFKKIECFDSVEISGVEDRFNASLGTYHDLLKIIKDKDFLDNEENEDILEDIVLTLTLFEDREMIEERLKTYAHLFDDKVMKQLKRRRYTGWGRLSRKLINGIRDKQSGKTILDFLKSDGFANRNFMQLIHDDSLTFKEDIQKAQVSGQGDSLHEHIANLAGSPAIKKGILQTVKVVDELVKVMGRHKPENIVIEMARENQTTQKGQKNSRERMKRIEEGIKELGSQILKEHPVENTQLQNEKLYLYYLQNGRDMYVDQELDINRLSDYDVDHIVPQSFLKDDSIDNKVLTRSDKARGKSDNVPSEEVVKKMKNYWRQLLNAKLITQRKFDNLTKAERGGLSELDKAGFIKRQLVETRQITKHVAQILDSRMNTKYDENDKLIREVKVITLKSKLVSDFRKDFQFYKVREINNYHHAHDAYLNAVVGTALIKKYPKLESEFVYGDYKVYDVRKMIAKSEQEIGKATAKYFFYSNIMNFFKTEITLANGEIRKRPLIETNGETGEIVWDKGRDFATVRKVLSMPQVNIVKKTEVQTGGFSKESILPKRNSDKLIARKKDWDPKKYGGFDSPTVAYSVLVVAKVEKGKSKKLKSVKELLGITIMERSSFEKNPIDFLEAKGYKEVKKDLIIKLPKYSLFELENGRKRMLASAGELQKGNELALPSKYVNFLYLASHYEKLKGSPEDNEQKQLFVEQHKHYLDEIIEQISEFSKRVILADANLDKVLSAYNKHRDKPIREQAENIIHLFTLTNLGAPAAFKYFDTTIDRKRYTSTKEVLDATLIHQSITGLYETRIDLSQLGGDGGGGGGSGGGGSGGGGSGGGGSGGGGSGGGGSGGMNPLQLLQPLPAEIKGTKLLAHWNSGATITCIPESFLEDEQPIKKTLIKTIHGEKQQNVYYVTFKVKGRKVEAEVIASPYEYILLSPTDVPWLTQQPLQLTILVPLQEYQEKILSKTALPEDQKQQLKTLFVKYDNLWQHWENQVGHRKIRPHNIATGDYPPRPQKQYPINPKAKPSIQIVIDDLLKQGVLTPQNSTMNTPVYPVPKPDGRWRMVLDYREVNKTIPLTAAQNQHSAGILATIVRQKYKTTLDLANGFWAHPITPESYWLTAFTWQGKQYCWTRLPQGFLNSPALFNADVVDLLKEIPNVQVYVDDIYLSHDDPKEHVQQLEKVFQILLQAGYVVSLKKSEIGQKTVEFLGFNITKEGRGLTDTFKTKLLNITPPKDLKQLQSILGLLNFARNFIPNFAELVQPLYNLIAPAKGKYIEWSEENTKQLNMVIEALNTASNLEERLPEQRLVIKVNTSPSAGYVRYYNETGKKPIMYLNYVFSKAELKFSMLEKLLTTMHKALIKAMDLAMGQEILVYSPIVSMTKIQKTPLPERKALPIRWITWMTYLEDPRIQFHYDKTLPELKHIPDVYTSSQSPVKHPSQYEGVFYTDGSAIKSPDPTKSNNAGMGIVHATYKPEYQVLNQWSIPLGNHTAQMAEIAAVEFACKKALKIPGPVLVITDSFYVAESANKELPYWKSNGFVNNKKKPLKHISKWKSIAECLSMKPDITIQHEKGISLQIPVFILKGNALADKLATQGSYVVNAGKRTADGSEFEKRTADGSEFESPKKKAKVE

SEQ ID NO: 6209 - protein, 2195 aa, synthetic construct
MPAAKRVKLDGGDKKYSIGLDIGTNSVGWAVITDEYKVPSKKFKVLGNTDRHSIKKNLIGALLFDSGETAEATRLKRTARRRYTRRKNRICYLQEIFSNEMAKVDDSFFHRLEESFLVEEDKKHERHPIFGNIVDEVAYHEKYPTIYHLRKKLVDSTDKADLRLIYLALAHMIKFRGHFLIEGDLNPDNSDVDKLFIQLVQTYNQLFEENPINASGVDAKAILSARLSKSRRLENLIAQLPGEKKNGLFGNLIALSLGLTPNFKSNFDLAEDAKLQLSKDTYDDDLDNLLAQIGDQYADLFLAAKNLSDAILLSDILRVNTEITKAPLSASMIKRYDEHHQDLTLLKALVRQQLPEKYKEIFFDQSKNGYAGYIDGGASQEEFYKFIKPILEKMDGTEELLVKLNREDLLRKQRTFDNGSIPHQIHLGELHAILRRQEDFYPFLKDNREKIEKILTFRIPYYVGPLARGNSRFAWMTRKSEETITPWNFEEVVDKGASAQSFIERMTNFDKNLPNEKVLPKHSLLYEYFTVYNELTKVKYVTEGMRKPAFLSGEQKKAIVDLLFKTNRKVTVKQLKEDYFKKIECFDSVEISGVEDRFNASLGTYHDLLKIIKDKDFLDNEENEDILEDIVLTLTLFEDREMIEERLKTYAHLFDDKVMKQLKRRRYTGWGRLSRKLINGIRDKQSGKTILDFLKSDGFANRNFMQLIHDDSLTFKEDIQKAQVSGQGDSLHEHIANLAGSPAIKKGILQTVKVVDELVKVMGRHKPENIVIEMARENQTTQKGQKNSRERMKRIEEGIKELGSQILKEHPVENTQLQNEKLYLYYLQNGRDMYVDQELDINRLSDYDVDHIVPQSFLKDDSIDNKVLTRSDKARGKSDNVPSEEVVKKMKNYWRQLLNAKLITQRKFDNLTKAERGGLSELDKAGFIKRQLVETRQITKHVAQILDSRMNTKYDENDKLIREVKVITLKSKLVSDFRKDFQFYKVREINNYHHAHDAYLNAVVGTALIKKYPKLESEFVYGDYKVYDVRKMIAKSEQEIGKATAKYFFYSNIMNFFKTEITLANGEIRKRPLIETNGETGEIVWDKGRDFATVRKVLSMPQVNIVKKTEVQTGGFSKESILPKRNSDKLIARKKDWDPKKYGGFDSPTVAYSVLVVAKVEKGKSKKLKSVKELLGITIMERSSFEKNPIDFLEAKGYKEVKKDLIIKLPKYSLFELENGRKRMLASAGELQKGNELALPSKYVNFLYLASHYEKLKGSPEDNEQKQLFVEQHKHYLDEIIEQISEFSKRVILADANLDKVLSAYNKHRDKPIREQAENIIHLFTLTNLGAPAAFKYFDTTIDRKRYTSTKEVLDATLIHQSITGLYETRIDLSQLGGDGGGGGGSGGGGSGGGGSGGGGSGGGGSGGGGSGGMNPLQLLQPLPAEIKGTKLLAHWNSGATITCIPESFLEDEQPIKKTLIKTIHGEKQQNVYYVTFKVKGRKVEAEVIASPYEYILLSPTDVPWLTQQPLQLTILVPLQEYQEKILSKTALPEDQKQQLKTLFVKYDNLWQHWENQVGHRKIRPHNIATGDYPPRPQKQYPINPKAKPSIQIVIDDLLKQGVLTPQNSTMNTPVYPVPKPDGRWRMVLDYREVNKTIPLTAAQNQHSAGILATIVRQKYKTTLDLANGFWAHPITPESYWLTAFTWQGKQYCWTRLPQGFLNSPALFNADVVDLLKEIPNVQVYVDDIYLSHDDPKEHVQQLEKVFQILLQAGYVVSLKKSEIGQKTVEFLGFNITKEGRGLTDTFKTKLLNITPPKDLKQLQSILGKLNFARNFIPNFAELVQPLYNLIAPAKGKYIEWSEENTKQLNMVIEALNTASNLEERLPEQRLVIKVNTSPSAGYVRYYNETGKKPIMYLNYVFSKAELKFSMLEKLLTTMHKALIKAMDLAMGQEILVYSPIVSMTKIQKTPLPERKALPIRWITWMTYLEDPRIQFHYDKTLPELKHIPDVYTSSQSPVKHPSQYEGVFYTDGSAIKSPDPTKSNNAGMGIVHATYKPEYQVLNQWSIPLGNHTAQMAEIAAVEFACKKALKIPGPVLVITDSFYVAESANKELPYWKSNGFVNNKKKPLKHISKWKSIAECLSMKPDITIQHEKGISLQIPVFILKGNALADKLATQGSYVVNAGKRTADGSEFEKRTADGSEFESPKKKAKVE

SEQ ID NO: 6210 - protein, 2113 aa, synthetic construct
MPAAKRVKLDGGDKKYSIGLDIGTNSVGWAVITDEYKVPSKKFKVLGNTDRHSIKKNLIGALLFDSGETAEATRLKRTARRRYTRRKNRICYLQEIFSNEMAKVDDSFFHRLEESFLVEEDKKHERHPIFGNIVDEVAYHEKYPTIYHLRKKLVDSTDKADLRLIYLALAHMIKFRGHFLIEGDLNPDNSDVDKLFIQLVQTYNQLFEENPINASGVDAKAILSARLSKSRRLENLIAQLPGEKKNGLFGNLIALSLGLTPNFKSNFDLAEDAKLQLSKDTYDDDLDNLLAQIGDQYADLFLAAKNLSDAILLSDILRVNTEITKAPLSASMIKRYDEHHQDLTLLKALVRQQLPEKYKEIFFDQSKNGYAGYIDGGASQEEFYKFIKPILEKMDGTEELLVKLNREDLLRKQRTFDNGSIPHQIHLGELHAILRRQEDFYPFLKDNREKIEKILTFRIPYYVGPLARGNSRFAWMTRKSEETITPWNFEEVVDKGASAQSFIERMTNFDKNLPNEKVLPKHSLLYEYFTVYNELTKVKYVTEGMRKPAFLSGEQKKAIVDLLFKTNRKVTVKQLKEDYFKKIECFDSVEISGVEDRFNASLGTYHDLLKIIKDKDFLDNEENEDILEDIVLTLTLFEDREMIEERLKTYAHLFDDKVMKQLKRRRYTGWGRLSRKLINGIRDKQSGKTILDFLKSDGFANRNFMQLIHDDSLTFKEDIQKAQVSGQGDSLHEHIANLAGSPAIKKGILQTVKVVDELVKVMGRHKPENIVIEMARENQTTQKGQKNSRERMKRIEEGIKELGSQILKEHPVENTQLQNEKLYLYYLQNGRDMYVDQELDINRLSDYDVDHIVPQSFLKDDSIDNKVLTRSDKARGKSDNVPSEEVVKKMKNYWRQLLNAKLITQRKFDNLTKAERGGLSELDKAGFIKRQLVETRQITKHVAQILDSRMNTKYDENDKLIREVKVITLKSKLVSDFRKDFQFYKVREINNYHHAHDAYLNAVVGTALIKKYPKLESEFVYGDYKVYDVRKMIAKSEQEIGKATAKYFFYSNIMNFFKTEITLANGEIRKRPLIETNGETGEIVWDKGRDFATVRKVLSMPQVNIVKKTEVQTGGFSKESILPKRNSDKLIARKKDWDPKKYGGFDSPTVAYSVLVVAKVEKGKSKKLKSVKELLGITIMERSSFEKNPIDFLEAKGYKEVKKDLIIKLPKYSLFELENGRKRMLASAGELQKGNELALPSKYVNFLYLASHYEKLKGSPEDNEQKQLFVEQHKHYLDEIIEQISEFSKRVILADANLDKVLSAYNKHRDKPIREQAENIIHLFTLTNLGAPAAFKYFDTTIDRKRYTSTKEVLDATLIHQSITGLYETRIDLSQLGGDGGGGGGSGGGGSGGGGSGGGGSGGGGSGGGGSGGVLNLEEEYRLHEKPVPSSIDPSWLQLFPTVWAERAGMGLANQVPPVVVELRSGASPVAVRQYPMSKEAREGIRPHIQKFLDLGVLVPCRSPWNTPLLPVKKPGTNDYRPVQDLREINKRVQDIHPTVPNPYNLLSSLPPSYTWYSVLDLKDAFFCLRLHPNSQPLFAFEWKDPEKGNTGQLTWTRLPQGFKNSPTLFDEALHRDLAPFRALNPQVVLLQYVDDLLVAAPTYEDCKKGTQKLLQELSKLGYRVSAKKAQLCQREVTYLGYLLKEGKRWLTPARKATVMKIPVPTTPRQVREFLGTAGFCRLWIPGFASLAAPLYPLTKESIPFIWTEEHQQAFDHIKKALLSAPALALPDLTKPFTLYIDERAGVARGVLTQTLGPWRRPVAYLSKKLDPVASGWPTCLKAVAAVALLLKDADKLTLGQNVTVIASHSLESIVRQPPDRWMTNARMTHYQSLLLNERVSFAPPAVLNPATLLPVESEATPVHRCSEILAEETGTRRDLEDQPLPGVPTWYTDGSSFITEGKRRAGAPIVDGKRTVWASSLPEGTSAQKAELVALTQALRLAEGKNINIYTDSRYAFATAHIHGAIYKQRGLLTSAGKDIKNKEEILALLEAIHLPRRVAIIHCPGHQRGSNPVATGNRRADEAAKQAALSTRVLAGTTKPAGKRTADGSEFEKRTADGSEFESPKKKAKVE

SEQ ID NO: 6211 - protein, 2113 aa, synthetic construct
MPAAKRVKLDGGDKKYSIGLDIGTNSVGWAVITDEYKVPSKKFKVLGNTDRHSIKKNLIGALLFDSGETAEATRLKRTARRRYTRRKNRICYLQEIFSNEMAKVDDSFFHRLEESFLVEEDKKHERHPIFGNIVDEVAYHEKYPTIYHLRKKLVDSTDKADLRLIYLALAHMIKFRGHFLIEGDLNPDNSDVDKLFIQLVQTYNQLFEENPINASGVDAKAILSARLSKSRRLENLIAQLPGEKKNGLFGNLIALSLGLTPNFKSNFDLAEDAKLQLSKDTYDDDLDNLLAQIGDQYADLFLAAKNLSDAILLSDILRVNTEITKAPLSASMIKRYDEHHQDLTLLKALVRQQLPEKYKEIFFDQSKNGYAGYIDGGASQEEFYKFIKPILEKMDGTEELLVKLNREDLLRKQRTFDNGSIPHQIHLGELHAILRRQEDFYPFLKDNREKIEKILTFRIPYYVGPLARGNSRFAWMTRKSEETITPWNFEEVVDKGASAQSFIERMTNFDKNLPNEKVLPKHSLLYEYFTVYNELTKVKYVTEGMRKPAFLSGEQKKAIVDLLFKTNRKVTVKQLKEDYFKKIECFDSVEISGVEDRFNASLGTYHDLLKIIKDKDFLDNEENEDILEDIVLTLTLFEDREMIEERLKTYAHLFDDKVMKQLKRRRYTGWGRLSRKLINGIRDKQSGKTILDFLKSDGFANRNFMQLIHDDSLTFKEDIQKAQVSGQGDSLHEHIANLAGSPAIKKGILQTVKVVDELVKVMGRHKPENIVIEMARENQTTQKGQKNSRERMKRIEEGIKELGSQILKEHPVENTQLQNEKLYLYYLQNGRDMYVDQELDINRLSDYDVDHIVPQSFLKDDSIDNKVLTRSDKARGKSDNVPSEEVVKKMKNYWRQLLNAKLITQRKFDNLTKAERGGLSELDKAGFIKRQLVETRQITKHVAQILDSRMNTKYDENDKLIREVKVITLKSKLVSDFRKDFQFYKVREINNYHHAHDAYLNAVVGTALIKKYPKLESEFVYGDYKVYDVRKMIAKSEQEIGKATAKYFFYSNIMNFFKTEITLANGEIRKRPLIETNGETGEIVWDKGRDFATVRKVLSMPQVNIVKKTEVQTGGFSKESILPKRNSDKLIARKKDWDPKKYGGFDSPTVAYSVLVVAKVEKGKSKKLKSVKELLGITIMERSSFEKNPIDFLEAKGYKEVKKDLIIKLPKYSLFELENGRKRMLASAGELQKGNELALPSKYVNFLYLASHYEKLKGSPEDNEQKQLFVEQHKHYLDEIIEQISEFSKRVILADANLDKVLSAYNKHRDKPIREQAENIIHLFTLTNLGAPAAFKYFDTTIDRKRYTSTKEVLDATLIHQSITGLYETRIDLSQLGGDGGGGGGSGGGGSGGGGSGGGGSGGGGSGGGGSGGVLNLEEEYRLHEKPVPSSIDPSWLQLFPTVWAERAGMGLANQVPPVVVELRSGASPVAVRQYPMSKEAREGIRPHIQKFLDLGVLVPCRSPWNTPLLPVKKPGTNDYRPVQDLREINKRVQDIHPTVPNPYNLLSSLPPSYTWYSVLDLKDAFFCLRLHPNSQPLFAFEWKDPEKGNTGQLTWTRLPQGFKNSPTLFNEALHRDLAPFRALNPQVVLLQYVDDLLVAAPTYEDCKKGTQKLLQELSKLGYRVSAKKAQLCQREVTYLGYLLKEGKRWLTPARKATVMKIPVPTTPRQVREFLGKAGFCRLFIPGFASLAAPLYPLTKPSIPFIWTEEHQQAFDHIKKALLSAPALALPDLTKPFTLYIDERAGVARGVLTQTLGPWRRPVAYLSKKLDPVASGWPTCLKAVAAVALLLKDADKLTLGQNVTVIASHSLESIVRQPPDRWMTNARMTHYQSLLLNERVSFAPPAVLNPATLLPVESEATPVHRCSEILAEETGTRRDLEDQPLPGVPTWYTDGSSFITEGKRRAGAPIVDGKRTVWASSLPEGTSAQKAELVALTQALRLAEGKNINIYTDSRYAFATAHIHGAIYKQRGWLTSAGKDIKNKEEILALLEAIHLPRRVAIIHCPGHQRGSNPVATGNRRADEAAKQAALSTRVLAGTTKPAGKRTADGSEFEKRTADGSEFESPKKKAKVE

SEQ ID NO: 6212 - protein, 2146 aa, synthetic construct
MPAAKRVKLDGGDKKYSIGLDIGTNSVGWAVITDEYKVPSKKFKVLGNTDRHSIKKNLIGALLFDSGETAEATRLKRTARRRYTRRKNRICYLQEIFSNEMAKVDDSFFHRLEESFLVEEDKKHERHPIFGNIVDEVAYHEKYPTIYHLRKKLVDSTDKADLRLIYLALAHMIKFRGHFLIEGDLNPDNSDVDKLFIQLVQTYNQLFEENPINASGVDAKAILSARLSKSRRLENLIAQLPGEKKNGLFGNLIALSLGLTPNFKSNFDLAEDAKLQLSKDTYDDDLDNLLAQIGDQYADLFLAAKNLSDAILLSDILRVNTEITKAPLSASMIKRYDEHHQDLTLLKALVRQQLPEKYKEIFFDQSKNGYAGYIDGGASQEEFYKFIKPILEKMDGTEELLVKLNREDLLRKQRTFDNGSIPHQIHLGELHAILRRQEDFYPFLKDNREKIEKILTFRIPYYVGPLARGNSRFAWMTRKSEETITPWNFEEVVDKGASAQSFIERMTNFDKNLPNEKVLPKHSLLYEYFTVYNELTKVKYVTEGMRKPAFLSGEQKKAIVDLLFKTNRKVTVKQLKEDYFKKIECFDSVEISGVEDRFNASLGTYHDLLKIIKDKDFLDNEENEDILEDIVLTLTLFEDREMIEERLKTYAHLFDDKVMKQLKRRRYTGWGRLSRKLINGIRDKQSGKTILDFLKSDGFANRNFMQLIHDDSLTFKEDIQKAQVSGQGDSLHEHIANLAGSPAIKKGILQTVKVVDELVKVMGRHKPENIVIEMARENQTTQKGQKNSRERMKRIEEGIKELGSQILKEHPVENTQLQNEKLYLYYLQNGRDMYVDQELDINRLSDYDVDHIVPQSFLKDDSIDNKVLTRSDKARGKSDNVPSEEVVKKMKNYWRQLLNAKLITQRKFDNLTKAERGGLSELDKAGFIKRQLVETRQITKHVAQILDSRMNTKYDENDKLIREVKVITLKSKLVSDFRKDFQFYKVREINNYHHAHDAYLNAVVGTALIKKYPKLESEFVYGDYKVYDVRKMIAKSEQEIGKATAKYFFYSNIMNFFKTEITLANGEIRKRPLIETNGETGEIVWDKGRDFATVRKVLSMPQVNIVKKTEVQTGGFSKESILPKRNSDKLIARKKDWDPKKYGGFDSPTVAYSVLVVAKVEKGKSKKLKSVKELLGITIMERSSFEKNPIDFLEAKGYKEVKKDLIIKLPKYSLFELENGRKRMLASAGELQKGNELALPSKYVNFLYLASHYEKLKGSPEDNEQKQLFVEQHKHYLDEIIEQISEFSKRVILADANLDKVLSAYNKHRDKPIREQAENIIHLFTLTNLGAPAAFKYFDTTIDRKRYTSTKEVLDATLIHQSITGLYETRIDLSQLGGDGGGGGGSGGGGSGGGGSGGGGSGGGGSGGGGSGGLLGRDLLTKLKAQIQFSTEGPQVTWEDRPAMCLVLNLEEEYRLHEKPVPPSIDPSWLQLFPMVWAEKAGMGLANQVPPVVVELKSDASPVAVRQYPMSKEAREGIRPHIQRFLDLGILVPCQSPWNTPLLPVKKPGTNDYRPVQDLREVNKRVQDIHPTVPNPYNLLSSLPPSHTWYSVLDLKDAFFCLKLHPNSQPLFAFEWRDPEKGNTGQLTWTRLPQGFKNSPTLFNEALHRDLASFRALNPQVVMLQYVDDLLVAAPTYRDCKEGTRRLLQELSKLGYRVSAKKAQLCREEVTYLGYLLKGGKRWLTPARKATVMKIPTPTTPRQVREFLGTAGFCRLWIPGFASLAAPLYPLTRPKVPFTWTEAHQEAFGRIKEALLSAPALALPDLTKPFALYVDEKEGVARGVLTQTLGPWRRPVAYLSKKLDPVASGWPTCLKAIAAVALLLKDADKLTLGQNVLVIAPHNLESIVRQPPDRWMTNARMTHYQSLLLNERVSFAPPAILNPATLLPVESDDTPIHICSEILAEETGTRPDLRDQPLPGVPAWYTDGSSFIMDGRRQAGAAIVDNKRTVWASNLPEGTSAQKAELIALTQALRLAEGKSINIYTDSRYAFATAHVHGAIYKQRGWLTSAGKDIKNKEEILALLEAIHLPKRVAIIHCPGHQRGTDPVATGNRKADEAAKQAAQSTRILTETTKNAGKRTADGSEFEKRTADGSEFESPKKKAKVE

SEQ ID NO: 6213 - protein, 2115 aa, synthetic construct
MPAAKRVKLDGGDKKYSIGLDIGTNSVGWAVITDEYKVPSKKFKVLGNTDRHSIKKNLIGALLFDSGETAEATRLKRTARRRYTRRKNRICYLQEIFSNEMAKVDDSFFHRLEESFLVEEDKKHERHPIFGNIVDEVAYHEKYPTIYHLRKKLVDSTDKADLRLIYLALAHMIKFRGHFLIEGDLNPDNSDVDKLFIQLVQTYNQLFEENPINASGVDAKAILSARLSKSRRLENLIAQLPGEKKNGLFGNLIALSLGLTPNFKSNFDLAEDAKLQLSKDTYDDDLDNLLAQIGDQYADLFLAAKNLSDAILLSDILRVNTEITKAPLSASMIKRYDEHHQDLTLLKALVRQQLPEKYKEIFFDQSKNGYAGYIDGGASQEEFYKFIKPILEKMDGTEELLVKLNREDLLRKQRTFDNGSIPHQIHLGELHAILRRQEDFYPFLKDNREKIEKILTFRIPYYVGPLARGNSRFAWMTRKSEETITPWNFEEVVDKGASAQSFIERMTNFDKNLPNEKVLPKHSLLYEYFTVYNELTKVKYVTEGMRKPAFLSGEQKKAIVDLLFKTNRKVTVKQLKEDYFKKIECFDSVEISGVEDRFNASLGTYHDLLKIIKDKDFLDNEENEDILEDIVLTLTLFEDREMIEERLKTYAHLFDDKVMKQLKRRRYTGWGRLSRKLINGIRDKQSGKTILDFLKSDGFANRNFMQLIHDDSLTFKEDIQKAQVSGQGDSLHEHIANLAGSPAIKKGILQTVKVVDELVKVMGRHKPENIVIEMARENQTTQKGQKNSRERMKRIEEGIKELGSQILKEHPVENTQLQNEKLYLYYLQNGRDMYVDQELDINRLSDYDVDHIVPQSFLKDDSIDNKVLTRSDKARGKSDNVPSEEVVKKMKNYWRQLLNAKLITQRKFDNLTKAERGGLSELDKAGFIKRQLVETRQITKHVAQILDSRMNTKYDENDKLIREVKVITLKSKLVSDFRKDFQFYKVREINNYHHAHDAYLNAVVGTALIKKYPKLESEFVYGDYKVYDVRKMIAKSEQEIGKATAKYFFYSNIMNFFKTEITLANGEIRKRPLIETNGETGEIVWDKGRDFATVRKVLSMPQVNIVKKTEVQTGGFSKESILPKRNSDKLIARKKDWDPKKYGGFDSPTVAYSVLVVAKVEKGKSKKLKSVKELLGITIMERSSFEKNPIDFLEAKGYKEVKKDLIIKLPKYSLFELENGRKRMLASAGELQKGNELALPSKYVNFLYLASHYEKLKGSPEDNEQKQLFVEQHKHYLDEIIEQISEFSKRVILADANLDKVLSAYNKHRDKPIREQAENIIHLFTLTNLGAPAAFKYFDTTIDRKRYTSTKEVLDATLIHQSITGLYETRIDLSQLGGDGGGGGGSGGGGSGGGGSGGGGSGGGGSGGGGSGGTLNLEDEYRLYETSAEPEVSPGSTWLSDFPQAWAETGGMGLAVRQAPLIIPLKATSTPVSIKQYPMSQEAKLGIKPHIQRLLDQGILVPCQSPWNTPLLPVKKPGTNDYRPVQDLREVNKRVEDIHPTVPNPYNLLSGLPPSHRWYTVLDLKDAFFCLRLHPTSQPLFAFEWRDPGMGISGQLTWTRLPQGFKNSPTLFNEALHRDLADFRIQHPDLILLQYVDDILLAATSELDCQQGTRALLLTLGNLGYRASAKKAQLCQKQVKYLGYLLKEGQRWLTEARKETVMGQPTPKTPRQLREFLGKAGFCRLFIPGFAEMAAPLYPLTKPGTLFNWGPDQQKAYQEIKQALLTAPALGLPDLTKPFELFVDEKQGYAKGVLTQKLGPWRRPVAYLSKKLDPVAAGWPPCLRMVAAIAVLRKDAGKLTMGQPLVILAPHAVEALVKQPPDRWLSNARMTHYQAMLLDTDRVQFGPVVALNPATLLPLPEEGAPHDCLEILAETHGTRPDLTDQPIPDADHTWYTDGSSFLQEGQRKAGAAVTTETEVIWARALPAGTSAQRAELIALTQALKMAEGKRLNVYTDSRYAFATAHIHGEIYRRRGWLTSEGREIKNKSEILALLKALFLPKRLSIIHCLGHQKGDSAEARGNRLADQAAREAAIKTPPDTSTLLAGKRTADGSEFEKRTADGSEFESPKKKAKVE

SEQ ID NO: 6214 - protein, 2115 aa, synthetic construct
MPAAKRVKLDGGDKKYSIGLDIGTNSVGWAVITDEYKVPSKKFKVLGNTDRHSIKKNLIGALLFDSGETAEATRLKRTARRRYTRRKNRICYLQEIFSNEMAKVDDSFFHRLEESFLVEEDKKHERHPIFGNIVDEVAYHEKYPTIYHLRKKLVDSTDKADLRLIYLALAHMIKFRGHFLIEGDLNPDNSDVDKLFIQLVQTYNQLFEENPINASGVDAKAILSARLSKSRRLENLIAQLPGEKKNGLFGNLIALSLGLTPNFKSNFDLAEDAKLQLSKDTYDDDLDNLLAQIGDQYADLFLAAKNLSDAILLSDILRVNTEITKAPLSASMIKRYDEHHQDLTLLKALVRQQLPEKYKEIFFDQSKNGYAGYIDGGASQEEFYKFIKPILEKMDGTEELLVKLNREDLLRKQRTFDNGSIPHQIHLGELHAILRRQEDFYPFLKDNREKIEKILTFRIPYYVGPLARGNSRFAWMTRKSEETITPWNFEEVVDKGASAQSFIERMTNFDKNLPNEKVLPKHSLLYEYFTVYNELTKVKYVTEGMRKPAFLSGEQKKAIVDLLFKTNRKVTVKQLKEDYFKKIECFDSVEISGVEDRFNASLGTYHDLLKIIKDKDFLDNEENEDILEDIVLTLTLFEDREMIEERLKTYAHLFDDKVMKQLKRRRYTGWGRLSRKLINGIRDKQSGKTILDFLKSDGFANRNFMQLIHDDSLTFKEDIQKAQVSGQGDSLHEHIANLAGSPAIKKGILQTVKVVDELVKVMGRHKPENIVIEMARENQTTQKGQKNSRERMKRIEEGIKELGSQILKEHPVENTQLQNEKLYLYYLQNGRDMYVDQELDINRLSDYDVDHIVPQSFLKDDSIDNKVLTRSDKARGKSDNVPSEEVVKKMKNYWRQLLNAKLITQRKFDNLTKAERGGLSELDKAGFIKRQLVETRQITKHVAQILDSRMNTKYDENDKLIREVKVITLKSKLVSDFRKDFQFYKVREINNYHHAHDAYLNAVVGTALIKKYPKLESEFVYGDYKVYDVRKMIAKSEQEIGKATAKYFFYSNIMNFFKTEITLANGEIRKRPLIETNGETGEIVWDKGRDFATVRKVLSMPQVNIVKKTEVQTGGFSKESILPKRNSDKLIARKKDWDPKKYGGFDSPTVAYSVLVVAKVEKGKSKKLKSVKELLGITIMERSSFEKNPIDFLEAKGYKEVKKDLIIKLPKYSLFELENGRKRMLASAGELQKGNELALPSKYVNFLYLASHYEKLKGSPEDNEQKQLFVEQHKHYLDEIIEQISEFSKRVILADANLDKVLSAYNKHRDKPIREQAENIIHLFTLTNLGAPAAFKYFDTTIDRKRYTSTKEVLDATLIHQSITGLYETRIDLSQLGGDGGGGGGSGGGGSGGGGSGGGGSGGGGSGGGGSGGTLNIEDEYRLHETSKGPDVPLGSTWLSDFPQAWAETGGMGLAVRQAPLIIPLKATSTPVSIKQYPMSQEARLGIKPHIQRLLDQGILVPCQSPWNTPLLPVKKPGTNDYRPVQDLREVNKRVEDIHPTVPNPYNLLSGLPPSHQWYTVLDLKDAFFCLRLHPTSQSLFAFEWRDPEMGISGQLTWTRLPQGFKNSPTLFNEALHRDLADFRIQHPDLILLQYVDDLLLAATSELDCQQGTRALLQTLGDLGYRASAKKAQICQKQVKYLGYLLKEGQRWLTEARKETVMGQPTPKTPRQLREFLGTAGFCRLWIPGFAEMAAPLYPLTKPGTLFEWGPDQQKAYQEIKQALLTAPALGLPDLTKPFELFVDEKQGYAKGVLTQKLGPWRRPVAYLSKKLDPVAAGWPPCLRMVAAIAVLTKDAGKLTMGQPLVILAPHAVEALVKQPPDRWLSNARMTHYQALLLDTDRVQFGPIVALNPATLLPLPEEGLQHDCLDILAEAHGTRPDLTDQPLPDADHTWYTDGSSFLQEGQRKAGAAVTTETEVVWAKALPAGTSAQRAELIALTQALKMAEGKKLNVYTDSRYAFATAHIHGEIYRRRGWLTSEGKEIKNKDEILALLKALFLPKRLSIIHCPGHQKGNRAEARGNRMADQAAREVATRETPETSTLLAGKRTADGSEFEKRTADGSEFESPKKKAKVE

SEQ ID NO: 6215 - protein, 2115 aa, synthetic construct
MPAAKRVKLDGGDKKYSIGLDIGTNSVGWAVITDEYKVPSKKFKVLGNTDRHSIKKNLIGALLFDSGETAEATRLKRTARRRYTRRKNRICYLQEIFSNEMAKVDDSFFHRLEESFLVEEDKKHERHPIFGNIVDEVAYHEKYPTIYHLRKKLVDSTDKADLRLIYLALAHMIKFRGHFLIEGDLNPDNSDVDKLFIQLVQTYNQLFEENPINASGVDAKAILSARLSKSRRLENLIAQLPGEKKNGLFGNLIALSLGLTPNFKSNFDLAEDAKLQLSKDTYDDDLDNLLAQIGDQYADLFLAAKNLSDAILLSDILRVNTEITKAPLSASMIKRYDEHHQDLTLLKALVRQQLPEKYKEIFFDQSKNGYAGYIDGGASQEEFYKFIKPILEKMDGTEELLVKLNREDLLRKQRTFDNGSIPHQIHLGELHAILRRQEDFYPFLKDNREKIEKILTFRIPYYVGPLARGNSRFAWMTRKSEETITPWNFEEVVDKGASAQSFIERMTNFDKNLPNEKVLPKHSLLYEYFTVYNELTKVKYVTEGMRKPAFLSGEQKKAIVDLLFKTNRKVTVKQLKEDYFKKIECFDSVEISGVEDRFNASLGTYHDLLKIIKDKDFLDNEENEDILEDIVLTLTLFEDREMIEERLKTYAHLFDDKVMKQLKRRRYTGWGRLSRKLINGIRDKQSGKTILDFLKSDGFANRNFMQLIHDDSLTFKEDIQKAQVSGQGDSLHEHIANLAGSPAIKKGILQTVKVVDELVKVMGRHKPENIVIEMARENQTTQKGQKNSRERMKRIEEGIKELGSQILKEHPVENTQLQNEKLYLYYLQNGRDMYVDQELDINRLSDYDVDHIVPQSFLKDDSIDNKVLTRSDKARGKSDNVPSEEVVKKMKNYWRQLLNAKLITQRKFDNLTKAERGGLSELDKAGFIKRQLVETRQITKHVAQILDSRMNTKYDENDKLIREVKVITLKSKLVSDFRKDFQFYKVREINNYHHAHDAYLNAVVGTALIKKYPKLESEFVYGDYKVYDVRKMIAKSEQEIGKATAKYFFYSNIMNFFKTEITLANGEIRKRPLIETNGETGEIVWDKGRDFATVRKVLSMPQVNIVKKTEVQTGGFSKESILPKRNSDKLIARKKDWDPKKYGGFDSPTVAYSVLVVAKVEKGKSKKLKSVKELLGITIMERSSFEKNPIDFLEAKGYKEVKKDLIIKLPKYSLFELENGRKRMLASAGELQKGNELALPSKYVNFLYLASHYEKLKGSPEDNEQKQLFVEQHKHYLDEIIEQISEFSKRVILADANLDKVLSAYNKHRDKPIREQAENIIHLFTLTNLGAPAAFKYFDTTIDRKRYTSTKEVLDATLIHQSITGLYETRIDLSQLGGDGGGGGGSGGGGSGGGGSGGGGSGGGGSGGGGSGGTLNIEDEHRLHETSKEPDVSLGSTWLSDFPQAWAETGGMGLAVRQAPLIIPLKATSTPVSIKQYPMSQEARLGIKPHIQRLLDQGILVPCQSPWNTPLLPVKKPGTNDYRPVQDLREVNKRVEDIHPTVPNPYNLLSGLPPSHQWYTVLDLKDAFFCLRLHPTSQPLFAFEWRDPEMGISGQLTWTRLPQGFKNSPTLFDEALHRDLADFRIQHPDLILLQYVDDLLLAATSELDCQQGTRALLQTLGNLGYRASAKKAQICQKQVKYLGYLLKEGQRWLTEARKETVMGQPTPKTPRQLREFLGTAGFCRLWIPGFAEMAAPLYPLTKTGTLFNWGPDQQKAYQEIKQALLTAPALGLPDLTKPFELFVDEKQGYAKGVLTQKLGPWRRPVAYLSKKLDPVAAGWPPCLRMVAAIAVLTKDAGKLTMGQPLVILAPHAVEALVKQPPDRWLSNARMTHYQALLLDTDRVQFGPVVALNPATLLPLPEEGLQHNCLDILAEAHGTRPDLTDQPLPDADHTWYTDGSSLLQEGQRKAGAAVTTETEVIWAKALPAGTSAQRAELIALTQALKMAEGKKLNVYTDSRYAFATAHIHGEIYRRRGLLTSEGKEIKNKDEILALLKALFLPKRLSIIHCPGHQKGHSAEARGNRMADQAARKAAITETPDTSTLLAGKRTADGSEFEKRTADGSEFESPKKKAKVE

SEQ ID NO: 6216 - protein, 2115 aa, synthetic construct; identical to SEQ ID NO: 6215

SEQ ID NO: 6217 - protein, 2115 aa, synthetic construct
MPAAKRVKLDGGDKKYSIGLDIGTNSVGWAVITDEYKVPSKKFKVLGNTDRHSIKKNLIGALLFDSGETAEATRLKRTARRRYTRRKNRICYLQEIFSNEMAKVDDSFFHRLEESFLVEEDKKHERHPIFGNIVDEVAYHEKYPTIYHLRKKLVDSTDKADLRLIYLALAHMIKFRGHFLIEGDLNPDNSDVDKLFIQLVQTYNQLFEENPINASGVDAKAILSARLSKSRRLENLIAQLPGEKKNGLFGNLIALSLGLTPNFKSNFDLAEDAKLQLSKDTYDDDLDNLLAQIGDQYADLFLAAKNLSDAILLSDILRVNTEITKAPLSASMIKRYDEHHQDLTLLKALVRQQLPEKYKEIFFDQSKNGYAGYIDGGASQEEFYKFIKPILEKMDGTEELLVKLNREDLLRKQRTFDNGSIPHQIHLGELHAILRRQEDFYPFLKDNREKIEKILTFRIPYYVGPLARGNSRFAWMTRKSEETITPWNFEEVVDKGASAQSFIERMTNFDKNLPNEKVLPKHSLLYEYFTVYNELTKVKYVTEGMRKPAFLSGEQKKAIVDLLFKTNRKVTVKQLKEDYFKKIECFDSVEISGVEDRFNASLGTYHDLLKIIKDKDFLDNEENEDILEDIVLTLTLFEDREMIEERLKTYAHLFDDKVMKQLKRRRYTGWGRLSRKLINGIRDKQSGKTILDFLKSDGFANRNFMQLIHDDSLTFKEDIQKAQVSGQGDSLHEHIANLAGSPAIKKGILQTVKVVDELVKVMGRHKPENIVIEMARENQTTQKGQKNSRERMKRIEEGIKELGSQILKEHPVENTQLQNEKLYLYYLQNGRDMYVDQELDINRLSDYDVDHIVPQSFLKDDSIDNKVLTRSDKARGKSDNVPSEEVVKKMKNYWRQLLNAKLITQRKFDNLTKAERGGLSELDKAGFIKRQLVETRQITKHVAQILDSRMNTKYDENDKLIREVKVITLKSKLVSDFRKDFQFYKVREINNYHHAHDAYLNAVVGTALIKKYPKLESEFVYGDYKVYDVRKMIAKSEQEIGKATAKYFFYSNIMNFFKTEITLANGEIRKRPLIETNGETGEIVWDKGRDFATVRKVLSMPQVNIVKKTEVQTGGFSKESILPKRNSDKLIARKKDWDPKKYGGFDSPTVAYSVLVVAKVEKGKSKKLKSVKELLGITIMERSSFEKNPIDFLEAKGYKEVKKDLIIKLPKYSLFELENGRKRMLASAGELQKGNELALPSKYVNFLYLASHYEKLKGSPEDNEQKQLFVEQHKHYLDEIIEQISEFSKRVILADANLDKVLSAYNKHRDKPIREQAENIIHLFTLTNLGAPAAFKYFDTTIDRKRYTSTKEVLDATLIHQSITGLYETRIDLSQLGGDGGGGGGSGGGGSGGGGSGGGGSGGGGSGGGGSGGTLNIEDEYRLHEISTEPDVSPGSTWLSDFPQAWAETGGMGLAVRQAPLIIPLKATSTPVSIKQYPMSQEAKLGIKPHIQRLLDQGILVPCQSPWNTPLLPVKKPGTNDYRPVQGLREVNKRVEDIHPTVPNPYNLLSGLPTSHRWYTVLDLKDAFFCLRLHPTSQPLFASEWRDPGMGISGQLTWTRLPQGFKNSPTLFNEALHRGLADFRIQHPDLILLQYVDDLLLAATSELDCQQGTRALLKTLGNLGYRASAKKAQICQKQVKYLGYLLREGQRWLTEARKETVMGQPTPKTPRQLREFLGTAGFCRLWIPRFAEMAAPLYPLTKPGTLFNWGPDQQKAYHEIKQALLTAPALGLPDLTKPFELFVDEKQGYAKGVLTQKLGPWRRPVAYLSKKLDPVAAGWPPCLRMVAAIAVLTKDAGKLTMGQPLVILAPHAVEALVKQPPDRWLSNARMTHYQAMLLDTDRVQFGPVVALNPATLLPLPEEGAPHDCLEILAETHGTEPDLTDQPIPDADHTWYTDGSSFLQEGQRKAGAAVTTETEVIWARALPAGTSAQRAELIALTQALKMAEGKRLNVYTDSRYAFATAHIHGEIYKRRGWLTSEGREIKNKSEILALLKALFLPKRLSIIHCLGHQKGDSAEARGNRLADQAAREAAIKTPPDTSTLLAGKRTADGSEFEKRTADGSEFESPKKKAKVE

SEQ ID NO: 6218 - protein, 2109 aa, synthetic construct
MPAAKRVKLDGGDKKYSIGLDIGTNSVGWAVITDEYKVPSKKFKVLGNTDRHSIKKNLIGALLFDSGETAEATRLKRTARRRYTRRKNRICYLQEIFSNEMAKVDDSFFHRLEESFLVEEDKKHERHPIFGNIVDEVAYHEKYPTIYHLRKKLVDSTDKADLRLIYLALAHMIKFRGHFLIEGDLNPDNSDVDKLFIQLVQTYNQLFEENPINASGVDAKAILSARLSKSRRLENLIAQLPGEKKNGLFGNLIALSLGLTPNFKSNFDLAEDAKLQLSKDTYDDDLDNLLAQIGDQYADLFLAAKNLSDAILLSDILRVNTEITKAPLSASMIKRYDEHHQDLTLLKALVRQQLPEKYKEIFFDQSKNGYAGYIDGGASQEEFYKFIKPILEKMDGTEELLVKLNREDLLRKQRTFDNGSIPHQIHLGELHAILRRQEDFYPFLKDNREKIEKILTFRIPYYVGPLARGNSRFAWMTRKSEETITPWNFEEVVDKGASAQSFIERMTNFDKNLPNEKVLPKHSLLYEYFTVYNELTKVKYVTEGMRKPAFLSGEQKKAIVDLLFKTNRKVTVKQLKEDYFKKIECFDSVEISGVEDRFNASLGTYHDLLKIIKDKDFLDNEENEDILEDIVLTLTLFEDREMIEERLKTYAHLFDDKVMKQLKRRRYTGWGRLSRKLINGIRDKQSGKTILDFLKSDGFANRNFMQLIHDDSLTFKEDIQKAQVSGQGDSLHEHIANLAGSPAIKKGILQTVKVVDELVKVMGRHKPENIVIEMARENQTTQKGQKNSRERMKRIEEGIKELGSQILKEHPVENTQLQNEKLYLYYLQNGRDMYVDQELDINRLSDYDVDHIVPQSFLKDDSIDNKVLTRSDKARGKSDNVPSEEVVKKMKNYWRQLLNAKLITQRKFDNLTKAERGGLSELDKAGFIKRQLVETRQITKHVAQILDSRMNTKYDENDKLIREVKVITLKSKLVSDFRKDFQFYKVREINNYHHAHDAYLNAVVGTALIKKYPKLESEFVYGDYKVYDVRKMIAKSEQEIGKATAKYFFYSNIMNFFKTEITLANGEIRKRPLIETNGETGEIVWDKGRDFATVRKVLSMPQVNIVKKTEVQTGGFSKESILPKRNSDKLIARKKDWDPKKYGGFDSPTVAYSVLVVAKVEKGKSKKLKSVKELLGITIMERSSFEKNPIDFLEAKGYKEVKKDLIIKLPKYSLFELENGRKRMLASAGELQKGNELALPSKYVNFLYLASHYEKLKGSPEDNEQKQLFVEQHKHYLDEIIEQISEFSKRVILADANLDKVLSAYNKHRDKPIREQAENIIHLFTLTNLGAPAAFKYFDTTIDRKRYTSTKEVLDATLIHQSITGLYETRIDLSQLGGDGGGGGGSGGGGSGGGGSGGGGSGGGGSGGGGSGGTLQLDDEYRLYSPLVKPDQNIQFWLEQFPQAWAETAGMGLAKQVPPQVIQLKASATPVSVRQYPLSKEAQEGIRPHVQRLIQQGILVPVQSPWNTPLLPVRKPGTNDYRPVQDLREVNKRVQDIHPTVPNPYNLLCALPPQRSWYTVLDLKDAFFCLRLHPTSQPLFAFEWRDPGTGRTGQLTWTRLPQGFKNSPTIFDEALHRDLANFRIQHPQVTLLQYVDDLLLAGATKQDCLEGTKALLLELSDLGYRASAKKAQICRREVTYLGYSLRDGQRWLTEARKKTVVQIPAPTTAKQVREFLGTAGFCRLWIPGFATLAAPLYPLTKEKGEFSWAPEHQKAFDAIKKALLSAPALALPDVTKPFTLYVDERKGVARGVLTQTLGPWRRPVAYLSKKLDPVASGWPVCLKAIAAVAILVKDADKLTLGQNITVIAPHALENIVRQPPDRWMTNARMTHYQSLLLTERVTFAPPAALNPATLLPEETDEPVTHDCHQLLIEETGVRKDLTDIPLTGEVLTWFTDGSSYVVEGKRMAGAAVVDGTRTIWASSLPEGTSAQKAELMALTQALRLAEGKSINIYTDSRYAFATAHVHGAIYKQRGLLTSAGREIKNKEEILSLLEALHLPKRLAIIHCPGHQKAKDPISRGNQMADRVAKQAAQGVNLLAGKRTADGSEFEKRTADGSEFESPKKKAKVE

SEQ ID NO: 6219 - protein, 2109 aa, synthetic construct
MPAAKRVKLDGGDKKYSIGLDIGTNSVGWAVITDEYKVPSKKFKVLGNTDRHSIKKNLIGALLFDSGETAEATRLKRTARRRYTRRKNRICYLQEIFSNEMAKVDDSFFHRLEESFLVEEDKKHERHPIFGNIVDEVAYHEKYPTIYHLRKKLVDSTDKADLRLIYLALAHMIKFRGHFLIEGDLNPDNSDVDKLFIQLVQTYNQLFEENPINASGVDAKAILSARLSKSRRLENLIAQLPGEKKNGLFGNLIALSLGLTPNFKSNFDLAEDAKLQLSKDTYDDDLDNLLAQIGDQYADLFLAAKNLSDAILLSDILRVNTEITKAPLSASMIKRYDEHHQDLTLLKALVRQQLPEKYKEIFFDQSKNGYAGYIDGGASQEEFYKFIKPILEKMDGTEELLVKLNREDLLRKQRTFDNGSIPHQIHLGELHAILRRQEDFYPFLKDNREKIEKILTFRIPYYVGPLARGNSRFAWMTRKSEETITPWNFEEVVDKGASAQSFIERMTNFDKNLPNEKVLPKHSLLYEYFTVYNELTKVKYVTEGMRKPAFLSGEQKKAIVDLLFKTNRKVTVKQLKEDYFKKIECFDSVEISGVEDRFNASLGTYHDLLKIIKDKDFLDNEENEDILEDIVLTLTLFEDREMIEERLKTYAHLFDDKVMKQLKRRRYTGWGRLSRKLINGIRDKQSGKTILDFLKSDGFANRNFMQLIHDDSLTFKEDIQKAQVSGQGDSLHEHIANLAGSPAIKKGILQTVKVVDELVKVMGRHKPENIVIEMARENQTTQKGQKNSRERMKRIEEGIKELGSQILKEHPVENTQLQNEKLYLYYLQNGRDMYVDQELDINRLSDYDVDHIVPQSFLKDDSIDNKVLTRSDKARGKSDNVPSEEVVKKMKNYWRQLLNAKLITQRKFDNLTKAERGGLSELDKAGFIKRQLVETRQITKHVAQILDSRMNTKYDENDKLIREVKVITLKSKLVSDFRKDFQFYKVREINNYHHAHDAYLNAVVGTALIKKYPKLESEFVYGDYKVYDVRKMIAKSEQEIGKATAKYFFYSNIMNFFKTEITLANGEIRKRPLIETNGETGEIVWDKGRDFATVRKVLSMPQVNIVKKTEVQTGGFSKESILPKRNSDKLIARKKDWDPKKYGGFDSPTVAYSVLVVAKVEKGKSKKLKSVKELLGITIMERSSFEKNPIDFLEAKGYKEVKKDLIIKLPKYSLFELENGRKRMLASAGELQKGNELALPSKYVNFLYLASHYEKLKGSPEDNEQKQLFVEQHKHYLDEIIEQISEFSKRVILADANLDKVLSAYNKHRDKPIREQAENIIHLFTLTNLGAPAAFKYFDTTIDRKRYTSTKEVLDATLIHQSITGLYETRIDLSQLGGDGGGGGGSGGGGSGGGGSGGGGSGGGGSGGGGSGGTLQLDDEYRLYSPLVKPDQNIQFWLEQFPQAWAETAGMGLAKQVPPQVIQLKASATPVSVRQYPLSKEAQEGIRPHVQRLIQQGILVPVQSPWNTPLLPVRKPGTNDYRPVQDLREVNKRVQDIHPTVPNPYNLLCALPPQRSWYTVLDLKDAFFCLRLHPTSQPLFAFEWRDPGTGRTGQLTWTRLPQGFKNSPTIFNEALHRDLANFRIQHPQVTLLQYVDDLLLAGATKQDCLEGTKALLLELSDLGYRASAKKAQICRREVTYLGYSLRDGQRWLTEARKKTVVQIPAPTTAKQVREFLGTAGFCRLWIPGFATLAAPLYPLTKPKGEFSWAPEHQKAFDAIKKALLSAPALALPDVTKPFTLYVDERKGVARGVLTQTLGPWRRPVAYLSKKLDPVASGWPVCLKAIAAVAILVKDADKLTLGQNITVIAPHALENIVRQPPDRWMTNARMTHYQSLLLTERVTFAPPAALNPATLLPEETDEPVTHDCHQLLIEETGVRKDLTDIPLTGEVLTWFTDGSSYVVEGKRMAGAAVVDGTRTIWASSLPEGTSAQKAELMALTQALRLAEGKSINIYTDSRYAFATAHVHGAIYKQRGWLTSAGREIKNKEEILSLLEALHLPKRLAIIHCPGHQKAKDPISRGNQMADRVAKQAAQGVNLLAGKRTADGSEFEKRTADGSEFESPKKKAKVE

SEQ ID NO: 6220 - protein, 2106 aa, synthetic construct
MPAAKRVKLDGGDKKYSIGLDIGTNSVGWAVITDEYKVPSKKFKVLGNTDRHSIKKNLIGALLFDSGETAEATRLKRTARRRYTRRKNRICYLQEIFSNEMAKVDDSFFHRLEESFLVEEDKKHERHPIFGNIVDEVAYHEKYPTIYHLRKKLVDSTDKADLRLIYLALAHMIKFRGHFLIEGDLNPDNSDVDKLFIQLVQTYNQLFEENPINASGVDAKAILSARLSKSRRLENLIAQLPGEKKNGLFGNLIALSLGLTPNFKSNFDLAEDAKLQLSKDTYDDDLDNLLAQIGDQYADLFLAAKNLSDAILLSDILRVNTEITKAPLSASMIKRYDEHHQDLTLLKALVRQQLPEKYKEIFFDQSKNGYAGYIDGGASQEEFYKFIKPILEKMDGTEELLVKLNREDLLRKQRTFDNGSIPHQIHLGELHAILRRQEDFYPFLKDNREKIEKILTFRIPYYVGPLARGNSRFAWMTRKSEETITPWNFEEVVDKGASAQSFIERMTNFDKNLPNEKVLPKHSLLYEYFTVYNELTKVKYVTEGMRKPAFLSGEQKKAIVDLLFKTNRKVTVKQLKEDYFKKIECFDSVEISGVEDRFNASLGTYHDLLKIIKDKDFLDNEENEDILEDIVLTLTLFEDREMIEERLKTYAHLFDDKVMKQLKRRRYTGWGRLSRKLINGIRDKQSGKTILDFLKSDGFANRNFMQLIHDDSLTFKEDIQKAQVSGQGDSLHEHIANLAGSPAIKKGILQTVKVVDELVKVMGRHKPENIVIEMARENQTTQKGQKNSRERMKRIEEGIKELGSQILKEHPVENTQLQNEKLYLYYLQNGRDMYVDQELDINRLSDYDVDHIVPQSFLKDDSIDNKVLTRSDKARGKSDNVPSEEVVKKMKNYWRQLLNAKLITQRKFDNLTKAERGGLSELDKAGFIKRQLVETRQITKHVAQILDSRMNTKYDENDKLIREVKVITLKSKLVSDFRKDFQFYKVREINNYHHAHDAYLNAVVGTALIKKYPKLESEFVYGDYKVYDVRKMIAKSEQEIGKATAKYFFYSNIMNFFKTEITLANGEIRKRPLIETNGETGEIVWDKGRDFATVRKVLSMPQVNIVKKTEVQTGGFSKESILPKRNSDKLIARKKDWDPKKYGGFDSPTVAYSVLVVAKVEKGKSKKLKSVKELLGITIMERSSFEKNPIDFLEAKGYKEVKKDLIIKLPKYSLFELENGRKRMLASAGELQKGNELALPSKYVNFLYLASHYEKLKGSPEDNEQKQLFVEQHKHYLDEIIEQISEFSKRVILADANLDKVLSAYNKHRDKPIREQAENIIHLFTLTNLGAPAAFKYFDTTIDRKRYTSTKEVLDATLIHQSITGLYETRIDLSQLGGDGGGGGGSGGGGSGGGGSGGGGSGGGGSGGGGSGGVPWLMKKPLQLTVLVPLHEYQERLLQQTALPKEQKELLQKLFLKYDALWQHWENQVGHRRIKPHNIATGTLAPRPQKQYPINPKAKPSIQIVIDDLLKQGVLIQQNSTMNTPVYPVPKPDGKWRMVLDYREVNKTIPLIAAQNQHSAGILSSIYRGKYKTTLDLTNGFWAHPITPESYWLTAFTWQGKQYCWTRLPQGFLNSPALFNADVVDLLKEIPNVQAYVDDIYISHDDPQEHLEQLEKIFSILLNAGYVVSLKKSEIAQREVEFLGFNITKEGRGLTDTFKQKLLNITPPKDLKQLQSILGKLNFARNFIPNYSELVKPLYTIVAPANGKFISWTEDNSNQLQHIISVLNQADNLEERNPETRLIIKVNSSPSAGYIRYYNEGSKRPIMYVNYIFSKAEAKFTQTEKLLTTMHKGLIKAMDLAMGQEILVYSPIVSMTKIQRTPLPERKALPVRWITWMTYLEDPRIQFHYDKSLPELQQIPNVTEDVIAKTKHPSEFAMVFYTDGSAIKHPDVNKSHSAGMGIAQVQFIPEYKIVHQWSIPLGDHTAQLAEIAAVEFACKKALKISGPVLIVTDSFYVAESANKELPYWKSNGFLNNKKKPLRHVSKWKSIAECLQLKPDIIIMHEKGHQQPMTTLHTEGNNLADKLATQGSYVVHAGKRTADGSEFEKRTADGSEFESPKKKAKVE

SEQ ID NO: 6221 - protein, 2195 aa, synthetic construct
MPAAKRVKLDGGDKKYSIGLDIGTNSVGWAVITDEYKVPSKKFKVLGNTDRHSIKKNLIGALLFDSGETAEATRLKRTARRRYTRRKNRICYLQEIFSNEMAKVDDSFFHRLEESFLVEEDKKHERHPIFGNIVDEVAYHEKYPTIYHLRKKLVDSTDKADLRLIYLALAHMIKFRGHFLIEGDLNPDNSDVDKLFIQLVQTYNQLFEENPINASGVDAKAILSARLSKSRRLENLIAQLPGEKKNGLFGNLIALSLGLTPNFKSNFDLAEDAKLQLSKDTYDDDLDNLLAQIGDQYADLFLAAKNLSDAILLSDILRVNTEITKAPLSASMIKRYDEHHQDLTLLKALVRQQLPEKYKEIFFDQSKNGYAGYIDGGASQEEFYKFIKPILEKMDGTEELLVKLNREDLLRKQRTFDNGSIPHQIHLGELHAILRRQEDFYPFLKDNREKIEKILTFRIPYYVGPLARGNSRFAWMTRKSEETITPWNFEEVVDKGASAQSFIERMTNFDKNLPNEKVLPKHSLLYEYFTVYNELTKVKYVTEGMRKPAFLSGEQKKAIVDLLFKTNRKVTVKQLKEDYFKKIECFDSVEISGVEDRFNASLGTYHDLLKIIKDKDFLDNEENEDILEDIVLTLTLFEDREMIEERLKTYAHLFDDKVMKQLKRRRYTGWGRLSRKLINGIRDKQSGKTILDFLKSDGFANRNFMQLIHDDSLTFKEDIQKAQVSGQGDSLHEHIANLAGSPAIKKGILQTVKVVDELVKVMGRHKPENIVIEMARENQTTQKGQKNSRERMKRIEEGIKELGSQILKEHPVENTQLQNEKLYLYYLQNGRDMYVDQELDINRLSDYDVDHIVPQSFLKDDSIDNKVLTRSDKARGKSDNVPSEEVVKKMKNYWRQLLNAKLITQRKFDNLTKAERGGLSELDKAGFIKRQLVETRQITKHVAQILDSRMNTKYDENDKLIREVKVITLKSKLVSDFRKDFQFYKVREINNYHHAHDAYLNAVVGTALIKKYPKLESEFVYGDYKVYDVRKMIAKSEQEIGKATAKYFFYSNIMNFFKTEITLANGEIRKRPLIETNGETGEIVWDKGRDFATVRKVLSMPQVNIVKKTEVQTGGFSKESILPKRNSDKLIARKKDWDPKKYGGFDSPTVAYSVLVVAKVEKGKSKKLKSVKELLGITIMERSSFEKNPIDFLEAKGYKEVKKDLIIKLPKYSLFELENGRKRMLASAGELQKGNELALPSKYVNFLYLASHYEKLKGSPEDNEQKQLFVEQHKHYLDEIIEQISEFSKRVILADANLDKVLSAYNKHRDKPIREQAENIIHLFTLTNLGAPAAFKYFDTTIDRKRYTSTKEVLDATLIHQSITGLYETRIDLSQLGGDGGGGGGSGGGGSGGGGSGGGGSGGGGSGGGGSGGMDPLQLLQPLEAEIKGTKLKAHWNSGATITCVPEAFLEDERPIQTMLIKTIHGEKQQDVYYLTFKVQGRKVEAEVLASPYDYILLNPSDVPWLMKKPLQLTVLVPLHEYQERLLQQTALPKEQKELLQKLFLKYDALWQHWENQVGHRRIKPHNIATGTLAPRPQKQYPINPKAKPSIQIVIDDLLKQGVLIQQNSTMNTPVYPVPKPDGKWRMVLDYREVNKTIPLIAAQNQHSAGILSSIYRGKYKTTLDLTNGFWAHPITPESYWLTAFTWQGKQYCWTRLPQGFLNSPALFNADVVDLLKEIPNVQAYVDDIYISHDDPQEHLEQLEKIFSILLNAGYVVSLKKSEIAQREVEFLGFNITKEGRGLTDTFKQKLLNITPPKDLKQLQSILGLLNFARNFIPNYSELVKPLYTIVAPANGKFISWTEDNSNQLQHIISVLNQADNLEERNPETRLIIKVNSSPSAGYIRYYNEGSKRPIMYVNYIFSKAEAKFTQTEKLLTTMHKGLIKAMDLAMGQEILVYSPIVSMTKIQRTPLPERKALPVRWITWMTYLEDPRIQFHYDKSLPELQQIPNVTEDVIAKTKHPSEFAMVFYTDGSAIKHPDVNKSHSAGMGIAQVQFIPEYKIVHQWSIPLGDHTAQLAEIAAVEFACKKALKISGPVLIVTDSFYVAESANKELPYWKSNGFLNNKKKPLRHVSKWKSIAECLQLKPDIIIMHEKGHQQPMTTLHTEGNNLADKLATQGSYVVHAGKRTADGSEFEKRTADGSEFESPKKKAKVE

SEQ ID NO: 6222 - protein, 2195 aa, synthetic construct
MPAAKRVKLDGGDKKYSIGLDIGTNSVGWAVITDEYKVPSKKFKVLGNTDRHSIKKNLIGALLFDSGETAEATRLKRTARRRYTRRKNRICYLQEIFSNEMAKVDDSFFHRLEESFLVEEDKKHERHPIFGNIVDEVAYHEKYPTIYHLRKKLVDSTDKADLRLIYLALAHMIKFRGHFLIEGDLNPDNSDVDKLFIQLVQTYNQLFEENPINASGVDAKAILSARLSKSRRLENLIAQLPGEKKNGLFGNLIALSLGLTPNFKSNFDLAEDAKLQLSKDTYDDDLDNLLAQIGDQYADLFLAAKNLSDAILLSDILRVNTEITKAPLSASMIKRYDEHHQDLTLLKALVRQQLPEKYKEIFFDQSKNGYAGYIDGGASQEEFYKFIKPILEKMDGTEELLVKLNREDLLRKQRTFDNGSIPHQIHLGELHAILRRQEDFYPFLKDNREKIEKILTFRIPYYVGPLARGNSRFAWMTRKSEETITPWNFEEVVDKGASAQSFIERMTNFDKNLPNEKVLPKHSLLYEYFTVYNELTKVKYVTEGMRKPAFLSGEQKKAIVDLLFKTNRKVTVKQLKEDYFKKIECFDSVEISGVEDRFNASLGTYHDLLKIIKDKDFLDNEENEDILEDIVLTLTLFEDREMIEERLKTYAHLFDDKVMKQLKRRRYTGWGRLSRKLINGIRDKQSGKTILDFLKSDGFANRNFMQLIHDDSLTFKEDIQKAQVSGQGDSLHEHIANLAGSPAIKKGILQTVKVVDELVKVMGRHKPENIVIEMARENQTTQKGQKNSRERMKRIEEGIKELGSQILKEHPVENTQLQNEKLYLYYLQNGRDMYVDQELDINRLSDYDVDHIVPQSFLKDDSIDNKVLTRSDKARGKSDNVPSEEVVKKMKNYWRQLLNAKLITQRKFDNLTKAERGGLSELDKAGFIKRQLVETRQITKHVAQILDSRMNTKYDENDKLIREVKVITLKSKLVSDFRKDFQFYKVREINNYHHAHDAYLNAVVGTALIKKYPKLESEFVYGDYKVYDVRKMIAKSEQEIGKATAKYFFYSNIMNFFKTEITLANGEIRKRPLIETNGETGEIVWDKGRDFATVRKVLSMPQVNIVKKTEVQTGGFSKESILPKRNSDKLIARKKDWDPKKYGGFDSPTVAYSVLVVAKVEKGKSKKLKSVKELLGITIMERSSFEKNPIDFLEAKGYKEVKKDLIIKLPKYSLFELENGRKRMLASAGELQKGNELALPSKYVNFLYLASHYEKLKGSPEDNEQKQLFVEQHKHYLDEIIEQISEFSKRVILADANLDKVLSAYNKHRDKPIREQAENIIHLFTLTNLGAPAAFKYFDTTIDRKRYTSTKEVLDATLIHQSITGLYETRIDLSQLGGDGGGGGGSGGGGSGGGGSGGGGSGGGGSGGGGSGGMDPLQLLQPLEAEIKGTKLKAHWNSGATITCVPQAFLEEEVPIKNIWIKTIHGEKEQPVYYLTFKIQGRKVEAEVISSPYDYILVSPSDIPWLMKKPLQLTTLVPLQEYEERLLKQTMLTGSYKEKLQSLFLKYDALWQHWENQVGHRRIKPHHIATGTVNPRPQKQYPINPKAKASIQTVINDLLKQGVLIQQNSIMNTPVYPVPKPDGKWRMVLDYREVNKTIPLIAAQNQHSAGILSSIFRGKYKTTLDLSNGFWAHSITPESYWLTAFTWLGQQYCWTRLPQGFLNSPALFTADVVDLLKEVPNVQVYVDDIYISHDDPREHLEQLEKVFSLLLNAGYVVSLKKSEIAQHEVEFLGFNITKEGRGLTETFKQKLLNITPPRDLKQLQSILGLLNFARNFIPNFSELVKPLYNIIATANGKYITWTTDNSQQLQNIISMLNSAENLEERNPEVRLIMKVNTSPSAGYIRFYNEFAKRPIMYLNYVYTKAEVKFTNTEKLLTTIHKGLIKALDLGMGQEILVYSPIVSMTKIQKTPLPERKALPIRWITWMSYLEDPRIQFHYDKTLPELQQVPTVTDDIIAKIKHPSEFSMVFYTDGSAIKHPNVNKSHNAGMGIAQVQFKPEFTVINTWSIPLGDHTAQLAEVAAVEFACKKALKIDGPVLIVTDSFYVAESVNKELPYWQSNGFFNNKKKPLKHVSKWKSIADCIQLKPDIIIIHEKGHQPTASTFHTEGNNLADKLATQGSYVVNAGKRTADGSEFEKRTADGSEFESPKKKAKVE

SEQ ID NO: 6223 - protein, 2106 aa, synthetic construct
MPAAKRVKLDGGDKKYSIGLDIGTNSVGWAVITDEYKVPSKKFKVLGNTDRHSIKKNLIGALLFDSGETAEATRLKRTARRRYTRRKNRICYLQEIFSNEMAKVDDSFFHRLEESFLVEEDKKHERHPIFGNIVDEVAYHEKYPTIYHLRKKLVDSTDKADLRLIYLALAHMIKFRGHFLIEGDLNPDNSDVDKLFIQLVQTYNQLFEENPINASGVDAKAILSARLSKSRRLENLIAQLPGEKKNGLFGNLIALSLGLTPNFKSNFDLAEDAKLQLSKDTYDDDLDNLLAQIGDQYADLFLAAKNLSDAILLSDILRVNTEITKAPLSASMIKRYDEHHQDLTLLKALVRQQLPEKYKEIFFDQSKNGYAGYIDGGASQEEFYKFIKPILEKMDGTEELLVKLNREDLLRKQRTFDNGSIPHQIHLGELHAILRRQEDFYPFLKDNREKIEKILTFRIPYYVGPLARGNSRFAWMTRKSEETITPWNFEEVVDKGASAQSFIERMTNFDKNLPNEKVLPKHSLLYEYFTVYNELTKVKYVTEGMRKPAFLSGEQKKAIVDLLFKTNRKVTVKQLKEDYFKKIECFDSVEISGVEDRFNASLGTYHDLLKIIKDKDFLDNEENEDILEDIVLTLTLFEDREMIEERLKTYAHLFDDKVMKQLKRRRYTGWGRLSRKLINGIRDKQSGKTILDFLKSDGFANRNFMQLIHDDSLTFKEDIQKAQVSGQGDSLHEHIANLAGSPAIKKGILQTVKVVDELVKVMGRHKPENIVIEMARENQTTQKGQKNSRERMKRIEEGIKELGSQILKEHPVENTQLQNEKLYLYYLQNGRDMYVDQELDINRLSDYDVDHIVPQSFLKDDSIDNKVLTRSDKARGKSDNVPSEEVVKKMKNYWRQLLNAKLITQRKFDNLTKAERGGLSELDKAGFIKRQLVETRQITKHVAQILDSRMNTKYDENDKLIREVKVITLKSKLVSDFRKDFQFYKVREINNYHHAHDAYLNAVVGTALIKKYPKLESEFVYGDYKVYDVRKMIAKSEQEIGKATAKYFFYSNIMNFFKTEITLANGEIRKRPLIETNGETGEIVWDKGRDFATVRKVLSMPQVNIVKKTEVQTGGFSKESILPKRNSDKLIARKKDWDPKKYGGFDSPTVAYSVLVVAKVEKGKSKKLKSVKELLGITIMERSSFEKNPIDFLEAKGYKEVKKDLIIKLPKYSLFELENGRKRMLASAGELQKGNELALPSKYVNFLYLASHYEKLKGSPEDNEQKQLFVEQHKHYLDEIIEQISEFSKRVILADANLDKVLSAYNKHRDKPIREQAENIIHLFTLTNLGAPAAFKYFDTTIDRKRYTSTKEVLDATLIHQSITGLYETRIDLSQLGGDGGGGGGSGGGGSGGGGSGGGGSGGGGSGGGGSGGIPWLMKKPLQLTTLVPLQEYEERLLKQTMLTGSYKEKLQSLFLKYDALWQHWENQVGHRRIKPHHIATGTVNPRPQKQYPINPKAKASIQTVINDLLKQGVLIQQNSIMNTPVYPVPKPDGKWRMVLDYREVNKTIPLIAAQNQHSAGILSSIFRGKYKTTLDLSNGFWAHSITPESYWLTAFTWLGQQYCWTRLPQGFLNSPALFNADVVDLLKEVPNVQVYVDDIYISHDDPREHLEQLEKVFSLLLNAGYVVSLKKSEIAQHEVEFLGFNITKEGRGLTETFKQKLLNITPPRDLKQLQSILGKLNFARNFIPNFSELVKPLYNIIATAPGKYITWTTDNSQQLQNIISMLNSAENLEERNPEVRLIMKVNTSPSAGYIRFYNEFAKRPIMYLNYVYTKAEVKFTNTEKLLTTIHKGLIKALDLGMGQEILVYSPIVSMTKIQKTPLPERKALPIRWITWMSYLEDPRIQFHYDKTLPELQQVPTVTDDIIAKIKHPSEFSMVFYTDGSAIKHPNVNKSHNAGMGIAQVQFKPEFTVINTWSIPLGDHTAQLAEVAAVEFACKKALKIDGPVLIVTDSFYVAESVNKELPYWQSNGFFNNKKKPLKHVSKWKSIADCIQLKPDIIIIHEKGHQPTASTFHTEGNNLADKLATQGSYVVNAGKRTADGSEFEKRTADGSEFESPKKKAKVE

SEQ ID NO: 6224 - protein, 2106 aa, synthetic construct
MPAAKRVKLDGGDKKYSIGLDIGTNSVGWAVITDEYKVPSKKFKVLGNTDRHSIKKNLIGALLFDSGETAEATRLKRTARRRYTRRKNRICYLQEIFSNEMAKVDDSFFHRLEESFLVEEDKKHERHPIFGNIVDEVAYHEKYPTIYHLRKKLVDSTDKADLRLIYLALAHMIKFRGHFLIEGDLNPDNSDVDKLFIQLVQTYNQLFEENPINASGVDAKAILSARLSKSRRLENLIAQLPGEKKNGLFGNLIALSLGLTPNFKSNFDLAEDAKLQLSKDTYDDDLDNLLAQIGDQYADLFLAAKNLSDAILLSDILRVNTEITKAPLSASMIKRYDEHHQDLTLLKALVRQQLPEKYKEIFFDQSKNGYAGYIDGGASQEEFYKFIKPILEKMDGTEELLVKLNREDLLRKQRTFDNGSIPHQIHLGELHAILRRQEDFYPFLKDNREKIEKILTFRIPYYVGPLARGNSRFAWMTRKSEETITPWNFEEVVDKGASAQSFIERMTNFDKNLPNEKVLPKHSLLYEYFTVYNELTKVKYVTEGMRKPAFLSGEQKKAIVDLLFKTNRKVTVKQLKEDYFKKIECFDSVEISGVEDRFNASLGTYHDLLKIIKDKDFLDNEENEDILEDIVLTLTLFEDREMIEERLKTYAHLFDDKVMKQLKRRRYTGWGRLSRKLINGIRDKQSGKTILDFLKSDGFANRNFMQLIHDDSLTFKEDIQKAQVSGQGDSLHEHIANLAGSPAIKKGILQTVKVVDELVKVMGRHKPENIVIEMARENQTTQKGQKNSRERMKRIEEGIKELGSQILKEHPVENTQLQNEKLYLYYLQNGRDMYVDQELDINRLSDYDVDHIVPQSFLKDDSIDNKVLTRSDKARGKSDNVPSEEVVKKMKNYWRQLLNAKLITQRKFDNLTKAERGGLSELDKAGFIKRQLVETRQITKHVAQILDSRMNTKYDENDKLIREVKVITLKSKLVSDFRKDFQFYKVREINNYHHAHDAYLNAVVGTALIKKYPKLESEFVYGDYKVYDVRKMIAKSEQEIGKATAKYFFYSNIMNFFKTEITLANGEIRKRPLIETNGETGEIVWDKGRDFATVRKVLSMPQVNIVKKTEVQTGGFSKESILPKRNSDKLIARKKDWDPKKYGGFDSPTVAYSVLVVAKVEKGKSKKLKSVKELLGITIMERSSFEKNPIDFLEAKGYKEVKKDLIIKLPKYSLFELENGRKRMLASAGELQKGNELALPSKYVNFLYLASHYEKLKGSPEDNEQKQLFVEQHKHYLDEIIEQISEFSKRVILADANLDKVLSAYNKHRDKPIREQAENIIHLFTLTNLGAPAAFKYFDTTIDRKRYTSTKEVLDATLIHQSITGLYETRIDLSQLGGDGGGGGGSGGGGSGGGGSGGGGSGGGGSGGGGSGGVPWLTQQPLQLTILVPLQEYQDRILNKTALPEEQKQQLKALFTKYDNLWQHWENQVGHRKIRPHNIATGDYPPRPQKQYPINPKAKPSIQIVIDDLLKQGVLTPQNSTMNTPVYPVPKPDGRWRMVLDYREVNKTIPLTAAQNQHSAGILATIVRQKYKTTLDLANGFWAHPITPDSYWLTAFTWQGKQYCWTRLPQGFLNSPALFNADAVDLLKEVPNVQVYVDDIYLSHDNPHEHIQQLEKVFQILLQAGYVVSLKKSEIGQRTVEFLGFNITKEGRGLTDTFKTKLLNVTPPKDLKQLQSILGKLNFARNFIPNFAELVQTLYNLIASSPGKYIEWTEDNTKQLNKVIEALNTASNLEERLPDQRLVIKVNTSPSAGYVRYYNESGKKPIMYLNYVFSKAELKFSMLEKLLTTMHKALIKAMDLAMGQEILVYSPIVSMTKIQKTPLPERKALPIRWITWMTYLEDPRIQFHYDKTLPELKHIPDVYTSSIPPLKHPSQYEGVFCTDGSAIKSPDPTKSNNAGMGIVHAIYNPEYKILNQWSIPLGHHTAQMAEIAAVEFACKKALKVPGPVLVITDSFYVAESANKELPYWKSNGFVNNKKEPLKHISKWKSIAECLSIKPDITIQHEKGHQPINTSIHTEGNALADKLATQGSYVVNAGKRTADGSEFEKRTADGSEFESPKKKAKVE

SEQ ID NO: 6225 - protein, 2113 aa, synthetic construct
MPAAKRVKLDGGDKKYSIGLDIGTNSVGWAVITDEYKVPSKKFKVLGNTDRHSIKKNLIGALLFDSGETAEATRLKRTARRRYTRRKNRICYLQEIFSNEMAKVDDSFFHRLEESFLVEEDKKHERHPIFGNIVDEVAYHEKYPTIYHLRKKLVDSTDKADLRLIYLALAHMIKFRGHFLIEGDLNPDNSDVDKLFIQLVQTYNQLFEENPINASGVDAKAILSARLSKSRRLENLIAQLPGEKKNGLFGNLIALSLGLTPNFKSNFDLAEDAKLQLSKDTYDDDLDNLLAQIGDQYADLFLAAKNLSDAILLSDILRVNTEITKAPLSASMIKRYDEHHQDLTLLKALVRQQLPEKYKEIFFDQSKNGYAGYIDGGASQEEFYKFIKPILEKMDGTEELLVKLNREDLLRKQRTFDNGSIPHQIHLGELHAILRRQEDFYPFLKDNREKIEKILTFRIPYYVGPLARGNSRFAWMTRKSEETITPWNFEEVVDKGASAQSFIERMTNFDKNLPNEKVLPKHSLLYEYFTVYNELTKVKYVTEGMRKPAFLSGEQKKAIVDLLFKTNRKVTVKQLKEDYFKKIECFDSVEISGVEDRFNASLGTYHDLLKIIKDKDFLDNEENEDILEDIVLTLTLFEDREMIEERLKTYAHLFDDKVMKQLKRRRYTGWGRLSRKLINGIRDKQSGKTILDFLKSDGFANRNFMQLIHDDSLTFKEDIQKAQVSGQGDSLHEHIANLAGSPAIKKGILQTVKVVDELVKVMGRHKPENIVIEMARENQTTQKGQKNSRERMKRIEEGIKELGSQILKEHPVENTQLQNEKLYLYYLQNGRDMYVDQELDINRLSDYDVDHIVPQSFLKDDSIDNKVLTRSDKARGKSDNVPSEEVVKKMKNYWRQLLNAKLITQRKFDNLTKAERGGLSELDKAGFIKRQLVETRQITKHVAQILDSRMNTKYDENDKLIREVKVITLKSKLVSDFRKDFQFYKVREINNYHHAHDAYLNAVVGTALIKKYPKLESEFVYGDYKVYDVRKMIAKSEQEIGKATAKYFFYSNIMNFFKTEITLANGEIRKRPLIETNGETGEIVWDKGRDFATVRKVLSMPQVNIVKKTEVQTGGFSKESILPKRNSDKLIARKKDWDPKKYGGFDSPTVAYSVLVVAKVEKGKSKKLKSVKELLGITIMERSSFEKNPIDFLEAKGYKEVKKDLIIKLPKYSLFELENGRKRMLASAGELQKGNELALPSKYVNFLYLASHYEKLKGSPEDNEQKQLFVEQHKHYLDEIIEQISEFSKRVILADANLDKVLSAYNKHRDKPIREQAENIIHLFTLTNLGAPAAFKYFDTTIDRKRYTSTKEVLDATLIHQSITGLYETRIDLSQLGGDGGGGGGSGGGGSGGGGSGGGGSGGGGSGGGGSGGVLNLEEEYRLHEKPVPSSIDPSWLQLFPTVWAERAGMGLANQVPPVVVELRSGASPVAVRQYPMSKEAREGIRPHIQRFLDLGVLVPCQSPWNTPLLPVKKPGTNDYRPVQDLREINKRVQDIHPTVPNPYNLLSSLPPSHTWYSVLDLKDAFFCLKLHPNSQPLFAFEWRDPEKGNTGQLTWTRLPQGFKNSPTLFNEALHRDLAPFRALNPQVVLLQYVDDLLVAAPTYRDCKEGTQKLLQELSKLGYRVSAKKAQLCQKEVTYLGYLLKEGKRWLTPARKATVMKIPPPTTPRQVREFLGTAGFCRLWIPGFASLAAPLYPLTKPSIPFIWTEEHQKAFDRIKEALLSAPALALPDLTKPFTLYVDERAGVARGVLTQTLGPWRRPVAYLSKKLDPVASGWPTCLKAVAAVALLLKDADKLTLGQNVTVIASHSLESIVRQPPDRWMTNARMTHYQSLLLNERVSFAPPAVLNPATLLPVESEATPVHRCSEILAEETGTRRDLKDQPLPGVPAWYTDGSSFIAEGKRRAGAAIVDGKRTVWASSLPEGTSAQKAELVALTQALRLAEGKDINIYTDSRYAFATAHIHGAIYKQRGWLTSAGKDIKNKEEILALLEAIHLPKRVAIIHCPGHQKGNDPVATGNRRADEAAKQAALSTRVLAETTKPAGKRTADGSEFEKRTADGSEFESPKKKAKVE

SEQ ID NO: 6226 - protein, 2113 aa, synthetic construct
MPAAKRVKLDGGDKKYSIGLDIGTNSVGWAVITDEYKVPSKKFKVLGNTDRHSIKKNLIGALLFDSGETAEATRLKRTARRRYTRRKNRICYLQEIFSNEMAKVDDSFFHRLEESFLVEEDKKHERHPIFGNIVDEVAYHEKYPTIYHLRKKLVDSTDKADLRLIYLALAHMIKFRGHFLIEGDLNPDNSDVDKLFIQLVQTYNQLFEENPINASGVDAKAILSARLSKSRRLENLIAQLPGEKKNGLFGNLIALSLGLTPNFKSNFDLAEDAKLQLSKDTYDDDLDNLLAQIGDQYADLFLAAKNLSDAILLSDILRVNTEITKAPLSASMIKRYDEHHQDLTLLKALVRQQLPEKYKEIFFDQSKNGYAGYIDGGASQEEFYKFIKPILEKMDGTEELLVKLNREDLLRKQRTFDNGSIPHQIHLGELHAILRRQEDFYPFLKDNREKIEKILTFRIPYYVGPLARGNSRFAWMTRKSEETITPWNFEEVVDKGASAQSFIERMTNFDKNLPNEKVLPKHSLLYEYFTVYNELTKVKYVTEGMRKPAFLSGEQKKAIVDLLFKTNRKVTVKQLKEDYFKKIECFDSVEISGVEDRFNASLGTYHDLLKIIKDKDFLDNEENEDILEDIVLTLTLFEDREMIEERLKTYAHLFDDKVMKQLKRRRYTGWGRLSRKLINGIRDKQSGKTILDFLKSDGFANRNFMQLIHDDSLTFKEDIQKAQVSGQGDSLHEHIANLAGSPAIKKGILQTVKVVDELVKVMGRHKPENIVIEMARENQTTQKGQKNSRERMKRIEEGIKELGSQILKEHPVENTQLQNEKLYLYYLQNGRDMYVDQELDINRLSDYDVDHIVPQSFLKDDSIDNKVLTRSDKARGKSDNVPSEEVVKKMKNYWRQLLNAKLITQRKFDNLTKAERGGLSELDKAGFIKRQLVETRQITKHVAQILDSRMNTKYDENDKLIREVKVITLKSKLVSDFRKDFQFYKVREINNYHHAHDAYLNAVVGTALIKKYPKLESEFVYGDYKVYDVRKMIAKSEQEIGKATAKYFFYSNIMNFFKTEITLANGEIRKRPLIETNGETGEIVWDKGRDFATVRKVLSMPQVNIVKKTEVQTGGFSKESILPKRNSDKLIARKKDWDPKKYGGFDSPTVAYSVLVVAKVEKGKSKKLKSVKELLGITIMERSSFEKNPIDFLEAKGYKEVKKDLIIKLPKYSLFELENGRKRMLASAGELQKGNELALPSKYVNFLYLASHYEKLKGSPEDNEQKQLFVEQHKHYLDEIIEQISEFSKRVILADANLDKVLSAYNKHRDKPIREQAENIIHLFTLTNLGAPAAFKYFDTTIDRKRYTSTKEVLDATLIHQSITGLYETRIDLSQLGGDGGGGGGSGGGGSGGGGSGGGGSGGGGSGGGGSGGVLNLEEEYRLHEKPVPSSIDPSWLQLFPTVWAERAGMGLANQVPPVVVELRSGASPVAVRQYPMSKEAREGIRPHIQRFLDLGVLVPCQSPWNTPLLPVKKPGTNDYRPVQDLREINKRVQDIHPTVPNPYNLLSSLPPSHTWYSVLDLKDAFFCLKLHPNSQPLFAFEWRDPEKGNTGQLTWTRLPQGFKNSPTLFNEALHRDLAPFRALNPQVVLLQYVDDLLVAAPTYRDCKEGTQKLLQELSKLGYRVSAKKAQLCQKEVTYLGYLLKEGKRWLTPARKATVMKIPPPTTPRQVREFLGKAGFCRLFIPGFASLAAPLYPLTKPSIPFIWTEEHQKAFDRIKEALLSAPALALPDLTKPFTLYVDERAGVARGVLTQTLGPWRRPVAYLSKKLDPVASGWPTCLKAVAAVALLLKDADKLTLGQNVTVIASHSLESIVRQPPDRWMTNARMTHYQSLLLNERVSFAPPAVLNPATLLPVESEATPVHRCSEILAEETGTRRDLKDQPLPGVPAWYTDGSSFIAEGKRRAGAAIVDGKRTVWASSLPEGTSAQKAELVALTQALRLAEGKDINIYTDSRYAFATAHIHGAIYKQRGWLTSAGKDIKNKEEILALLEAIHLPKRVAIIHCPGHQKGNDPVATGNRRADEAAKQAALSTRVLAETTKPAGKRTADGSEFEKRTADGSEFESPKKKAKVE

SEQ ID NO: 6227 - protein, 2090 aa, synthetic construct
MPAAKRVKLDGGDKKYSIGLDIGTNSVGWAVITDEYKVPSKKFKVLGNTDRHSIKKNLIGALLFDSGETAEATRLKRTARRRYTRRKNRICYLQEIFSNEMAKVDDSFFHRLEESFLVEEDKKHERHPIFGNIVDEVAYHEKYPTIYHLRKKLVDSTDKADLRLIYLALAHMIKFRGHFLIEGDLNPDNSDVDKLFIQLVQTYNQLFEENPINASGVDAKAILSARLSKSRRLENLIAQLPGEKKNGLFGNLIALSLGLTPNFKSNFDLAEDAKLQLSKDTYDDDLDNLLAQIGDQYADLFLAAKNLSDAILLSDILRVNTEITKAPLSASMIKRYDEHHQDLTLLKALVRQQLPEKYKEIFFDQSKNGYAGYIDGGASQEEFYKFIKPILEKMDGTEELLVKLNREDLLRKQRTFDNGSIPHQIHLGELHAILRRQEDFYPFLKDNREKIEKILTFRIPYYVGPLARGNSRFAWMTRKSEETITPWNFEEVVDKGASAQSFIERMTNFDKNLPNEKVLPKHSLLYEYFTVYNELTKVKYVTEGMRKPAFLSGEQKKAIVDLLFKTNRKVTVKQLKEDYFKKIECFDSVEISGVEDRFNASLGTYHDLLKIIKDKDFLDNEENEDILEDIVLTLTLFEDREMIEERLKTYAHLFDDKVMKQLKRRRYTGWGRLSRKLINGIRDKQSGKTILDFLKSDGFANRNFMQLIHDDSLTFKEDIQKAQVSGQGDSLHEHIANLAGSPAIKKGILQTVKVVDELVKVMGRHKPENIVIEMARENQTTQKGQKNSRERMKRIEEGIKELGSQILKEHPVENTQLQNEKLYLYYLQNGRDMYVDQELDINRLSDYDVDHIVPQSFLKDDSIDNKVLTRSDKARGKSDNVPSEEVVKKMKNYWRQLLNAKLITQRKFDNLTKAERGGLSELDKAGFIKRQLVETRQITKHVAQILDSRMNTKYDENDKLIREVKVITLKSKLVSDFRKDFQFYKVREINNYHHAHDAYLNAVVGTALIKKYPKLESEFVYGDYKVYDVRKMIAKSEQEIGKATAKYFFYSNIMNFFKTEITLANGEIRKRPLIETNGETGEIVWDKGRDFATVRKVLSMPQVNIVKKTEVQTGGFSKESILPKRNSDKLIARKKDWDPKKYGGFDSPTVAYSVLVVAKVEKGKSKKLKSVKELLGITIMERSSFEKNPIDFLEAKGYKEVKKDLIIKLPKYSLFELENGRKRMLASAGELQKGNELALPSKYVNFLYLASHYEKLKGSPEDNEQKQLFVEQHKHYLDEIIEQISEFSKRVILADANLDKVLSAYNKHRDKPIREQAENIIHLFTLTNLGAPAAFKYFDTTIDRKRYTSTKEVLDATLIHQSITGLYETRIDLSQLGGDGGGGGGGTAPLEEEYRLFLEAPIQNVTLLEQWKREIPKVWAEINPPGLASTQAPIHVQLLSTALPVRVRQYPITLEAKRSLRETIRKFRAAGILRPVHSPWNTPLLPVRKSGTSEYRMVQDLREVNKRVETIHPTVPNPYTLLSLLPPDRIWYSVLDLKDAFFCIPLAPESQLIFAFEWADAEEGESGQLTWTRLPQGFKNSPTLFNEALNRDLQGFRLDHPSVSLLQYVDDLLIAADTQAACLSATRDLLMTLAELGYRVSGKKAQLCQEEVTYLGFKIHKGSRSLSNSRTQAILQIPVPKTKRQVREFLGTIGYCRLWIPGFAELAQPLYAATRPGNDPLVWGEKEEEAFQSLKLALTQPPALALPSLDKPFQLFVEETSGAAKGVLTQALGPWKRPVAYLSKRLDPVAAGWPRCLRAIAAAALLTREASKLTFGQDIEITSSHNLESLLRSPPDKWLTNARITQYQVLLLDPPRVRFKQTAALNPATLLPETDDTLPIHHCLDTLDSLTSTRPDLTDQPLAQAEATLFTDGSSYIRDGKRYAGAAVVTLDSVIWAEPLPIGTSAQKAELIALTKALEWSKDKSVNIYTDSRYAFATLHVHGMIYRERGWLTAGGKAIKNAPEILALLTAVWLPKRVAVMHCKGHQKDDAPTSTGNRRADEVAREVAIRPLSTQATISAGKRTADGSEFEKRTADGSEFESPKKKAKVE

SEQ ID NO: 6228 - protein, 2094 aa, synthetic construct
MPAAKRVKLDGGDKKYSIGLDIGTNSVGWAVITDEYKVPSKKFKVLGNTDRHSIKKNLIGALLFDSGETAEATRLKRTARRRYTRRKNRICYLQEIFSNEMAKVDDSFFHRLEESFLVEEDKKHERHPIFGNIVDEVAYHEKYPTIYHLRKKLVDSTDKADLRLIYLALAHMIKFRGHFLIEGDLNPDNSDVDKLFIQLVQTYNQLFEENPINASGVDAKAILSARLSKSRRLENLIAQLPGEKKNGLFGNLIALSLGLTPNFKSNFDLAEDAKLQLSKDTYDDDLDNLLAQIGDQYADLFLAAKNLSDAILLSDILRVNTEITKAPLSASMIKRYDEHHQDLTLLKALVRQQLPEKYKEIFFDQSKNGYAGYIDGGASQEEFYKFIKPILEKMDGTEELLVKLNREDLLRKQRTFDNGSIPHQIHLGELHAILRRQEDFYPFLKDNREKIEKILTFRIPYYVGPLARGNSRFAWMTRKSEETITPWNFEEVVDKGASAQSFIERMTNFDKNLPNEKVLPKHSLLYEYFTVYNELTKVKYVTEGMRKPAFLSGEQKKAIVDLLFKTNRKVTVKQLKEDYFKKIECFDSVEISGVEDRFNASLGTYHDLLKIIKDKDFLDNEENEDILEDIVLTLTLFEDREMIEERLKTYAHLFDDKVMKQLKRRRYTGWGRLSRKLINGIRDKQSGKTILDFLKSDGFANRNFMQLIHDDSLTFKEDIQKAQVSGQGDSLHEHIANLAGSPAIKKGILQTVKVVDELVKVMGRHKPENIVIEMARENQTTQKGQKNSRERMKRIEEGIKELGSQILKEHPVENTQLQNEKLYLYYLQNGRDMYVDQELDINRLSDYDVDHIVPQSFLKDDSIDNKVLTRSDKARGKSDNVPSEEVVKKMKNYWRQLLNAKLITQRKFDNLTKAERGGLSELDKAGFIKRQLVETRQITKHVAQILDSRMNTKYDENDKLIREVKVITLKSKLVSDFRKDFQFYKVREINNYHHAHDAYLNAVVGTALIKKYPKLESEFVYGDYKVYDVRKMIAKSEQEIGKATAKYFFYSNIMNFFKTEITLANGEIRKRPLIETNGETGEIVWDKGRDFATVRKVLSMPQVNIVKKTEVQTGGFSKESILPKRNSDKLIARKKDWDPKKYGGFDSPTVAYSVLVVAKVEKGKSKKLKSVKELLGITIMERSSFEKNPIDFLEAKGYKEVKKDLIIKLPKYSLFELENGRKRMLASAGELQKGNELALPSKYVNFLYLASHYEKLKGSPEDNEQKQLFVEQHKHYLDEIIEQISEFSKRVILADANLDKVLSAYNKHRDKPIREQAENIIHLFTLTNLGAPAAFKYFDTTIDRKRYTSTKEVLDATLIHQSITGLYETRIDLSQLGGDGGGGGGGTVSLQDEHRLFDIPVTTSLPDVWLQDFPQAWAETGGLGRAKCQAPIIIDLKPTAVPVSIKQYPMSLEAHMGIRQHIIKFLELGVLRPCRSPWNTPLLPVKKPGTQDYRPVQDLREINKRTVDIHPTVPNPYNLLSTLKPDYSWYTVLDLKDAFFCLPLAPQSQELFAFEWKDPERGISGQLTWTRLPQGFKNSPTLFNEALHRDLTDFRTQHPEVTLLQYVDDLLLAAPTKKACTQGTRHLLQELGEKGYRASAKKAQICQTKVTYLGYILSEGKRWLTPGRIETVARIPPPRNPREVREFLGTAGFCRLWIPGFAELAAPLYALTKPSTPFTWQTEHQLAFEALKKALLSAPALGLPDTSKPFTLFLDERQGIAKGVLTQKLGPWKRPVAYLSKKLDPVAAGWPPCLRIMAATAMLVKDSAKLTLGQPLTVITPHTLEAIVRQPPDRWITNARLTHYQALLLDTDRVQFGPPVTLNPATLLPVPENQPSPHDCRQVLAETHGTREDLKDQELPDADHTWYTDGSSYLDSGTRRAGAAVVDGHNTIWAQSLPPGTSAQKAELIALTKALELSKGKKANIYTDSRYAFATAHTHGSIYERRGWLTSEGKEIKNKAEIIALLKALFLPQEVAIIHCPGHQKGQDPVAVGNRQADRVARQAAMAEVLTLATEPDNTSHITAGKRTADGSEFEKRTADGSEFESPKKKAKVE

SEQ ID NO: 6229 - protein, 2094 aa, synthetic construct
MPAAKRVKLDGGDKKYSIGLDIGTNSVGWAVITDEYKVPSKKFKVLGNTDRHSIKKNLIGALLFDSGETAEATRLKRTARRRYTRRKNRICYLQEIFSNEMAKVDDSFFHRLEESFLVEEDKKHERHPIFGNIVDEVAYHEKYPTIYHLRKKLVDSTDKADLRLIYLALAHMIKFRGHFLIEGDLNPDNSDVDKLFIQLVQTYNQLFEENPINASGVDAKAILSARLSKSRRLENLIAQLPGEKKNGLFGNLIALSLGLTPNFKSNFDLAEDAKLQLSKDTYDDDLDNLLAQIGDQYADLFLAAKNLSDAILLSDILRVNTEITKAPLSASMIKRYDEHHQDLTLLKALVRQQLPEKYKEIFFDQSKNGYAGYIDGGASQEEFYKFIKPILEKMDGTEELLVKLNREDLLRKQRTFDNGSIPHQIHLGELHAILRRQEDFYPFLKDNREKIEKILTFRIPYYVGPLARGNSRFAWMTRKSEETITPWNFEEVVDKGASAQSFIERMTNFDKNLPNEKVLPKHSLLYEYFTVYNELTKVKYVTEGMRKPAFLSGEQKKAIVDLLFKTNRKVTVKQLKEDYFKKIECFDSVEISGVEDRFNASLGTYHDLLKIIKDKDFLDNEENEDILEDIVLTLTLFEDREMIEERLKTYAHLFDDKVMKQLKRRRYTGWGRLSRKLINGIRDKQSGKTILDFLKSDGFANRNFMQLIHDDSLTFKEDIQKAQVSGQGDSLHEHIANLAGSPAIKKGILQTVKVVDELVKVMGRHKPENIVIEMARENQTTQKGQKNSRERMKRIEEGIKELGSQILKEHPVENTQLQNEKLYLYYLQNGRDMYVDQELDINRLSDYDVDHIVPQSFLKDDSIDNKVLTRSDKARGKSDNVPSEEVVKKMKNYWRQLLNAKLITQRKFDNLTKAERGGLSELDKAGFIKRQLVETRQITKHVAQILDSRMNTKYDENDKLIREVKVITLKSKLVSDFRKDFQFYKVREINNYHHAHDAYLNAVVGTALIKKYPKLESEFVYGDYKVYDVRKMIAKSEQEIGKATAKYFFYSNIMNFFKTEITLANGEIRKRPLIETNGETGEIVWDKGRDFATVRKVLSMPQVNIVKKTEVQTGGFSKESILPKRNSDKLIARKKDWDPKKYGGFDSPTVAYSVLVVAKVEKGKSKKLKSVKELLGITIMERSSFEKNPIDFLEAKGYKEVKKDLIIKLPKYSLFELENGRKRMLASAGELQKGNELALPSKYVNFLYLASHYEKLKGSPEDNEQKQLFVEQHKHYLDEIIEQISEFSKRVILADANLDKVLSAYNKHRDKPIREQAENIIHLFTLTNLGAPAAFKYFDTTIDRKRYTSTKEVLDATLIHQSITGLYETRIDLSQLGGDGGGGGGGTVSLQDEHRLFDIPVTTSLPDVWLQDFPQAWAETGGLGRAKCQAPIIIDLKPTAVPVSIKQYPMSLEAHMGIRQHIIKFLELGVLRPCRSPWNTPLLPVKKPGTQDYRPVQDLREINKRTVDIHPTVPNPYNLLSTLKPDYSWYTVLDLKDAFFCLPLAPQSQELFAFEWKDPERGISGQLTWTRLPQGFKNSPTLFNEALHRDLTDFRTQHPEVTLLQYVDDLLLAAPTKKACTQGTRHLLQELGEKGYRASAKKAQICQTKVTYLGYILSEGKRWLTPGRIETVARIPPPRNPREVREFLGKAGFCRLFIPGFAELAAPLYALTKPSTPFTWQTEHQLAFEALKKALLSAPALGLPDTSKPFTLFLDERQGIAKGVLTQKLGPWKRPVAYLSKKLDPVAAGWPPCLRIMAATAMLVKDSAKLTLGQPLTVITPHTLEAIVRQPPDRWITNARLTHYQALLLDTDRVQFGPPVTLNPATLLPVPENQPSPHDCRQVLAETHGTREDLKDQELPDADHTWYTDGSSYLDSGTRRAGAAVVDGHNTIWAQSLPPGTSAQKAELIALTKALELSKGKKANIYTDSRYAFATAHTHGSIYERRGWLTSEGKEIKNKAEIIALLKALFLPQEVAIIHCPGHQKGQDPVAVGNRQADRVARQAAMAEVLTLATEPDNTSHITAGKRTADGSEFEKRTADGSEFESPKKKAKVE

SEQ ID NO: 6230 - protein, 2165 aa, synthetic construct
MPAAKRVKLDGGDKKYSIGLDIGTNSVGWAVITDEYKVPSKKFKVLGNTDRHSIKKNLIGALLFDSGETAEATRLKRTARRRYTRRKNRICYLQEIFSNEMAKVDDSFFHRLEESFLVEEDKKHERHPIFGNIVDEVAYHEKYPTIYHLRKKLVDSTDKADLRLIYLALAHMIKFRGHFLIEGDLNPDNSDVDKLFIQLVQTYNQLFEENPINASGVDAKAILSARLSKSRRLENLIAQLPGEKKNGLFGNLIALSLGLTPNFKSNFDLAEDAKLQLSKDTYDDDLDNLLAQIGDQYADLFLAAKNLSDAILLSDILRVNTEITKAPLSASMIKRYDEHHQDLTLLKALVRQQLPEKYKEIFFDQSKNGYAGYIDGGASQEEFYKFIKPILEKMDGTEELLVKLNREDLLRKQRTFDNGSIPHQIHLGELHAILRRQEDFYPFLKDNREKIEKILTFRIPYYVGPLARGNSRFAWMTRKSEETITPWNFEEVVDKGASAQSFIERMTNFDKNLPNEKVLPKHSLLYEYFTVYNELTKVKYVTEGMRKPAFLSGEQKKAIVDLLFKTNRKVTVKQLKEDYFKKIECFDSVEISGVEDRFNASLGTYHDLLKIIKDKDFLDNEENEDILEDIVLTLTLFEDREMIEERLKTYAHLFDDKVMKQLKRRRYTGWGRLSRKLINGIRDKQSGKTILDFLKSDGFANRNFMQLIHDDSLTFKEDIQKAQVSGQGDSLHEHIANLAGSPAIKKGILQTVKVVDELVKVMGRHKPENIVIEMARENQTTQKGQKNSRERMKRIEEGIKELGSQILKEHPVENTQLQNEKLYLYYLQNGRDMYVDQELDINRLSDYDVDHIVPQSFLKDDSIDNKVLTRSDKARGKSDNVPSEEVVKKMKNYWRQLLNAKLITQRKFDNLTKAERGGLSELDKAGFIKRQLVETRQITKHVAQILDSRMNTKYDENDKLIREVKVITLKSKLVSDFRKDFQFYKVREINNYHHAHDAYLNAVVGTALIKKYPKLESEFVYGDYKVYDVRKMIAKSEQEIGKATAKYFFYSNIMNFFKTEITLANGEIRKRPLIETNGETGEIVWDKGRDFATVRKVLSMPQVNIVKKTEVQTGGFSKESILPKRNSDKLIARKKDWDPKKYGGFDSPTVAYSVLVVAKVEKGKSKKLKSVKELLGITIMERSSFEKNPIDFLEAKGYKEVKKDLIIKLPKYSLFELENGRKRMLASAGELQKGNELALPSKYVNFLYLASHYEKLKGSPEDNEQKQLFVEQHKHYLDEIIEQISEFSKRVILADANLDKVLSAYNKHRDKPIREQAENIIHLFTLTNLGAPAAFKYFDTTIDRKRYTSTKEVLDATLIHQSITGLYETRIDLSQLGGDGGGGGGGMDLLKPLTVERKGVKIKGYWNSQADITCVPKDLLQGEEPVRQQNVTTIHGTQEGDVYYVNLKIDGRRINTEVIGTTLDYAIITPGDVPWILKKPLELTIKLDLEEQQGTLLNNSILSKKGKEELKQLFEKYSALWQSWENQVGHRRIRPHKIATGTVKPTPQKQYHINPKAKPDIQIVINDLLKQGVLIQKESTMNTPVYPVPKPNGRWRMVLDYRAVNKVTPLIAVQNQHSYGILGSLFKGRYKTTIDLSNGFWAHPIVPEDYWITAFTWQGKQYCWTVLPQGFLNSPGLFNGDVVDLLQGIPNVEVYVDDVYISHDSEKEHLEYLDILFNRLKEAGYIISLKKSNIANSIVDFLGFQITNEGRGLTDTFKEKLENITAPTTLKQLQSILGLLNFARNFIPDFTELIAPLYALIPKSPKNYVPWQIEHSTTLETLITKLNGAEYLQGRKGDKTLIMKVNASYTTGYIRYYNEGEKKPISYVSIVFSKTELKFTELEKLLTTVHKGLLKALDLSMGQNIHVYSPIVSMQNIQKTPQTAKKALASRWLSWLSYLEDPRIRFFYDPQMPALKDLPAVDTGKDNKKHPSNFQHIFYTDGSAITSPTKEGHLNAGMGIVYFINKDGNLQKQQEWSISLGNHTAQFAEIAAFEFALKKCLPLGGNILVVTDSNYVAKAYNEELDVWASNGFVNNRKKPLKHISKWKSVADLKRLRPDVVVTHEPGHQKLDSSPHAYGNNLADQLATQASFKVHAGKRTADGSEFEKRTADGSEFESPKKKAKVE

SEQ ID NO: 6231 - protein, 2086 aa, synthetic construct
MPAAKRVKLDGGDKKYSIGLDIGTNSVGWAVITDEYKVPSKKFKVLGNTDRHSIKKNLIGALLFDSGETAEATRLKRTARRRYTRRKNRICYLQEIFSNEMAKVDDSFFHRLEESFLVEEDKKHERHPIFGNIVDEVAYHEKYPTIYHLRKKLVDSTDKADLRLIYLALAHMIKFRGHFLIEGDLNPDNSDVDKLFIQLVQTYNQLFEENPINASGVDAKAILSARLSKSRRLENLIAQLPGEKKNGLFGNLIALSLGLTPNFKSNFDLAEDAKLQLSKDTYDDDLDNLLAQIGDQYADLFLAAKNLSDAILLSDILRVNTEITKAPLSASMIKRYDEHHQDLTLLKALVRQQLPEKYKEIFFDQSKNGYAGYIDGGASQEEFYKFIKPILEKMDGTEELLVKLNREDLLRKQRTFDNGSIPHQIHLGELHAILRRQEDFYPFLKDNREKIEKILTFRIPYYVGPLARGNSRFAWMTRKSEETITPWNFEEVVDKGASAQSFIERMTNFDKNLPNEKVLPKHSLLYEYFTVYNELTKVKYVTEGMRKPAFLSGEQKKAIVDLLFKTNRKVTVKQLKEDYFKKIECFDSVEISGVEDRFNASLGTYHDLLKIIKDKDFLDNEENEDILEDIVLTLTLFEDREMIEERLKTYAHLFDDKVMKQLKRRRYTGWGRLSRKLINGIRDKQSGKTILDFLKSDGFANRNFMQLIHDDSLTFKEDIQKAQVSGQGDSLHEHIANLAGSPAIKKGILQTVKVVDELVKVMGRHKPENIVIEMARENQTTQKGQKNSRERMKRIEEGIKELGSQILKEHPVENTQLQNEKLYLYYLQNGRDMYVDQELDINRLSDYDVDHIVPQSFLKDDSIDNKVLTRSDKARGKSDNVPSEEVVKKMKNYWRQLLNAKLITQRKFDNLTKAERGGLSELDKAGFIKRQLVETRQITKHVAQILDSRMNTKYDENDKLIREVKVITLKSKLVSDFRKDFQFYKVREINNYHHAHDAYLNAVVGTALIKKYPKLESEFVYGDYKVYDVRKMIAKSEQEIGKATAKYFFYSNIMNFFKTEITLANGEIRKRPLIETNGETGEIVWDKGRDFATVRKVLSMPQVNIVKKTEVQTGGFSKESILPKRNSDKLIARKKDWDPKKYGGFDSPTVAYSVLVVAKVEKGKSKKLKSVKELLGITIMERSSFEKNPIDFLEAKGYKEVKKDLIIKLPKYSLFELENGRKRMLASAGELQKGNELALPSKYVNFLYLASHYEKLKGSPEDNEQKQLFVEQHKHYLDEIIEQISEFSKRVILADANLDKVLSAYNKHRDKPIREQAENIIHLFTLTNLGAPAAFKYFDTTIDRKRYTSTKEVLDATLIHQSITGLYETRIDLSQLGGDGGGGGGGVLNLEEEYRLHEKPVPSSIDPSWLQLFPTVWAERAGMGLANQVPPVVVELRSGASPVAVRQYPMSKEAREGIRPHIQKFLDLGVLVPCRSPWNTPLLPVKKPGTNDYRPVQDLREINKRVQDIHPTVPNPYNLLSSLPPSYTWYSVLDLKDAFFCLRLHPNSQPLFAFEWKDPEKGNTGQLTWTRLPQGFKNSPTLFNEALHRDLAPFRALNPQVVLLQYVDDLLVAAPTYEDCKKGTQKLLQELSKLGYRVSAKKAQLCQREVTYLGYLLKEGKRWLTPARKATVMKIPVPTTPRQVREFLGTAGFCRLWIPGFASLAAPLYPLTKPSIPFIWTEEHQQAFDHIKKALLSAPALALPDLTKPFTLYIDERAGVARGVLTQTLGPWRRPVAYLSKKLDPVASGWPTCLKAVAAVALLLKDADKLTLGQNVTVIASHSLESIVRQPPDRWMTNARMTHYQSLLLNERVSFAPPAVLNPATLLPVESEATPVHRCSEILAEETGTRRDLEDQPLPGVPTWYTDGSSFITEGKRRAGAPIVDGKRTVWASSLPEGTSAQKAELVALTQALRLAEGKNINIYTDSRYAFATAHIHGAIYKQRGWLTSAGKDIKNKEEILALLEAIHLPRRVAIIHCPGHQRGSNPVATGNRRADEAAKQAALSTRVLAGTTKPAGKRTADGSEFEKRTADGSEFESPKKKAKVE

SEQ ID NO: 6232 - protein, 2086 aa, synthetic construct
MPAAKRVKLDGGDKKYSIGLDIGTNSVGWAVITDEYKVPSKKFKVLGNTDRHSIKKNLIGALLFDSGETAEATRLKRTARRRYTRRKNRICYLQEIFSNEMAKVDDSFFHRLEESFLVEEDKKHERHPIFGNIVDEVAYHEKYPTIYHLRKKLVDSTDKADLRLIYLALAHMIKFRGHFLIEGDLNPDNSDVDKLFIQLVQTYNQLFEENPINASGVDAKAILSARLSKSRRLENLIAQLPGEKKNGLFGNLIALSLGLTPNFKSNFDLAEDAKLQLSKDTYDDDLDNLLAQIGDQYADLFLAAKNLSDAILLSDILRVNTEITKAPLSASMIKRYDEHHQDLTLLKALVRQQLPEKYKEIFFDQSKNGYAGYIDGGASQEEFYKFIKPILEKMDGTEELLVKLNREDLLRKQRTFDNGSIPHQIHLGELHAILRRQEDFYPFLKDNREKIEKILTFRIPYYVGPLARGNSRFAWMTRKSEETITPWNFEEVVDKGASAQSFIERMTNFDKNLPNEKVLPKHSLLYEYFTVYNELTKVKYVTEGMRKPAFLSGEQKKAIVDLLFKTNRKVTVKQLKEDYFKKIECFDSVEISGVEDRFNASLGTYHDLLKIIKDKDFLDNEENEDILEDIVLTLTLFEDREMIEERLKTYAHLFDDKVMKQLKRRRYTGWGRLSRKLINGIRDKQSGKTILDFLKSDGFANRNFMQLIHDDSLTFKEDIQKAQVSGQGDSLHEHIANLAGSPAIKKGILQTVKVVDELVKVMGRHKPENIVIEMARENQTTQKGQKNSRERMKRIEEGIKELGSQILKEHPVENTQLQNEKLYLYYLQNGRDMYVDQELDINRLSDYDVDHIVPQSFLKDDSIDNKVLTRSDKARGKSDNVPSEEVVKKMKNYWRQLLNAKLITQRKFDNLTKAERGGLSELDKAGFIKRQLVETRQITKHVAQILDSRMNTKYDENDKLIREVKVITLKSKLVSDFRKDFQFYKVREINNYHHAHDAYLNAVVGTALIKKYPKLESEFVYGDYKVYDVRKMIAKSEQEIGKATAKYFFYSNIMNFFKTEITLANGEIRKRPLIETNGETGEIVWDKGRDFATVRKVLSMPQVNIVKKTEVQTGGFSKESILPKRNSDKLIARKKDWDPKKYGGFDSPTVAYSVLVVAKVEKGKSKKLKSVKELLGITIMERSSFEKNPIDFLEAKGYKEVKKDLIIKLPKYSLFELENGRKRMLASAGELQKGNELALPSKYVNFLYLASHYEKLKGSPEDNEQKQLFVEQHKHYLDEIIEQISEFSKRVILADANLDKVLSAYNKHRDKPIREQAENIIHLFTLTNLGAPAAFKYFDTTIDRKRYTSTKEVLDATLIHQSITGLYETRIDLSQLGGDGGGGGGGVLNLEEEYRLHEKPVPSSIDPSWLQLFPTVWAERAGMGLANQVPPVVVELRSGASPVAVRQYPMSKEAREGIRPHIQKFLDLGVLVPCRSPWNTPLLPVKKPGTNDYRPVQDLREINKRVQDIHPTVPNPYNLLSSLPPSYTWYSVLDLKDAFFCLRLHPNSQPLFAFEWKDPEKGNTGQLTWTRLPQGFKNSPTLFNEALHRDLAPFRALNPQVVLLQYVDDLLVAAPTYEDCKKGTQKLLQELSKLGYRVSAKKAQLCQREVTYLGYLLKEGKRWLTPARKATVMKIPVPTTPRQVREFLGKAGFCRLFIPGFASLAAPLYPLTKPSIPFIWTEEHQQAFDHIKKALLSAPALALPDLTKPFTLYIDERAGVARGVLTQTLGPWRRPVAYLSKKLDPVASGWPTCLKAVAAVALLLKDADKLTLGQNVTVIASHSLESIVRQPPDRWMTNARMTHYQSLLLNERVSFAPPAVLNPATLLPVESEATPVHRCSEILAEETGTRRDLEDQPLPGVPTWYTDGSSFITEGKRRAGAPIVDGKRTVWASSLPEGTSAQKAELVALTQALRLAEGKNINIYTDSRYAFATAHIHGAIYKQRGWLTSAGKDIKNKEEILALLEAIHLPRRVAIIHCPGHQRGSNPVATGNRRADEAAKQAALSTRVLAGTTKPAGKRTADGSEFEKRTADGSEFESPKKKAKVE

SEQ ID NO: 6233 - protein, 2119 aa, synthetic construct
MPAAKRVKLDGGDKKYSIGLDIGTNSVGWAVITDEYKVPSKKFKVLGNTDRHSIKKNLIGALLFDSGETAEATRLKRTARRRYTRRKNRICYLQEIFSNEMAKVDDSFFHRLEESFLVEEDKKHERHPIFGNIVDEVAYHEKYPTIYHLRKKLVDSTDKADLRLIYLALAHMIKFRGHFLIEGDLNPDNSDVDKLFIQLVQTYNQLFEENPINASGVDAKAILSARLSKSRRLENLIAQLPGEKKNGLFGNLIALSLGLTPNFKSNFDLAEDAKLQLSKDTYDDDLDNLLAQIGDQYADLFLAAKNLSDAILLSDILRVNTEITKAPLSASMIKRYDEHHQDLTLLKALVRQQLPEKYKEIFFDQSKNGYAGYIDGGASQEEFYKFIKPILEKMDGTEELLVKLNREDLLRKQRTFDNGSIPHQIHLGELHAILRRQEDFYPFLKDNREKIEKILTFRIPYYVGPLARGNSRFAWMTRKSEETITPWNFEEVVDKGASAQSFIERMTNFDKNLPNEKVLPKHSLLYEYFTVYNELTKVKYVTEGMRKPAFLSGEQKKAIVDLLFKTNRKVTVKQLKEDYFKKIECFDSVEISGVEDRFNASLGTYHDLLKIIKDKDFLDNEENEDILEDIVLTLTLFEDREMIEERLKTYAHLFDDKVMKQLKRRRYTGWGRLSRKLINGIRDKQSGKTILDFLKSDGFANRNFMQLIHDDSLTFKEDIQKAQVSGQGDSLHEHIANLAGSPAIKKGILQTVKVVDELVKVMGRHKPENIVIEMARENQTTQKGQKNSRERMKRIEEGIKELGSQILKEHPVENTQLQNEKLYLYYLQNGRDMYVDQELDINRLSDYDVDHIVPQSFLKDDSIDNKVLTRSDKARGKSDNVPSEEVVKKMKNYWRQLLNAKLITQRKFDNLTKAERGGLSELDKAGFIKRQLVETRQITKHVAQILDSRMNTKYDENDKLIREVKVITLKSKLVSDFRKDFQFYKVREINNYHHAHDAYLNAVVGTALIKKYPKLESEFVYGDYKVYDVRKMIAKSEQEIGKATAKYFFYSNIMNFFKTEITLANGEIRKRPLIETNGETGEIVWDKGRDFATVRKVLSMPQVNIVKKTEVQTGGFSKESILPKRNSDKLIARKKDWDPKKYGGFDSPTVAYSVLVVAKVEKGKSKKLKSVKELLGITIMERSSFEKNPIDFLEAKGYKEVKKDLIIKLPKYSLFELENGRKRMLASAGELQKGNELALPSKYVNFLYLASHYEKLKGSPEDNEQKQLFVEQHKHYLDEIIEQISEFSKRVILADANLDKVLSAYNKHRDKPIREQAENIIHLFTLTNLGAPAAFKYFDTTIDRKRYTSTKEVLDATLIHQSITGLYETRIDLSQLGGDGGGGGGGLLGRDLLTKLKAQIQFSTEGPQVTWEDRPAMCLVLNLEEEYRLHEKPVPPSIDPSWLQLFPMVWAEKAGMGLANQVPPVVVELKSDASPVAVRQYPMSKEAREGIRPHIQRFLDLGILVPCQSPWNTPLLPVKKPGTNDYRPVQDLREVNKRVQDIHPTVPNPYNLLSSLPPSHTWYSVLDLKDAFFCLKLHPNSQPLFAFEWRDPEKGNTGQLTWTRLPQGFKNSPTLFNEALHRDLASFRALNPQVVMLQYVDDLLVAAPTYRDCKEGTRRLLQELSKLGYRVSAKKAQLCREEVTYLGYLLKGGKRWLTPARKATVMKIPTPTTPRQVREFLGKAGFCRLFIPGFASLAAPLYPLTRPKVPFTWTEAHQEAFGRIKEALLSAPALALPDLTKPFALYVDEKEGVARGVLTQTLGPWRRPVAYLSKKLDPVASGWPTCLKAIAAVALLLKDADKLTLGQNVLVIAPHNLESIVRQPPDRWMTNARMTHYQSLLLNERVSFAPPAILNPATLLPVESDDTPIHICSEILAEETGTRPDLRDQPLPGVPAWYTDGSSFIMDGRRQAGAAIVDNKRTVWASNLPEGTSAQKAELIALTQALRLAEGKSINIYTDSRYAFATAHVHGAIYKQRGWLTSAGKDIKNKEEILALLEAIHLPKRVAIIHCPGHQRGTDPVATGNRKADEAAKQAAQSTRILTETTKNAGKRTADGSEFEKRTADGSEFESPKKKAKVE

SEQ ID NO: 6234 - protein, 2210 aa, synthetic construct
MPAAKRVKLDGGDKKYSIGLDIGTNSVGWAVITDEYKVPSKKFKVLGNTDRHSIKKNLIGALLFDSGETAEATRLKRTARRRYTRRKNRICYLQEIFSNEMAKVDDSFFHRLEESFLVEEDKKHERHPIFGNIVDEVAYHEKYPTIYHLRKKLVDSTDKADLRLIYLALAHMIKFRGHFLIEGDLNPDNSDVDKLFIQLVQTYNQLFEENPINASGVDAKAILSARLSKSRRLENLIAQLPGEKKNGLFGNLIALSLGLTPNFKSNFDLAEDAKLQLSKDTYDDDLDNLLAQIGDQYADLFLAAKNLSDAILLSDILRVNTEITKAPLSASMIKRYDEHHQDLTLLKALVRQQLPEKYKEIFFDQSKNGYAGYIDGGASQEEFYKFIKPILEKMDGTEELLVKLNREDLLRKQRTFDNGSIPHQIHLGELHAILRRQEDFYPFLKDNREKIEKILTFRIPYYVGPLARGNSRFAWMTRKSEETITPWNFEEVVDKGASAQSFIERMTNFDKNLPNEKVLPKHSLLYEYFTVYNELTKVKYVTEGMRKPAFLSGEQKKAIVDLLFKTNRKVTVKQLKEDYFKKIECFDSVEISGVEDRFNASLGTYHDLLKIIKDKDFLDNEENEDILEDIVLTLTLFEDREMIEERLKTYAHLFDDKVMKQLKRRRYTGWGRLSRKLINGIRDKQSGKTILDFLKSDGFANRNFMQLIHDDSLTFKEDIQKAQVSGQGDSLHEHIANLAGSPAIKKGILQTVKVVDELVKVMGRHKPENIVIEMARENQTTQKGQKNSRERMKRIEEGIKELGSQILKEHPVENTQLQNEKLYLYYLQNGRDMYVDQELDINRLSDYDVDHIVPQSFLKDDSIDNKVLTRSDKARGKSDNVPSEEVVKKMKNYWRQLLNAKLITQRKFDNLTKAERGGLSELDKAGFIKRQLVETRQITKHVAQILDSRMNTKYDENDKLIREVKVITLKSKLVSDFRKDFQFYKVREINNYHHAHDAYLNAVVGTALIKKYPKLESEFVYGDYKVYDVRKMIAKSEQEIGKATAKYFFYSNIMNFFKTEITLANGEIRKRPLIETNGETGEIVWDKGRDFATVRKVLSMPQVNIVKKTEVQTGGFSKESILPKRNSDKLIARKKDWDPKKYGGFDSPTVAYSVLVVAKVEKGKSKKLKSVKELLGITIMERSSFEKNPIDFLEAKGYKEVKKDLIIKLPKYSLFELENGRKRMLASAGELQKGNELALPSKYVNFLYLASHYEKLKGSPEDNEQKQLFVEQHKHYLDEIIEQISEFSKRVILADANLDKVLSAYNKHRDKPIREQAENIIHLFTLTNLGAPAAFKYFDTTIDRKRYTSTKEVLDATLIHQSITGLYETRIDLSQLGGDGGGGGGGTLGDQGSRGSDPLPEPRVTLTVEGIPTEFLVNTGAEHSVLTKPMGKMGSKRTVVAGATGSKVYPWTTKRLLKIGQKQVTHSFLVIPECPAPLLGRDLLTKLKAQIQFSTEGPQVTWEDRPAMCLVLNLEEEYRLHEKPVPPSIDPSWLQLFPMVWAEKAGMGLANQVPPVVVELKSDASPVAVRQYPMSKEAREGIRPHIQRFLDLGILVPCQSPWNTPLLPVKKPGTNDYRPVQDLREVNKRVQDIHPTVPNPYNLLSSLPPSHTWYSVLDLKDAFFCLKLHPNSQPLFAFEWRDPEKGNTGQLTWTRLPQGFKNSPTLFNEALHRDLASFRALNPQVVMLQYVDDLLVAAPTYRDCKEGTRRLLQELSKLGYRVSAKKAQLCREEVTYLGYLLKGGKRWLTPARKATVMKIPTPTTPRQVREFLGTAGFCRLWIPGFASLAAPLYPLTRPKVPFTWTEAHQEAFGRIKEALLSAPALALPDLTKPFALYVDEKEGVARGVLTQTLGPWRRPVAYLSKKLDPVASGWPTCLKAIAAVALLLKDADKLTLGQNVLVIAPHNLESIVRQPPDRWMTNARMTHYQSLLLNERVSFAPPAILNPATLLPVESDDTPIHICSEILAEETGTRPDLRDQPLPGVPAWYTDGSSFIMDGRRQAGAAIVDNKRTVWASNLPEGTSAQKAELIALTQALRLAEGKSINIYTDSRYAFATAHVHGAIYKQRGWLTSAGKDIKNKEEILALLEAIHLPKRVAIIHCPGHQRGTDPVATGNRKADEAAKQAAQSTRILTETTKNAGKRTADGSEFEKRTADGSEFESPKKKAKVE

SEQ ID NO: 6235 - protein, 2088 aa, synthetic construct
MPAAKRVKLDGGDKKYSIGLDIGTNSVGWAVITDEYKVPSKKFKVLGNTDRHSIKKNLIGALLFDSGETAEATRLKRTARRRYTRRKNRICYLQEIFSNEMAKVDDSFFHRLEESFLVEEDKKHERHPIFGNIVDEVAYHEKYPTIYHLRKKLVDSTDKADLRLIYLALAHMIKFRGHFLIEGDLNPDNSDVDKLFIQLVQTYNQLFEENPINASGVDAKAILSARLSKSRRLENLIAQLPGEKKNGLFGNLIALSLGLTPNFKSNFDLAEDAKLQLSKDTYDDDLDNLLAQIGDQYADLFLAAKNLSDAILLSDILRVNTEITKAPLSASMIKRYDEHHQDLTLLKALVRQQLPEKYKEIFFDQSKNGYAGYIDGGASQEEFYKFIKPILEKMDGTEELLVKLNREDLLRKQRTFDNGSIPHQIHLGELHAILRRQEDFYPFLKDNREKIEKILTFRIPYYVGPLARGNSRFAWMTRKSEETITPWNFEEVVDKGASAQSFIERMTNFDKNLPNEKVLPKHSLLYEYFTVYNELTKVKYVTEGMRKPAFLSGEQKKAIVDLLFKTNRKVTVKQLKEDYFKKIECFDSVEISGVEDRFNASLGTYHDLLKIIKDKDFLDNEENEDILEDIVLTLTLFEDREMIEERLKTYAHLFDDKVMKQLKRRRYTGWGRLSRKLINGIRDKQSGKTILDFLKSDGFANRNFMQLIHDDSLTFKEDIQKAQVSGQGDSLHEHIANLAGSPAIKKGILQTVKVVDELVKVMGRHKPENIVIEMARENQTTQKGQKNSRERMKRIEEGIKELGSQILKEHPVENTQLQNEKLYLYYLQNGRDMYVDQELDINRLSDYDVDHIVPQSFLKDDSIDNKVLTRSDKARGKSDNVPSEEVVKKMKNYWRQLLNAKLITQRKFDNLTKAERGGLSELDKAGFIKRQLVETRQITKHVAQILDSRMNTKYDENDKLIREVKVITLKSKLVSDFRKDFQFYKVREINNYHHAHDAYLNAVVGTALIKKYPKLESEFVYGDYKVYDVRKMIAKSEQEIGKATAKYFFYSNIMNFFKTEITLANGEIRKRPLIETNGETGEIVWDKGRDFATVRKVLSMPQVNIVKKTEVQTGGFSKESILPKRNSDKLIARKKDWDPKKYGGFDSPTVAYSVLVVAKVEKGKSKKLKSVKELLGITIMERSSFEKNPIDFLEAKGYKEVKKDLIIKLPKYSLFELENGRKRMLASAGELQKGNELALPSKYVNFLYLASHYEKLKGSPEDNEQKQLFVEQHKHYLDEIIEQISEFSKRVILADANLDKVLSAYNKHRDKPIREQAENIIHLFTLTNLGAPAAFKYFDTTIDRKRYTSTKEVLDATLIHQSITGLYETRIDLSQLGGDGGGGGGGTLNLEDEYRLYETSAEPEVSPGSTWLSDFPQAWAETGGMGLAVRQAPLIIPLKATSTPVSIKQYPMSQEAKLGIKPHIQRLLDQGILVPCQSPWNTPLLPVKKPGTNDYRPVQDLREVNKRVEDIHPTVPNPYNLLSGLPPSHRWYTVLDLKDAFFCLRLHPTSQPLFAFEWRDPGMGISGQLTWTRLPQGFKNSPTLFNEALHRDLADFRIQHPDLILLQYVDDILLAATSELDCQQGTRALLLTLGNLGYRASAKKAQLCQKQVKYLGYLLKEGQRWLTEARKETVMGQPTPKTPRQLREFLGKAGFCRLFIPGFAEMAAPLYPLTKPGTLFNWGPDQQKAYQEIKQALLTAPALGLPDLTKPFELFVDEKQGYAKGVLTQKLGPWRRPVAYLSKKLDPVAAGWPPCLRMVAAIAVLRKDAGKLTMGQPLVILAPHAVEALVKQPPDRWLSNARMTHYQAMLLDTDRVQFGPVVALNPATLLPLPEEGAPHDCLEILAETHGTRPDLTDQPIPDADHTWYTDGSSFLQEGQRKAGAAVTTETEVIWARALPAGTSAQRAELIALTQALKMAEGKRLNVYTDSRYAFATAHIHGEIYRRRGWLTSEGREIKNKSEILALLKALFLPKRLSIIHCLGHQKGDSAEARGNRLADQAAREAAIKTPPDTSTLLAGKRTADGSEFEKRTADGSEFESPKKKAKVE

SEQ ID NO: 6236 - protein, 2088 aa, synthetic construct
MPAAKRVKLDGGDKKYSIGLDIGTNSVGWAVITDEYKVPSKKFKVLGNTDRHSIKKNLIGALLFDSGETAEATRLKRTARRRYTRRKNRICYLQEIFSNEMAKVDDSFFHRLEESFLVEEDKKHERHPIFGNIVDEVAYHEKYPTIYHLRKKLVDSTDKADLRLIYLALAHMIKFRGHFLIEGDLNPDNSDVDKLFIQLVQTYNQLFEENPINASGVDAKAILSARLSKSRRLENLIAQLPGEKKNGLFGNLIALSLGLTPNFKSNFDLAEDAKLQLSKDTYDDDLDNLLAQIGDQYADLFLAAKNLSDAILLSDILRVNTEITKAPLSASMIKRYDEHHQDLTLLKALVRQQLPEKYKEIFFDQSKNGYAGYIDGGASQEEFYKFIKPILEKMDGTEELLVKLNREDLLRKQRTFDNGSIPHQIHLGELHAILRRQEDFYPFLKDNREKIEKILTFRIPYYVGPLARGNSRFAWMTRKSEETITPWNFEEVVDKGASAQSFIERMTNFDKNLPNEKVLPKHSLLYEYFTVYNELTKVKYVTEGMRKPAFLSGEQKKAIVDLLFKTNRKVTVKQLKEDYFKKIECFDSVEISGVEDRFNASLGTYHDLLKIIKDKDFLDNEENEDILEDIVLTLTLFEDREMIEERLKTYAHLFDDKVMKQLKRRRYTGWGRLSRKLINGIRDKQSGKTILDFLKSDGFANRNFMQLIHDDSLTFKEDIQKAQVSGQGDSLHEHIANLAGSPAIKKGILQTVKVVDELVKVMGRHKPENIVIEMARENQTTQKGQKNSRERMKRIEEGIKELGSQILKEHPVENTQLQNEKLYLYYLQNGRDMYVDQELDINRLSDYDVDHIVPQSFLKDDSIDNKVLTRSDKARGKSDNVPSEEVVKKMKNYWRQLLNAKLITQRKFDNLTKAERGGLSELDKAGFIKRQLVETRQITKHVAQILDSRMNTKYDENDKLIREVKVITLKSKLVSDFRKDFQFYKVREINNYHHAHDAYLNAVVGTALIKKYPKLESEFVYGDYKVYDVRKMIAKSEQEIGKATAKYFFYSNIMNFFKTEITLANGEIRKRPLIETNGETGEIVWDKGRDFATVRKVLSMPQVNIVKKTEVQTGGFSKESILPKRNSDKLIARKKDWDPKKYGGFDSPTVAYSVLVVAKVEKGKSKKLKSVKELLGITIMERSSFEKNPIDFLEAKGYKEVKKDLIIKLPKYSLFELENGRKRMLASAGELQKGNELALPSKYVNFLYLASHYEKLKGSPEDNEQKQLFVEQHKHYLDEIIEQISEFSKRVILADANLDKVLSAYNKHRDKPIREQAENIIHLFTLTNLGAPAAFKYFDTTIDRKRYTSTKEVLDATLIHQSITGLYETRIDLSQLGGDGGGGGGGTLNIEDEYRLHETSKGPDVPLGSTWLSDFPQAWAETGGMGLAVRQAPLIIPLKATSTPVSIKQYPMSQEARLGIKPHIQRLLDQGILVPCQSPWNTPLLPVKKPGTNDYRPVQDLREVNKRVEDIHPTVPNPYNLLSGLPPSHQWYTVLDLKDAFFCLRLHPTSQSLFAFEWRDPEMGISGQLTWTRLPQGFKNSPTLFNEALHRDLADFRIQHPDLILLQYVDDLLLAATSELDCQQGTRALLQTLGDLGYRASAKKAQICQKQVKYLGYLLKEGQRWLTEARKETVMGQPTPKTPRQLREFLGTAGFCRLWIPGFAEMAAPLYPLTKPGTLFEWGPDQQKAYQEIKQALLTAPALGLPDLTKPFELFVDEKQGYAKGVLTQKLGPWRRPVAYLSKKLDPVAAGWPPCLRMVAAIAVLTKDAGKLTMGQPLVILAPHAVEALVKQPPDRWLSNARMTHYQALLLDTDRVQFGPIVALNPATLLPLPEEGLQHDCLDILAEAHGTRPDLTDQPLPDADHTWYTDGSSFLQEGQRKAGAAVTTETEVVWAKALPAGTSAQRAELIALTQALKMAEGKKLNVYTDSRYAFATAHIHGEIYRRRGWLTSEGKEIKNKDEILALLKALFLPKRLSIIHCPGHQKGNRAEARGNRMADQAAREVATRETPETSTLLAGKRTADGSEFEKRTADGSEFESPKKKAKVE

SEQ ID NO: 6237 - protein, 2088 aa, synthetic construct
MPAAKRVKLDGGDKKYSIGLDIGTNSVGWAVITDEYKVPSKKFKVLGNTDRHSIKKNLIGALLFDSGETAEATRLKRTARRRYTRRKNRICYLQEIFSNEMAKVDDSFFHRLEESFLVEEDKKHERHPIFGNIVDEVAYHEKYPTIYHLRKKLVDSTDKADLRLIYLALAHMIKFRGHFLIEGDLNPDNSDVDKLFIQLVQTYNQLFEENPINASGVDAKAILSARLSKSRRLENLIAQLPGEKKNGLFGNLIALSLGLTPNFKSNFDLAEDAKLQLSKDTYDDDLDNLLAQIGDQYADLFLAAKNLSDAILLSDILRVNTEITKAPLSASMIKRYDEHHQDLTLLKALVRQQLPEKYKEIFFDQSKNGYAGYIDGGASQEEFYKFIKPILEKMDGTEELLVKLNREDLLRKQRTFDNGSIPHQIHLGELHAILRRQEDFYPFLKDNREKIEKILTFRIPYYVGPLARGNSRFAWMTRKSEETITPWNFEEVVDKGASAQSFIERMTNFDKNLPNEKVLPKHSLLYEYFTVYNELTKVKYVTEGMRKPAFLSGEQKKAIVDLLFKTNRKVTVKQLKEDYFKKIECFDSVEISGVEDRFNASLGTYHDLLKIIKDKDFLDNEENEDILEDIVLTLTLFEDREMIEERLKTYAHLFDDKVMKQLKRRRYTGWGRLSRKLINGIRDKQSGKTILDFLKSDGFANRNFMQLIHDDSLTFKEDIQKAQVSGQGDSLHEHIANLAGSPAIKKGILQTVKVVDELVKVMGRHKPENIVIEMARENQTTQKGQKNSRERMKRIEEGIKELGSQILKEHPVENTQLQNEKLYLYYLQNGRDMYVDQELDINRLSDYDVDHIVPQSFLKDDSIDNKVLTRSDKARGKSDNVPSEEVVKKMKNYWRQLLNAKLITQRKFDNLTKAERGGLSELDKAGFIKRQLVETRQITKHVAQILDSRMNTKYDENDKLIREVKVITLKSKLVSDFRKDFQFYKVREINNYHHAHDAYLNAVVGTALIKKYPKLESEFVYGDYKVYDVRKMIAKSEQEIGKATAKYFFYSNIMNFFKTEITLANGEIRKRPLIETNGETGEIVWDKGRDFATVRKVLSMPQVNIVKKTEVQTGGFSKESILPKRNSDKLIARKKDWDPKKYGGFDSPTVAYSVLVVAKVEKGKSKKLKSVKELLGITIMERSSFEKNPIDFLEAKGYKEVKKDLIIKLPKYSLFELENGRKRMLASAGELQKGNELALPSKYVNFLYLASHYEKLKGSPEDNEQKQLFVEQHKHYLDEIIEQISEFSKRVILADANLDKVLSAYNKHRDKPIREQAENIIHLFTLTNLGAPAAFKYFDTTIDRKRYTSTKEVLDATLIHQSITGLYETRIDLSQLGGDGGGGGGGTLNIEDEHRLHETSKEPDVSLGSTWLSDFPQAWAETGGMGLAVRQAPLIIPLKATSTPVSIKQYPMSQEARLGIKPHIQRLLDQGILVPCQSPWNTPLLPVKKPGTNDYRPVQDLREVNKRVEDIHPTVPNPYNLLSGLPPSHQWYTVLDLKDAFFCLRLHPTSQPLFAFEWRDPEMGISGQLTWTRLPQGFKNSPTLFNEALHRDLADFRIQHPDLILLQYVDDLLLAATSELDCQQGTRALLQTLGNLGYRASAKKAQICQKQVKYLGYLLKEGQRWLTEARKETVMGQPTPKTPRQLREFLGTAGFCRLWIPGFAEMAAPLYPLTKPGTLFNWGPDQQKAYQEIKQALLTAPALGLPDLTKPFELFVDEKQGYAKGVLTQKLGPWRRPVAYLSKKLDPVAAGWPPCLRMVAAIAVLTKDAGKLTMGQPLVILAPHAVEALVKQPPDRWLSNARMTHYQALLLDTDRVQFGPVVALNPATLLPLPEEGLQHNCLDILAEAHGTRPDLTDQPLPDADHTWYTDGSSLLQEGQRKAGAAVTTETEVIWAKALPAGTSAQRAELIALTQALKMAEGKKLNVYTDSRYAFATAHIHGEIYRRRGWLTSEGKEIKNKDEILALLKALFLPKRLSIIHCPGHQKGHSAEARGNRMADQAARKAAITETPDTSTLLAGKRTADGSEFEKRTADGSEFESPKKKAKVE

SEQ ID NO: 6238 - protein, 2088 aa, synthetic construct; identical to SEQ ID NO: 6237

SEQ ID NO: 6239 - protein, 2088 aa, synthetic construct
MPAAKRVKLDGGDKKYSIGLDIGTNSVGWAVITDEYKVPSKKFKVLGNTDRHSIKKNLIGALLFDSGETAEATRLKRTARRRYTRRKNRICYLQEIFSNEMAKVDDSFFHRLEESFLVEEDKKHERHPIFGNIVDEVAYHEKYPTIYHLRKKLVDSTDKADLRLIYLALAHMIKFRGHFLIEGDLNPDNSDVDKLFIQLVQTYNQLFEENPINASGVDAKAILSARLSKSRRLENLIAQLPGEKKNGLFGNLIALSLGLTPNFKSNFDLAEDAKLQLSKDTYDDDLDNLLAQIGDQYADLFLAAKNLSDAILLSDILRVNTEITKAPLSASMIKRYDEHHQDLTLLKALVRQQLPEKYKEIFFDQSKNGYAGYIDGGASQEEFYKFIKPILEKMDGTEELLVKLNREDLLRKQRTFDNGSIPHQIHLGELHAILRRQEDFYPFLKDNREKIEKILTFRIPYYVGPLARGNSRFAWMTRKSEETITPWNFEEVVDKGASAQSFIERMTNFDKNLPNEKVLPKHSLLYEYFTVYNELTKVKYVTEGMRKPAFLSGEQKKAIVDLLFKTNRKVTVKQLKEDYFKKIECFDSVEISGVEDRFNASLGTYHDLLKIIKDKDFLDNEENEDILEDIVLTLTLFEDREMIEERLKTYAHLFDDKVMKQLKRRRYTGWGRLSRKLINGIRDKQSGKTILDFLKSDGFANRNFMQLIHDDSLTFKEDIQKAQVSGQGDSLHEHIANLAGSPAIKKGILQTVKVVDELVKVMGRHKPENIVIEMARENQTTQKGQKNSRERMKRIEEGIKELGSQILKEHPVENTQLQNEKLYLYYLQNGRDMYVDQELDINRLSDYDVDHIVPQSFLKDDSIDNKVLTRSDKARGKSDNVPSEEVVKKMKNYWRQLLNAKLITQRKFDNLTKAERGGLSELDKAGFIKRQLVETRQITKHVAQILDSRMNTKYDENDKLIREVKVITLKSKLVSDFRKDFQFYKVREINNYHHAHDAYLNAVVGTALIKKYPKLESEFVYGDYKVYDVRKMIAKSEQEIGKATAKYFFYSNIMNFFKTEITLANGEIRKRPLIETNGETGEIVWDKGRDFATVRKVLSMPQVNIVKKTEVQTGGFSKESILPKRNSDKLIARKKDWDPKKYGGFDSPTVAYSVLVVAKVEKGKSKKLKSVKELLGITIMERSSFEKNPIDFLEAKGYKEVKKDLIIKLPKYSLFELENGRKRMLASAGELQKGNELALPSKYVNFLYLASHYEKLKGSPEDNEQKQLFVEQHKHYLDEIIEQISEFSKRVILADANLDKVLSAYNKHRDKPIREQAENIIHLFTLTNLGAPAAFKYFDTTIDRKRYTSTKEVLDATLIHQSITGLYETRIDLSQLGGDGGGGGGGTLNIEDEYRLHEISTEPDVSPGSTWLSDFPQAWAETGGMGLAVRQAPLIIPLKATSTPVSIKQYPMSQEAKLGIKPHIQRLLDQGILVPCQSPWNTPLLPVKKPGTNDYRPVQGLREVNKRVEDIHPTVPNPYNLLSGLPTSHRWYTVLDLKDAFFCLRLHPTSQPLFASEWRDPGMGISGQLTWTRLPQGFKNSPTLFNEALHRGLADFRIQHPDLILLQYVDDLLLAATSELDCQQGTRALLKTLGNLGYRASAKKAQICQKQVKYLGYLLREGQRWLTEARKETVMGQPTPKTPRQLREFLGTAGFCRLWIPRFAEMAAPLYPLTKPGTLFNWGPDQQKAYHEIKQALLTAPALGLPDLTKPFELFVDEKQGYAKGVLTQKLGPWRRPVAYLSKKLDPVAAGWPPCLRMVAAIAVLTKDAGKLTMGQPLVILAPHAVEALVKQPPDRWLSNARMTHYQAMLLDTDRVQFGPVVALNPATLLPLPEEGAPHDCLEILAETHGTEPDLTDQPIPDADHTWYTDGSSFLQEGQRKAGAAVTTETEVIWARALPAGTSAQRAELIALTQALKMAEGKRLNVYTDSRYAFATAHIHGEIYKRRGWLTSEGREIKNKSEILALLKALFLPKRLSIIHCLGHQKGDSAEARGNRLADQAAREAAIKTPPDTSTLLAGKRTADGSEFEKRTADGSEFESPKKKAKVE

SEQ ID NO: 6240 - protein, 2082 aa, synthetic construct
MPAAKRVKLDGGDKKYSIGLDIGTNSVGWAVITDEYKVPSKKFKVLGNTDRHSIKKNLIGALLFDSGETAEATRLKRTARRRYTRRKNRICYLQEIFSNEMAKVDDSFFHRLEESFLVEEDKKHERHPIFGNIVDEVAYHEKYPTIYHLRKKLVDSTDKADLRLIYLALAHMIKFRGHFLIEGDLNPDNSDVDKLFIQLVQTYNQLFEENPINASGVDAKAILSARLSKSRRLENLIAQLPGEKKNGLFGNLIALSLGLTPNFKSNFDLAEDAKLQLSKDTYDDDLDNLLAQIGDQYADLFLAAKNLSDAILLSDILRVNTEITKAPLSASMIKRYDEHHQDLTLLKALVRQQLPEKYKEIFFDQSKNGYAGYIDGGASQEEFYKFIKPILEKMDGTEELLVKLNREDLLRKQRTFDNGSIPHQIHLGELHAILRRQEDFYPFLKDNREKIEKILTFRIPYYVGPLARGNSRFAWMTRKSEETITPWNFEEVVDKGASAQSFIERMTNFDKNLPNEKVLPKHSLLYEYFTVYNELTKVKYVTEGMRKPAFLSGEQKKAIVDLLFKTNRKVTVKQLKEDYFKKIECFDSVEISGVEDRFNASLGTYHDLLKIIKDKDFLDNEENEDILEDIVLTLTLFEDREMIEERLKTYAHLFDDKVMKQLKRRRYTGWGRLSRKLINGIRDKQSGKTILDFLKSDGFANRNFMQLIHDDSLTFKEDIQKAQVSGQGDSLHEHIANLAGSPAIKKGILQTVKVVDELVKVMGRHKPENIVIEMARENQTTQKGQKNSRERMKRIEEGIKELGSQILKEHPVENTQLQNEKLYLYYLQNGRDMYVDQELDINRLSDYDVDHIVPQSFLKDDSIDNKVLTRSDKARGKSDNVPSEEVVKKMKNYWRQLLNAKLITQRKFDNLTKAERGGLSELDKAGFIKRQLVETRQITKHVAQILDSRMNTKYDENDKLIREVKVITLKSKLVSDFRKDFQFYKVREINNYHHAHDAYLNAVVGTALIKKYPKLESEFVYGDYKVYDVRKMIAKSEQEIGKATAKYFFYSNIMNFFKTEITLANGEIRKRPLIETNGETGEIVWDKGRDFATVRKVLSMPQVNIVKKTEVQTGGFSKESILPKRNSDKLIARKKDWDPKKYGGFDSPTVAYSVLVVAKVEKGKSKKLKSVKELLGITIMERSSFEKNPIDFLEAKGYKEVKKDLIIKLPKYSLFELENGRKRMLASAGELQKGNELALPSKYVNFLYLASHYEKLKGSPEDNEQKQLFVEQHKHYLDEIIEQISEFSKRVILADANLDKVLSAYNKHRDKPIREQAENIIHLFTLTNLGAPAAFKYFDTTIDRKRYTSTKEVLDATLIHQSITGLYETRIDLSQLGGDGGGGGGGTLQLDDEYRLYSPLVKPDQNIQFWLEQFPQAWAETAGMGLAKQVPPQVIQLKASATPVSVRQYPLSKEAQEGIRPHVQRLIQQGILVPVQSPWNTPLLPVRKPGTNDYRPVQDLREVNKRVQDIHPTVPNPYNLLCALPPQRSWYTVLDLKDAFFCLRLHPTSQPLFAFEWRDPGTGRTGQLTWTRLPQGFKNSPTIFNEALHRDLANFRIQHPQVTLLQYVDDLLLAGATKQDCLEGTKALLLELSDLGYRASAKKAQICRREVTYLGYSLRDGQRWLTEARKKTVVQIPAPTTAKQVREFLGTAGFCRLWIPGFATLAAPLYPLTKPKGEFSWAPEHQKAFDAIKKALLSAPALALPDVTKPFTLYVDERKGVARGVLTQTLGPWRRPVAYLSKKLDPVASGWPVCLKAIAAVAILVKDADKLTLGQNITVIAPHALENIVRQPPDRWMTNARMTHYQSLLLTERVTFAPPAALNPATLLPEETDEPVTHDCHQLLIEETGVRKDLTDIPLTGEVLTWFTDGSSYVVEGKRMAGAAVVDGTRTIWASSLPEGTSAQKAELMALTQALRLAEGKSINIYTDSRYAFATAHVHGAIYKQRGWLTSAGREIKNKEEILSLLEALHLPKRLAIIHCPGHQKAKDPISRGNQMADRVAKQAAQGVNLLAGKRTADGSEFEKRTADGSEFESPKKKAKVE

SEQ ID NO: 6241 - protein, 2079 aa, synthetic construct
MPAAKRVKLDGGDKKYSIGLDIGTNSVGWAVITDEYKVPSKKFKVLGNTDRHSIKKNLIGALLFDSGETAEATRLKRTARRRYTRRKNRICYLQEIFSNEMAKVDDSFFHRLEESFLVEEDKKHERHPIFGNIVDEVAYHEKYPTIYHLRKKLVDSTDKADLRLIYLALAHMIKFRGHFLIEGDLNPDNSDVDKLFIQLVQTYNQLFEENPINASGVDAKAILSARLSKSRRLENLIAQLPGEKKNGLFGNLIALSLGLTPNFKSNFDLAEDAKLQLSKDTYDDDLDNLLAQIGDQYADLFLAAKNLSDAILLSDILRVNTEITKAPLSASMIKRYDEHHQDLTLLKALVRQQLPEKYKEIFFDQSKNGYAGYIDGGASQEEFYKFIKPILEKMDGTEELLVKLNREDLLRKQRTFDNGSIPHQIHLGELHAILRRQEDFYPFLKDNREKIEKILTFRIPYYVGPLARGNSRFAWMTRKSEETITPWNFEEVVDKGASAQSFIERMTNFDKNLPNEKVLPKHSLLYEYFTVYNELTKVKYVTEGMRKPAFLSGEQKKAIVDLLFKTNRKVTVKQLKEDYFKKIECFDSVEISGVEDRFNASLGTYHDLLKIIKDKDFLDNEENEDILEDIVLTLTLFEDREMIEERLKTYAHLFDDKVMKQLKRRRYTGWGRLSRKLINGIRDKQSGKTILDFLKSDGFANRNFMQLIHDDSLTFKEDIQKAQVSGQGDSLHEHIANLAGSPAIKKGILQTVKVVDELVKVMGRHKPENIVIEMARENQTTQKGQKNSRERMKRIEEGIKELGSQILKEHPVENTQLQNEKLYLYYLQNGRDMYVDQELDINRLSDYDVDHIVPQSFLKDDSIDNKVLTRSDKARGKSDNVPSEEVVKKMKNYWRQLLNAKLITQRKFDNLTKAERGGLSELDKAGFIKRQLVETRQITKHVAQILDSRMNTKYDENDKLIREVKVITLKSKLVSDFRKDFQFYKVREINNYHHAHDAYLNAVVGTALIKKYPKLESEFVYGDYKVYDVRKMIAKSEQEIGKATAKYFFYSNIMNFFKTEITLANGEIRKRPLIETNGETGEIVWDKGRDFATVRKVLSMPQVNIVKKTEVQTGGFSKESILPKRNSDKLIARKKDWDPKKYGGFDSPTVAYSVLVVAKVEKGKSKKLKSVKELLGITIMERSSFEKNPIDFLEAKGYKEVKKDLIIKLPKYSLFELENGRKRMLASAGELQKGNELALPSKYVNFLYLASHYEKLKGSPEDNEQKQLFVEQHKHYLDEIIEQISEFSKRVILADANLDKVLSAYNKHRDKPIREQAENIIHLFTLTNLGAPAAFKYFDTTIDRKRYTSTKEVLDATLIHQSITGLYETRIDLSQLGGDGGGGGGGIPWLMKKPLQLTTLVPLQEYEERLLKQTMLTGSYKEKLQSLFLKYDALWQHWENQVGHRRIKPHHIATGTVNPRPQKQYPINPKAKASIQTVINDLLKQGVLIQQNSIMNTPVYPVPKPDGKWRMVLDYREVNKTIPLIAAQNQHSAGILSSIFRGKYKTTLDLSNGFWAHSITPESYWLTAFTWLGQQYCWTRLPQGFLNSPALFNADVVDLLKEVPNVQVYVDDIYISHDDPREHLEQLEKVFSLLLNAGYVVSLKKSEIAQHEVEFLGFNITKEGRGLTETFKQKLLNITPPRDLKQLQSILGKLNFARNFIPNFSELVKPLYNIIATAPGKYITWTTDNSQQLQNIISMLNSAENLEERNPEVRLIMKVNTSPSAGYIRFYNEFAKRPIMYLNYVYTKAEVKFTNTEKLLTTIHKGLIKALDLGMGQEILVYSPIVSMTKIQKTPLPERKALPIRWITWMSYLEDPRIQFHYDKTLPELQQVPTVTDDIIAKIKHPSEFSMVFYTDGSAIKHPNVNKSHNAGMGIAQVQFKPEFTVINTWSIPLGDHTAQLAEVAAVEFACKKALKIDGPVLIVTDSFYVAESVNKELPYWQSNGFFNNKKKPLKHVSKWKSIADCIQLKPDIIIIHEKGHQPTASTFHTEGNNLADKLATQGSYVVNAGKRTADGSEFEKRTADGSEFESPKKKAKVE

SEQ ID NO: 6242 - protein, 2086 aa, synthetic construct
MPAAKRVKLDGGDKKYSIGLDIGTNSVGWAVITDEYKVPSKKFKVLGNTDRHSIKKNLIGALLFDSGETAEATRLKRTARRRYTRRKNRICYLQEIFSNEMAKVDDSFFHRLEESFLVEEDKKHERHPIFGNIVDEVAYHEKYPTIYHLRKKLVDSTDKADLRLIYLALAHMIKFRGHFLIEGDLNPDNSDVDKLFIQLVQTYNQLFEENPINASGVDAKAILSARLSKSRRLENLIAQLPGEKKNGLFGNLIALSLGLTPNFKSNFDLAEDAKLQLSKDTYDDDLDNLLAQIGDQYADLFLAAKNLSDAILLSDILRVNTEITKAPLSASMIKRYDEHHQDLTLLKALVRQQLPEKYKEIFFDQSKNGYAGYIDGGASQEEFYKFIKPILEKMDGTEELLVKLNREDLLRKQRTFDNGSIPHQIHLGELHAILRRQEDFYPFLKDNREKIEKILTFRIPYYVGPLARGNSRFAWMTRKSEETITPWNFEEVVDKGASAQSFIERMTNFDKNLPNEKVLPKHSLLYEYFTVYNELTKVKYVTEGMRKPAFLSGEQKKAIVDLLFKTNRKVTVKQLKEDYFKKIECFDSVEISGVEDRFNASLGTYHDLLKIIKDKDFLDNEENEDILEDIVLTLTLFEDREMIEERLKTYAHLFDDKVMKQLKRRRYTGWGRLSRKLINGIRDKQSGKTILDFLKSDGFANRNFMQLIHDDSLTFKEDIQKAQVSGQGDSLHEHIANLAGSPAIKKGILQTVKVVDELVKVMGRHKPENIVIEMARENQTTQKGQKNSRERMKRIEEGIKELGSQILKEHPVENTQLQNEKLYLYYLQNGRDMYVDQELDINRLSDYDVDHIVPQSFLKDDSIDNKVLTRSDKARGKSDNVPSEEVVKKMKNYWRQLLNAKLITQRKFDNLTKAERGGLSELDKAGFIKRQLVETRQITKHVAQILDSRMNTKYDENDKLIREVKVITLKSKLVSDFRKDFQFYKVREINNYHHAHDAYLNAVVGTALIKKYPKLESEFVYGDYKVYDVRKMIAKSEQEIGKATAKYFFYSNIMNFFKTEITLANGEIRKRPLIETNGETGEIVWDKGRDFATVRKVLSMPQVNIVKKTEVQTGGFSKESILPKRNSDKLIARKKDWDPKKYGGFDSPTVAYSVLVVAKVEKGKSKKLKSVKELLGITIMERSSFEKNPIDFLEAKGYKEVKKDLIIKLPKYSLFELENGRKRMLASAGELQKGNELALPSKYVNFLYLASHYEKLKGSPEDNEQKQLFVEQHKHYLDEIIEQISEFSKRVILADANLDKVLSAYNKHRDKPIREQAENIIHLFTLTNLGAPAAFKYFDTTIDRKRYTSTKEVLDATLIHQSITGLYETRIDLSQLGGDGGGGGGGVLNLEEEYRLHEKPVPSSIDPSWLQLFPTVWAERAGMGLANQVPPVVVELRSGASPVAVRQYPMSKEAREGIRPHIQRFLDLGVLVPCQSPWNTPLLPVKKPGTNDYRPVQDLREINKRVQDIHPTVPNPYNLLSSLPPSHTWYSVLDLKDAFFCLKLHPNSQPLFAFEWRDPEKGNTGQLTWTRLPQGFKNSPTLFDEALHRDLAPFRALNPQVVLLQYVDDLLVAAPTYRDCKEGTQKLLQELSKLGYRVSAKKAQLCQKEVTYLGYLLKEGKRWLTPARKATVMKIPPPTTPRQVREFLGTAGFCRLWIPGFASLAAPLYPLTKESIPFIWTEEHQKAFDRIKEALLSAPALALPDLTKPFTLYVDERAGVARGVLTQTLGPWRRPVAYLSKKLDPVASGWPTCLKAVAAVALLLKDADKLTLGQNVTVIASHSLESIVRQPPDRWMTNARMTHYQSLLLNERVSFAPPAVLNPATLLPVESEATPVHRCSEILAEETGTRRDLKDQPLPGVPAWYTDGSSFIAEGKRRAGAAIVDGKRTVWASSLPEGTSAQKAELVALTQALRLAEGKDINIYTDSRYAFATAHIHGAIYKQRGLLTSAGKDIKNKEEILALLEAIHLPKRVAIIHCPGHQKGNDPVATGNRRADEAAKQAALSTRVLAETTKPAGKRTADGSEFEKRTADGSEFESPKKKAKVE

SEQ ID NO: 6243 - protein, 2086 aa, synthetic construct
MPAAKRVKLDGGDKKYSIGLDIGTNSVGWAVITDEYKVPSKKFKVLGNTDRHSIKKNLIGALLFDSGETAEATRLKRTARRRYTRRKNRICYLQEIFSNEMAKVDDSFFHRLEESFLVEEDKKHERHPIFGNIVDEVAYHEKYPTIYHLRKKLVDSTDKADLRLIYLALAHMIKFRGHFLIEGDLNPDNSDVDKLFIQLVQTYNQLFEENPINASGVDAKAILSARLSKSRRLENLIAQLPGEKKNGLFGNLIALSLGLTPNFKSNFDLAEDAKLQLSKDTYDDDLDNLLAQIGDQYADLFLAAKNLSDAILLSDILRVNTEITKAPLSASMIKRYDEHHQDLTLLKALVRQQLPEKYKEIFFDQSKNGYAGYIDGGASQEEFYKFIKPILEKMDGTEELLVKLNREDLLRKQRTFDNGSIPHQIHLGELHAILRRQEDFYPFLKDNREKIEKILTFRIPYYVGPLARGNSRFAWMTRKSEETITPWNFEEVVDKGASAQSFIERMTNFDKNLPNEKVLPKHSLLYEYFTVYNELTKVKYVTEGMRKPAFLSGEQKKAIVDLLFKTNRKVTVKQLKEDYFKKIECFDSVEISGVEDRFNASLGTYHDLLKIIKDKDFLDNEENEDILEDIVLTLTLFEDREMIEERLKTYAHLFDDKVMKQLKRRRYTGWGRLSRKLINGIRDKQSGKTILDFLKSDGFANRNFMQLIHDDSLTFKEDIQKAQVSGQGDSLHEHIANLAGSPAIKKGILQTVKVVDELVKVMGRHKPENIVIEMARENQTTQKGQKNSRERMKRIEEGIKELGSQILKEHPVENTQLQNEKLYLYYLQNGRDMYVDQELDINRLSDYDVDHIVPQSFLKDDSIDNKVLTRSDKARGKSDNVPSEEVVKKMKNYWRQLLNAKLITQRKFDNLTKAERGGLSELDKAGFIKRQLVETRQITKHVAQILDSRMNTKYDENDKLIREVKVITLKSKLVSDFRKDFQFYKVREINNYHHAHDAYLNAVVGTALIKKYPKLESEFVYGDYKVYDVRKMIAKSEQEIGKATAKYFFYSNIMNFFKTEITLANGEIRKRPLIETNGETGEIVWDKGRDFATVRKVLSMPQVNIVKKTEVQTGGFSKESILPKRNSDKLIARKKDWDPKKYGGFDSPTVAYSVLVVAKVEKGKSKKLKSVKELLGITIMERSSFEKNPIDFLEAKGYKEVKKDLIIKLPKYSLFELENGRKRMLASAGELQKGNELALPSKYVNFLYLASHYEKLKGSPEDNEQKQLFVEQHKHYLDEIIEQISEFSKRVILADANLDKVLSAYNKHRDKPIREQAENIIHLFTLTNLGAPAAFKYFDTTIDRKRYTSTKEVLDATLIHQSITGLYETRIDLSQLGGDGGGGGGGVLNLEEEYRLHEKPVPSSIDPSWLQLFPTVWAERAGMGLANQVPPVVVELRSGASPVAVRQYPMSKEAREGIRPHIQRFLDLGVLVPCQSPWNTPLLPVKKPGTNDYRPVQDLREINKRVQDIHPTVPNPYNLLSSLPPSHTWYSVLDLKDAFFCLKLHPNSQPLFAFEWRDPEKGNTGQLTWTRLPQGFKNSPTLFNEALHRDLAPFRALNPQVVLLQYVDDLLVAAPTYRDCKEGTQKLLQELSKLGYRVSAKKAQLCQKEVTYLGYLLKEGKRWLTPARKATVMKIPPPTTPRQVREFLGKAGFCRLFIPGFASLAAPLYPLTKPSIPFIWTEEHQKAFDRIKEALLSAPALALPDLTKPFTLYVDERAGVARGVLTQTLGPWRRPVAYLSKKLDPVASGWPTCLKAVAAVALLLKDADKLTLGQNVTVIASHSLESIVRQPPDRWMTNARMTHYQSLLLNERVSFAPPAVLNPATLLPVESEATPVHRCSEILAEETGTRRDLKDQPLPGVPAWYTDGSSFIAEGKRRAGAAIVDGKRTVWASSLPEGTSAQKAELVALTQALRLAEGKDINIYTDSRYAFATAHIHGAIYKQRGWLTSAGKDIKNKEEILALLEAIHLPKRVAIIHCPGHQKGNDPVATGNRRADEAAKQAALSTRVLAETTKPAGKRTADGSEFEKRTADGSEFESPKKKAKVE

SEQ ID NO: 6244 - protein, 2091 aa, synthetic construct
MPAAKRVKLDGGDKKYSIGLDIGTNSVGWAVITDEYKVPSKKFKVLGNTDRHSIKKNLIGALLFDSGETAEATRLKRTARRRYTRRKNRICYLQEIFSNEMAKVDDSFFHRLEESFLVEEDKKHERHPIFGNIVDEVAYHEKYPTIYHLRKKLVDSTDKADLRLIYLALAHMIKFRGHFLIEGDLNPDNSDVDKLFIQLVQTYNQLFEENPINASGVDAKAILSARLSKSRRLENLIAQLPGEKKNGLFGNLIALSLGLTPNFKSNFDLAEDAKLQLSKDTYDDDLDNLLAQIGDQYADLFLAAKNLSDAILLSDILRVNTEITKAPLSASMIKRYDEHHQDLTLLKALVRQQLPEKYKEIFFDQSKNGYAGYIDGGASQEEFYKFIKPILEKMDGTEELLVKLNREDLLRKQRTFDNGSIPHQIHLGELHAILRRQEDFYPFLKDNREKIEKILTFRIPYYVGPLARGNSRFAWMTRKSEETITPWNFEEVVDKGASAQSFIERMTNFDKNLPNEKVLPKHSLLYEYFTVYNELTKVKYVTEGMRKPAFLSGEQKKAIVDLLFKTNRKVTVKQLKEDYFKKIECFDSVEISGVEDRFNASLGTYHDLLKIIKDKDFLDNEENEDILEDIVLTLTLFEDREMIEERLKTYAHLFDDKVMKQLKRRRYTGWGRLSRKLINGIRDKQSGKTILDFLKSDGFANRNFMQLIHDDSLTFKEDIQKAQVSGQGDSLHEHIANLAGSPAIKKGILQTVKVVDELVKVMGRHKPENIVIEMARENQTTQKGQKNSRERMKRIEEGIKELGSQILKEHPVENTQLQNEKLYLYYLQNGRDMYVDQELDINRLSDYDVDHIVPQSFLKDDSIDNKVLTRSDKARGKSDNVPSEEVVKKMKNYWRQLLNAKLITQRKFDNLTKAERGGLSELDKAGFIKRQLVETRQITKHVAQILDSRMNTKYDENDKLIREVKVITLKSKLVSDFRKDFQFYKVREINNYHHAHDAYLNAVVGTALIKKYPKLESEFVYGDYKVYDVRKMIAKSEQEIGKATAKYFFYSNIMNFFKTEITLANGEIRKRPLIETNGETGEIVWDKGRDFATVRKVLSMPQVNIVKKTEVQTGGFSKESILPKRNSDKLIARKKDWDPKKYGGFDSPTVAYSVLVVAKVEKGKSKKLKSVKELLGITIMERSSFEKNPIDFLEAKGYKEVKKDLIIKLPKYSLFELENGRKRMLASAGELQKGNELALPSKYVNFLYLASHYEKLKGSPEDNEQKQLFVEQHKHYLDEIIEQISEFSKRVILADANLDKVLSAYNKHRDKPIREQAENIIHLFTLTNLGAPAAFKYFDTTIDRKRYTSTKEVLDATLIHQSITGLYETRIDLSQLGGDGGGGGGGGTAPLEEEYRLFLEAPIQNVTLLEQWKREIPKVWAEINPPGLASTQAPIHVQLLSTALPVRVRQYPITLEAKRSLRETIRKFRAAGILRPVHSPWNTPLLPVRKSGTSEYRMVQDLREVNKRVETIHPTVPNPYTLLSLLPPDRIWYSVLDLKDAFFCIPLAPESQLIFAFEWADAEEGESGQLTWTRLPQGFKNSPTLFNEALNRDLQGFRLDHPSVSLLQYVDDLLIAADTQAACLSATRDLLMTLAELGYRVSGKKAQLCQEEVTYLGFKIHKGSRSLSNSRTQAILQIPVPKTKRQVREFLGTIGYCRLWIPGFAELAQPLYAATRPGNDPLVWGEKEEEAFQSLKLALTQPPALALPSLDKPFQLFVEETSGAAKGVLTQALGPWKRPVAYLSKRLDPVAAGWPRCLRAIAAAALLTREASKLTFGQDIEITSSHNLESLLRSPPDKWLTNARITQYQVLLLDPPRVRFKQTAALNPATLLPETDDTLPIHHCLDTLDSLTSTRPDLTDQPLAQAEATLFTDGSSYIRDGKRYAGAAVVTLDSVIWAEPLPIGTSAQKAELIALTKALEWSKDKSVNIYTDSRYAFATLHVHGMIYRERGWLTAGGKAIKNAPEILALLTAVWLPKRVAVMHCKGHQKDDAPTSTGNRRADEVAREVAIRPLSTQATISAGKRTADGSEFEKRTADGSEFESPKKKAKVE

SEQ ID NO: 6245 - protein, 2095 aa, synthetic construct
MPAAKRVKLDGGDKKYSIGLDIGTNSVGWAVITDEYKVPSKKFKVLGNTDRHSIKKNLIGALLFDSGETAEATRLKRTARRRYTRRKNRICYLQEIFSNEMAKVDDSFFHRLEESFLVEEDKKHERHPIFGNIVDEVAYHEKYPTIYHLRKKLVDSTDKADLRLIYLALAHMIKFRGHFLIEGDLNPDNSDVDKLFIQLVQTYNQLFEENPINASGVDAKAILSARLSKSRRLENLIAQLPGEKKNGLFGNLIALSLGLTPNFKSNFDLAEDAKLQLSKDTYDDDLDNLLAQIGDQYADLFLAAKNLSDAILLSDILRVNTEITKAPLSASMIKRYDEHHQDLTLLKALVRQQLPEKYKEIFFDQSKNGYAGYIDGGASQEEFYKFIKPILEKMDGTEELLVKLNREDLLRKQRTFDNGSIPHQIHLGELHAILRRQEDFYPFLKDNREKIEKILTFRIPYYVGPLARGNSRFAWMTRKSEETITPWNFEEVVDKGASAQSFIERMTNFDKNLPNEKVLPKHSLLYEYFTVYNELTKVKYVTEGMRKPAFLSGEQKKAIVDLLFKTNRKVTVKQLKEDYFKKIECFDSVEISGVEDRFNASLGTYHDLLKIIKDKDFLDNEENEDILEDIVLTLTLFEDREMIEERLKTYAHLFDDKVMKQLKRRRYTGWGRLSRKLINGIRDKQSGKTILDFLKSDGFANRNFMQLIHDDSLTFKEDIQKAQVSGQGDSLHEHIANLAGSPAIKKGILQTVKVVDELVKVMGRHKPENIVIEMARENQTTQKGQKNSRERMKRIEEGIKELGSQILKEHPVENTQLQNEKLYLYYLQNGRDMYVDQELDINRLSDYDVDHIVPQSFLKDDSIDNKVLTRSDKARGKSDNVPSEEVVKKMKNYWRQLLNAKLITQRKFDNLTKAERGGLSELDKAGFIKRQLVETRQITKHVAQILDSRMNTKYDENDKLIREVKVITLKSKLVSDFRKDFQFYKVREINNYHHAHDAYLNAVVGTALIKKYPKLESEFVYGDYKVYDVRKMIAKSEQEIGKATAKYFFYSNIMNFFKTEITLANGEIRKRPLIETNGETGEIVWDKGRDFATVRKVLSMPQVNIVKKTEVQTGGFSKESILPKRNSDKLIARKKDWDPKKYGGFDSPTVAYSVLVVAKVEKGKSKKLKSVKELLGITIMERSSFEKNPIDFLEAKGYKEVKKDLIIKLPKYSLFELENGRKRMLASAGELQKGNELALPSKYVNFLYLASHYEKLKGSPEDNEQKQLFVEQHKHYLDEIIEQISEFSKRVILADANLDKVLSAYNKHRDKPIREQAENIIHLFTLTNLGAPAAFKYFDTTIDRKRYTSTKEVLDATLIHQSITGLYETRIDLSQLGGDGGGGGGGGTVSLQDEHRLFDIPVTTSLPDVWLQDFPQAWAETGGLGRAKCQAPIIIDLKPTAVPVSIKQYPMSLEAHMGIRQHIIKFLELGVLRPCRSPWNTPLLPVKKPGTQDYRPVQDLREINKRTVDIHPTVPNPYNLLSTLKPDYSWYTVLDLKDAFFCLPLAPQSQELFAFEWKDPERGISGQLTWTRLPQGFKNSPTLFNEALHRDLTDFRTQHPEVTLLQYVDDLLLAAPTKKACTQGTRHLLQELGEKGYRASAKKAQICQTKVTYLGYILSEGKRWLTPGRIETVARIPPPRNPREVREFLGTAGFCRLWIPGFAELAAPLYALTKPSTPFTWQTEHQLAFEALKKALLSAPALGLPDTSKPFTLFLDERQGIAKGVLTQKLGPWKRPVAYLSKKLDPVAAGWPPCLRIMAATAMLVKDSAKLTLGQPLTVITPHTLEAIVRQPPDRWITNARLTHYQALLLDTDRVQFGPPVTLNPATLLPVPENQPSPHDCRQVLAETHGTREDLKDQELPDADHTWYTDGSSYLDSGTRRAGAAVVDGHNTIWAQSLPPGTSAQKAELIALTKALELSKGKKANIYTDSRYAFATAHTHGSIYERRGWLTSEGKEIKNKAEIIALLKALFLPQEVAIIHCPGHQKGQDPVAVGNRQADRVARQAAMAEVLTLATEPDNTSHITAGKRTADGSEFEKRTADGSEFESPKKKAKVE

SEQ ID NO: 6246 - protein, 2087 aa, synthetic construct
MPAAKRVKLDGGDKKYSIGLDIGTNSVGWAVITDEYKVPSKKFKVLGNTDRHSIKKNLIGALLFDSGETAEATRLKRTARRRYTRRKNRICYLQEIFSNEMAKVDDSFFHRLEESFLVEEDKKHERHPIFGNIVDEVAYHEKYPTIYHLRKKLVDSTDKADLRLIYLALAHMIKFRGHFLIEGDLNPDNSDVDKLFIQLVQTYNQLFEENPINASGVDAKAILSARLSKSRRLENLIAQLPGEKKNGLFGNLIALSLGLTPNFKSNFDLAEDAKLQLSKDTYDDDLDNLLAQIGDQYADLFLAAKNLSDAILLSDILRVNTEITKAPLSASMIKRYDEHHQDLTLLKALVRQQLPEKYKEIFFDQSKNGYAGYIDGGASQEEFYKFIKPILEKMDGTEELLVKLNREDLLRKQRTFDNGSIPHQIHLGELHAILRRQEDFYPFLKDNREKIEKILTFRIPYYVGPLARGNSRFAWMTRKSEETITPWNFEEVVDKGASAQSFIERMTNFDKNLPNEKVLPKHSLLYEYFTVYNELTKVKYVTEGMRKPAFLSGEQKKAIVDLLFKTNRKVTVKQLKEDYFKKIECFDSVEISGVEDRFNASLGTYHDLLKIIKDKDFLDNEENEDILEDIVLTLTLFEDREMIEERLKTYAHLFDDKVMKQLKRRRYTGWGRLSRKLINGIRDKQSGKTILDFLKSDGFANRNFMQLIHDDSLTFKEDIQKAQVSGQGDSLHEHIANLAGSPAIKKGILQTVKVVDELVKVMGRHKPENIVIEMARENQTTQKGQKNSRERMKRIEEGIKELGSQILKEHPVENTQLQNEKLYLYYLQNGRDMYVDQELDINRLSDYDVDHIVPQSFLKDDSIDNKVLTRSDKARGKSDNVPSEEVVKKMKNYWRQLLNAKLITQRKFDNLTKAERGGLSELDKAGFIKRQLVETRQITKHVAQILDSRMNTKYDENDKLIREVKVITLKSKLVSDFRKDFQFYKVREINNYHHAHDAYLNAVVGTALIKKYPKLESEFVYGDYKVYDVRKMIAKSEQEIGKATAKYFFYSNIMNFFKTEITLANGEIRKRPLIETNGETGEIVWDKGRDFATVRKVLSMPQVNIVKKTEVQTGGFSKESILPKRNSDKLIARKKDWDPKKYGGFDSPTVAYSVLVVAKVEKGKSKKLKSVKELLGITIMERSSFEKNPIDFLEAKGYKEVKKDLIIKLPKYSLFELENGRKRMLASAGELQKGNELALPSKYVNFLYLASHYEKLKGSPEDNEQKQLFVEQHKHYLDEIIEQISEFSKRVILADANLDKVLSAYNKHRDKPIREQAENIIHLFTLTNLGAPAAFKYFDTTIDRKRYTSTKEVLDATLIHQSITGLYETRIDLSQLGGDGGGGGGGGVLNLEEEYRLHEKPVPSSIDPSWLQLFPTVWAERAGMGLANQVPPVVVELRSGASPVAVRQYPMSKEAREGIRPHIQKFLDLGVLVPCRSPWNTPLLPVKKPGTNDYRPVQDLREINKRVQDIHPTVPNPYNLLSSLPPSYTWYSVLDLKDAFFCLRLHPNSQPLFAFEWKDPEKGNTGQLTWTRLPQGFKNSPTLFNEALHRDLAPFRALNPQVVLLQYVDDLLVAAPTYEDCKKGTQKLLQELSKLGYRVSAKKAQLCQREVTYLGYLLKEGKRWLTPARKATVMKIPVPTTPRQVREFLGKAGFCRLFIPGFASLAAPLYPLTKPSIPFIWTEEHQQAFDHIKKALLSAPALALPDLTKPFTLYIDERAGVARGVLTQTLGPWRRPVAYLSKKLDPVASGWPTCLKAVAAVALLLKDADKLTLGQNVTVIASHSLESIVRQPPDRWMTNARMTHYQSLLLNERVSFAPPAVLNPATLLPVESEATPVHRCSEILAEETGTRRDLEDQPLPGVPTWYTDGSSFITEGKRRAGAPIVDGKRTVWASSLPEGTSAQKAELVALTQALRLAEGKNINIYTDSRYAFATAHIHGAIYKQRGWLTSAGKDIKNKEEILALLEAIHLPRRVAIIHCPGHQRGSNPVATGNRRADEAAKQAALSTRVLAGTTKPAGKRTADGSEFEKRTADGSEFESPKKKAKVE

SEQ ID NO: 6247 - protein, 2211 aa, synthetic construct
MPAAKRVKLDGGDKKYSIGLDIGTNSVGWAVITDEYKVPSKKFKVLGNTDRHSIKKNLIGALLFDSGETAEATRLKRTARRRYTRRKNRICYLQEIFSNEMAKVDDSFFHRLEESFLVEEDKKHERHPIFGNIVDEVAYHEKYPTIYHLRKKLVDSTDKADLRLIYLALAHMIKFRGHFLIEGDLNPDNSDVDKLFIQLVQTYNQLFEENPINASGVDAKAILSARLSKSRRLENLIAQLPGEKKNGLFGNLIALSLGLTPNFKSNFDLAEDAKLQLSKDTYDDDLDNLLAQIGDQYADLFLAAKNLSDAILLSDILRVNTEITKAPLSASMIKRYDEHHQDLTLLKALVRQQLPEKYKEIFFDQSKNGYAGYIDGGASQEEFYKFIKPILEKMDGTEELLVKLNREDLLRKQRTFDNGSIPHQIHLGELHAILRRQEDFYPFLKDNREKIEKILTFRIPYYVGPLARGNSRFAWMTRKSEETITPWNFEEVVDKGASAQSFIERMTNFDKNLPNEKVLPKHSLLYEYFTVYNELTKVKYVTEGMRKPAFLSGEQKKAIVDLLFKTNRKVTVKQLKEDYFKKIECFDSVEISGVEDRFNASLGTYHDLLKIIKDKDFLDNEENEDILEDIVLTLTLFEDREMIEERLKTYAHLFDDKVMKQLKRRRYTGWGRLSRKLINGIRDKQSGKTILDFLKSDGFANRNFMQLIHDDSLTFKEDIQKAQVSGQGDSLHEHIANLAGSPAIKKGILQTVKVVDELVKVMGRHKPENIVIEMARENQTTQKGQKNSRERMKRIEEGIKELGSQILKEHPVENTQLQNEKLYLYYLQNGRDMYVDQELDINRLSDYDVDHIVPQSFLKDDSIDNKVLTRSDKARGKSDNVPSEEVVKKMKNYWRQLLNAKLITQRKFDNLTKAERGGLSELDKAGFIKRQLVETRQITKHVAQILDSRMNTKYDENDKLIREVKVITLKSKLVSDFRKDFQFYKVREINNYHHAHDAYLNAVVGTALIKKYPKLESEFVYGDYKVYDVRKMIAKSEQEIGKATAKYFFYSNIMNFFKTEITLANGEIRKRPLIETNGETGEIVWDKGRDFATVRKVLSMPQVNIVKKTEVQTGGFSKESILPKRNSDKLIARKKDWDPKKYGGFDSPTVAYSVLVVAKVEKGKSKKLKSVKELLGITIMERSSFEKNPIDFLEAKGYKEVKKDLIIKLPKYSLFELENGRKRMLASAGELQKGNELALPSKYVNFLYLASHYEKLKGSPEDNEQKQLFVEQHKHYLDEIIEQISEFSKRVILADANLDKVLSAYNKHRDKPIREQAENIIHLFTLTNLGAPAAFKYFDTTIDRKRYTSTKEVLDATLIHQSITGLYETRIDLSQLGGDGGGGGGGGTLGDQGSRGSDPLPEPRVTLTVEGIPTEFLVNTGAEHSVLTKPMGKMGSKRTVVAGATGSKVYPWTTKRLLKIGQKQVTHSFLVIPECPAPLLGRDLLTKLKAQIQFSTEGPQVTWEDRPAMCLVLNLEEEYRLHEKPVPPSIDPSWLQLFPMVWAEKAGMGLANQVPPVVVELKSDASPVAVRQYPMSKEAREGIRPHIQRFLDLGILVPCQSPWNTPLLPVKKPGTNDYRPVQDLREVNKRVQDIHPTVPNPYNLLSSLPPSHTWYSVLDLKDAFFCLKLHPNSQPLFAFEWRDPEKGNTGQLTWTRLPQGFKNSPTLFNEALHRDLASFRALNPQVVMLQYVDDLLVAAPTYRDCKEGTRRLLQELSKLGYRVSAKKAQLCREEVTYLGYLLKGGKRWLTPARKATVMKIPTPTTPRQVREFLGTAGFCRLWIPGFASLAAPLYPLTRPKVPFTWTEAHQEAFGRIKEALLSAPALALPDLTKPFALYVDEKEGVARGVLTQTLGPWRRPVAYLSKKLDPVASGWPTCLKAIAAVALLLKDADKLTLGQNVLVIAPHNLESIVRQPPDRWMTNARMTHYQSLLLNERVSFAPPAILNPATLLPVESDDTPIHICSEILAEETGTRPDLRDQPLPGVPAWYTDGSSFIMDGRRQAGAAIVDNKRTVWASNLPEGTSAQKAELIALTQALRLAEGKSINIYTDSRYAFATAHVHGAIYKQRGWLTSAGKDIKNKEEILALLEAIHLPKRVAIIHCPGHQRGTDPVATGNRKADEAAKQAAQSTRILTETTKNAGKRTADGSEFEKRTADGSEFESPKKKAKVE

SEQ ID NO: 6248 - protein, 2089 aa, synthetic construct
MPAAKRVKLDGGDKKYSIGLDIGTNSVGWAVITDEYKVPSKKFKVLGNTDRHSIKKNLIGALLFDSGETAEATRLKRTARRRYTRRKNRICYLQEIFSNEMAKVDDSFFHRLEESFLVEEDKKHERHPIFGNIVDEVAYHEKYPTIYHLRKKLVDSTDKADLRLIYLALAHMIKFRGHFLIEGDLNPDNSDVDKLFIQLVQTYNQLFEENPINASGVDAKAILSARLSKSRRLENLIAQLPGEKKNGLFGNLIALSLGLTPNFKSNFDLAEDAKLQLSKDTYDDDLDNLLAQIGDQYADLFLAAKNLSDAILLSDILRVNTEITKAPLSASMIKRYDEHHQDLTLLKALVRQQLPEKYKEIFFDQSKNGYAGYIDGGASQEEFYKFIKPILEKMDGTEELLVKLNREDLLRKQRTFDNGSIPHQIHLGELHAILRRQEDFYPFLKDNREKIEKILTFRIPYYVGPLARGNSRFAWMTRKSEETITPWNFEEVVDKGASAQSFIERMTNFDKNLPNEKVLPKHSLLYEYFTVYNELTKVKYVTEGMRKPAFLSGEQKKAIVDLLFKTNRKVTVKQLKEDYFKKIECFDSVEISGVEDRFNASLGTYHDLLKIIKDKDFLDNEENEDILEDIVLTLTLFEDREMIEERLKTYAHLFDDKVMKQLKRRRYTGWGRLSRKLINGIRDKQSGKTILDFLKSDGFANRNFMQLIHDDSLTFKEDIQKAQVSGQGDSLHEHIANLAGSPAIKKGILQTVKVVDELVKVMGRHKPENIVIEMARENQTTQKGQKNSRERMKRIEEGIKELGSQILKEHPVENTQLQNEKLYLYYLQNGRDMYVDQELDINRLSDYDVDHIVPQSFLKDDSIDNKVLTRSDKARGKSDNVPSEEVVKKMKNYWRQLLNAKLITQRKFDNLTKAERGGLSELDKAGFIKRQLVETRQITKHVAQILDSRMNTKYDENDKLIREVKVITLKSKLVSDFRKDFQFYKVREINNYHHAHDAYLNAVVGTALIKKYPKLESEFVYGDYKVYDVRKMIAKSEQEIGKATAKYFFYSNIMNFFKTEITLANGEIRKRPLIETNGETGEIVWDKGRDFATVRKVLSMPQVNIVKKTEVQTGGFSKESILPKRNSDKLIARKKDWDPKKYGGFDSPTVAYSVLVVAKVEKGKSKKLKSVKELLGITIMERSSFEKNPIDFLEAKGYKEVKKDLIIKLPKYSLFELENGRKRMLASAGELQKGNELALPSKYVNFLYLASHYEKLKGSPEDNEQKQLFVEQHKHYLDEIIEQISEFSKRVILADANLDKVLSAYNKHRDKPIREQAENIIHLFTLTNLGAPAAFKYFDTTIDRKRYTSTKEVLDATLIHQSITGLYETRIDLSQLGGDGGGGGGGGTLNLEDEYRLYETSAEPEVSPGSTWLSDFPQAWAETGGMGLAVRQAPLIIPLKATSTPVSIKQYPMSQEAKLGIKPHIQRLLDQGILVPCQSPWNTPLLPVKKPGTNDYRPVQDLREVNKRVEDIHPTVPNPYNLLSGLPPSHRWYTVLDLKDAFFCLRLHPTSQPLFAFEWRDPGMGISGQLTWTRLPQGFKNSPTLFNEALHRDLADFRIQHPDLILLQYVDDILLAATSELDCQQGTRALLLTLGNLGYRASAKKAQLCQKQVKYLGYLLKEGQRWLTEARKETVMGQPTPKTPRQLREFLGKAGFCRLFIPGFAEMAAPLYPLTKPGTLFNWGPDQQKAYQEIKQALLTAPALGLPDLTKPFELFVDEKQGYAKGVLTQKLGPWRRPVAYLSKKLDPVAAGWPPCLRMVAAIAVLRKDAGKLTMGQPLVILAPHAVEALVKQPPDRWLSNARMTHYQAMLLDTDRVQFGPVVALNPATLLPLPEEGAPHDCLEILAETHGTRPDLTDQPIPDADHTWYTDGSSFLQEGQRKAGAAVTTETEVIWARALPAGTSAQRAELIALTQALKMAEGKRLNVYTDSRYAFATAHIHGEIYRRRGWLTSEGREIKNKSEILALLKALFLPKRLSIIHCLGHQKGDSAEARGNRLADQAAREAAIKTPPDTSTLLAGKRTADGSEFEKRTADGSEFESPKKKAKVE

SEQ ID NO: 6249 - protein, 2089 aa, synthetic construct
MPAAKRVKLDGGDKKYSIGLDIGTNSVGWAVITDEYKVPSKKFKVLGNTDRHSIKKNLIGALLFDSGETAEATRLKRTARRRYTRRKNRICYLQEIFSNEMAKVDDSFFHRLEESFLVEEDKKHERHPIFGNIVDEVAYHEKYPTIYHLRKKLVDSTDKADLRLIYLALAHMIKFRGHFLIEGDLNPDNSDVDKLFIQLVQTYNQLFEENPINASGVDAKAILSARLSKSRRLENLIAQLPGEKKNGLFGNLIALSLGLTPNFKSNFDLAEDAKLQLSKDTYDDDLDNLLAQIGDQYADLFLAAKNLSDAILLSDILRVNTEITKAPLSASMIKRYDEHHQDLTLLKALVRQQLPEKYKEIFFDQSKNGYAGYIDGGASQEEFYKFIKPILEKMDGTEELLVKLNREDLLRKQRTFDNGSIPHQIHLGELHAILRRQEDFYPFLKDNREKIEKILTFRIPYYVGPLARGNSRFAWMTRKSEETITPWNFEEVVDKGASAQSFIERMTNFDKNLPNEKVLPKHSLLYEYFTVYNELTKVKYVTEGMRKPAFLSGEQKKAIVDLLFKTNRKVTVKQLKEDYFKKIECFDSVEISGVEDRFNASLGTYHDLLKIIKDKDFLDNEENEDILEDIVLTLTLFEDREMIEERLKTYAHLFDDKVMKQLKRRRYTGWGRLSRKLINGIRDKQSGKTILDFLKSDGFANRNFMQLIHDDSLTFKEDIQKAQVSGQGDSLHEHIANLAGSPAIKKGILQTVKVVDELVKVMGRHKPENIVIEMARENQTTQKGQKNSRERMKRIEEGIKELGSQILKEHPVENTQLQNEKLYLYYLQNGRDMYVDQELDINRLSDYDVDHIVPQSFLKDDSIDNKVLTRSDKARGKSDNVPSEEVVKKMKNYWRQLLNAKLITQRKFDNLTKAERGGLSELDKAGFIKRQLVETRQITKHVAQILDSRMNTKYDENDKLIREVKVITLKSKLVSDFRKDFQFYKVREINNYHHAHDAYLNAVVGTALIKKYPKLESEFVYGDYKVYDVRKMIAKSEQEIGKATAKYFFYSNIMNFFKTEITLANGEIRKRPLIETNGETGEIVWDKGRDFATVRKVLSMPQVNIVKKTEVQTGGFSKESILPKRNSDKLIARKKDWDPKKYGGFDSPTVAYSVLVVAKVEKGKSKKLKSVKELLGITIMERSSFEKNPIDFLEAKGYKEVKKDLIIKLPKYSLFELENGRKRMLASAGELQKGNELALPSKYVNFLYLASHYEKLKGSPEDNEQKQLFVEQHKHYLDEIIEQISEFSKRVILADANLDKVLSAYNKHRDKPIREQAENIIHLFTLTNLGAPAAFKYFDTTIDRKRYTSTKEVLDATLIHQSITGLYETRIDLSQLGGDGGGGGGGGLGIEDEYRLHETSTEPDVSLGSTWLSDFPQAWAETGGMGLAVRQAPLIIPLKATSTPVSIQQYPMSHEARLGIKPHIQRLLDQGILVPCQSPWNTPLLPVKKPGTNDYRPVQDLREVNKRVEDIHPTVPNPYNLLSGLPPSHQWYTVLDLKDAFFCLRLHPTSQPLFAFEWRDPGMGISGQLTWTRLPQGFKNSPTLFNEALHRDLADFRIQHPDLILLQYVDDILLAATSELDCQQGTRALLQTLGDLGYRASAKKAQICQKQVKYLGYLLREGQRWLTEARKETVMGQPVPKTPRQLREFLGKAGFCRLFIPGFAEMAAPLYPLTKPGTLFSWGPDQQKAYQEIKQALLTAPALGLPDLTKPFELFVDEKQGYAKGVLTQKLGPWRRPVAYLSKKLDPVAAGWPPCLRMVAAIAVLTKDAGKLTMGQPLVILAPHAVEALVKQPPDRWLSNARMTHYQAMLLDTDRVQFGPVVALNPATLLPLPEEGAPHDCLEILAETHGTRPDLTDQPIPDADHTWYTDGSSFLQEGQRKAGAAVTTETEVIWAGALPAGTSAQRAELIALTQALKMAEGKRLNVYTDSRYAFATAHIHGEIYRRRGWLTSEGREIKNKSEILALLKALFLPKRLSIIHCLGHQKGDSAEARGNRLADQAAREAAIKTPPDTSTLLIAGKRTADGSEFEKRTADGSEFESPKKKAKVE

SEQ ID NO: 6250 - protein, 2092 aa, synthetic construct
MPAAKRVKLDGGDKKYSIGLDIGTNSVGWAVITDEYKVPSKKFKVLGNTDRHSIKKNLIGALLFDSGETAEATRLKRTARRRYTRRKNRICYLQEIFSNEMAKVDDSFFHRLEESFLVEEDKKHERHPIFGNIVDEVAYHEKYPTIYHLRKKLVDSTDKADLRLIYLALAHMIKFRGHFLIEGDLNPDNSDVDKLFIQLVQTYNQLFEENPINASGVDAKAILSARLSKSRRLENLIAQLPGEKKNGLFGNLIALSLGLTPNFKSNFDLAEDAKLQLSKDTYDDDLDNLLAQIGDQYADLFLAAKNLSDAILLSDILRVNTEITKAPLSASMIKRYDEHHQDLTLLKALVRQQLPEKYKEIFFDQSKNGYAGYIDGGASQEEFYKFIKPILEKMDGTEELLVKLNREDLLRKQRTFDNGSIPHQIHLGELHAILRRQEDFYPFLKDNREKIEKILTFRIPYYVGPLARGNSRFAWMTRKSEETITPWNFEEVVDKGASAQSFIERMTNFDKNLPNEKVLPKHSLLYEYFTVYNELTKVKYVTEGMRKPAFLSGEQKKAIVDLLFKTNRKVTVKQLKEDYFKKIECFDSVEISGVEDRFNASLGTYHDLLKIIKDKDFLDNEENEDILEDIVLTLTLFEDREMIEERLKTYAHLFDDKVMKQLKRRRYTGWGRLSRKLINGIRDKQSGKTILDFLKSDGFANRNFMQLIHDDSLTFKEDIQKAQVSGQGDSLHEHIANLAGSPAIKKGILQTVKVVDELVKVMGRHKPENIVIEMARENQTTQKGQKNSRERMKRIEEGIKELGSQILKEHPVENTQLQNEKLYLYYLQNGRDMYVDQELDINRLSDYDVDHIVPQSFLKDDSIDNKVLTRSDKARGKSDNVPSEEVVKKMKNYWRQLLNAKLITQRKFDNLTKAERGGLSELDKAGFIKRQLVETRQITKHVAQILDSRMNTKYDENDKLIREVKVITLKSKLVSDFRKDFQFYKVREINNYHHAHDAYLNAVVGTALIKKYPKLESEFVYGDYKVYDVRKMIAKSEQEIGKATAKYFFYSNIMNFFKTEITLANGEIRKRPLIETNGETGEIVWDKGRDFATVRKVLSMPQVNIVKKTEVQTGGFSKESILPKRNSDKLIARKKDWDPKKYGGFDSPTVAYSVLVVAKVEKGKSKKLKSVKELLGITIMERSSFEKNPIDFLEAKGYKEVKKDLIIKLPKYSLFELENGRKRMLASAGELQKGNELALPSKYVNFLYLASHYEKLKGSPEDNEQKQLFVEQHKHYLDEIIEQISEFSKRVILADANLDKVLSAYNKHRDKPIREQAENIIHLFTLTNLGAPAAFKYFDTTIDRKRYTSTKEVLDATLIHQSITGLYETRIDLSQLGGDGGGGGGGGGTAPLEEEYRLFLEAPIQNVTLLEQWKREIPKVWAEINPPGLASTQAPIHVQLLSTALPVRVRQYPITLEAKRSLRETIRKFRAAGILRPVHSPWNTPLLPVRKSGTSEYRMVQDLREVNKRVETIHPTVPNPYTLLSLLPPDRIWYSVLDLKDAFFCIPLAPESQLIFAFEWADAEEGESGQLTWTRLPQGFKNSPTLFNEALNRDLQGFRLDHPSVSLLQYVDDLLIAADTQAACLSATRDLLMTLAELGYRVSGKKAQLCQEEVTYLGFKIHKGSRSLSNSRTQAILQIPVPKTKRQVREFLGTIGYCRLWIPGFAELAQPLYAATRPGNDPLVWGEKEEEAFQSLKLALTQPPALALPSLDKPFQLFVEETSGAAKGVLTQALGPWKRPVAYLSKRLDPVAAGWPRCLRAIAAAALLTREASKLTFGQDIEITSSHNLESLLRSPPDKWLTNARITQYQVLLLDPPRVRFKQTAALNPATLLPETDDTLPIHHCLDTLDSLTSTRPDLTDQPLAQAEATLFTDGSSYIRDGKRYAGAAVVTLDSVIWAEPLPIGTSAQKAELIALTKALEWSKDKSVNIYTDSRYAFATLHVHGMIYRERGWLTAGGKAIKNAPEILALLTAVWLPKRVAVMHCKGHQKDDAPTSTGNRRADEVAREVAIRPLSTQATISAGKRTADGSEFEKRTADGSEFESPKKKAKVE

SEQ ID NO: 6251 - protein, 2212 aa, synthetic construct
MPAAKRVKLDGGDKKYSIGLDIGTNSVGWAVITDEYKVPSKKFKVLGNTDRHSIKKNLIGALLFDSGETAEATRLKRTARRRYTRRKNRICYLQEIFSNEMAKVDDSFFHRLEESFLVEEDKKHERHPIFGNIVDEVAYHEKYPTIYHLRKKLVDSTDKADLRLIYLALAHMIKFRGHFLIEGDLNPDNSDVDKLFIQLVQTYNQLFEENPINASGVDAKAILSARLSKSRRLENLIAQLPGEKKNGLFGNLIALSLGLTPNFKSNFDLAEDAKLQLSKDTYDDDLDNLLAQIGDQYADLFLAAKNLSDAILLSDILRVNTEITKAPLSASMIKRYDEHHQDLTLLKALVRQQLPEKYKEIFFDQSKNGYAGYIDGGASQEEFYKFIKPILEKMDGTEELLVKLNREDLLRKQRTFDNGSIPHQIHLGELHAILRRQEDFYPFLKDNREKIEKILTFRIPYYVGPLARGNSRFAWMTRKSEETITPWNFEEVVDKGASAQSFIERMTNFDKNLPNEKVLPKHSLLYEYFTVYNELTKVKYVTEGMRKPAFLSGEQKKAIVDLLFKTNRKVTVKQLKEDYFKKIECFDSVEISGVEDRFNASLGTYHDLLKIIKDKDFLDNEENEDILEDIVLTLTLFEDREMIEERLKTYAHLFDDKVMKQLKRRRYTGWGRLSRKLINGIRDKQSGKTILDFLKSDGFANRNFMQLIHDDSLTFKEDIQKAQVSGQGDSLHEHIANLAGSPAIKKGILQTVKVVDELVKVMGRHKPENIVIEMARENQTTQKGQKNSRERMKRIEEGIKELGSQILKEHPVENTQLQNEKLYLYYLQNGRDMYVDQELDINRLSDYDVDHIVPQSFLKDDSIDNKVLTRSDKARGKSDNVPSEEVVKKMKNYWRQLLNAKLITQRKFDNLTKAERGGLSELDKAGFIKRQLVETRQITKHVAQILDSRMNTKYDENDKLIREVKVITLKSKLVSDFRKDFQFYKVREINNYHHAHDAYLNAVVGTALIKKYPKLESEFVYGDYKVYDVRKMIAKSEQEIGKATAKYFFYSNIMNFFKTEITLANGEIRKRPLIETNGETGEIVWDKGRDFATVRKVLSMPQVNIVKKTEVQTGGFSKESILPKRNSDKLIARKKDWDPKKYGGFDSPTVAYSVLVVAKVEKGKSKKLKSVKELLGITIMERSSFEKNPIDFLEAKGYKEVKKDLIIKLPKYSLFELENGRKRMLASAGELQKGNELALPSKYVNFLYLASHYEKLKGSPEDNEQKQLFVEQHKHYLDEIIEQISEFSKRVILADANLDKVLSAYNKHRDKPIREQAENIIHLFTLTNLGAPAAFKYFDTTIDRKRYTSTKEVLDATLIHQSITGLYETRIDLSQLGGDGGGGGGGGGTLGDQGSRGSDPLPEPRVTLTVEGIPTEFLVNTGAEHSVLTKPMGKMGSKRTVVAGATGSKVYPWTTKRLLKIGQKQVTHSFLVIPECPAPLLGRDLLTKLKAQIQFSTEGPQVTWEDRPAMCLVLNLEEEYRLHEKPVPPSIDPSWLQLFPMVWAEKAGMGLANQVPPVVVELKSDASPVAVRQYPMSKEAREGIRPHIQRFLDLGILVPCQSPWNTPLLPVKKPGTNDYRPVQDLREVNKRVQDIHPTVPNPYNLLSSLPPSHTWYSVLDLKDAFFCLKLHPNSQPLFAFEWRDPEKGNTGQLTWTRLPQGFKNSPTLFNEALHRDLASFRALNPQVVMLQYVDDLLVAAPTYRDCKEGTRRLLQELSKLGYRVSAKKAQLCREEVTYLGYLLKGGKRWLTPARKATVMKIPTPTTPRQVREFLGTAGFCRLWIPGFASLAAPLYPLTRPKVPFTWTEAHQEAFGRIKEALLSAPALALPDLTKPFALYVDEKEGVARGVLTQTLGPWRRPVAYLSKKLDPVASGWPTCLKAIAAVALLLKDADKLTLGQNVLVIAPHNLESIVRQPPDRWMTNARMTHYQSLLLNERVSFAPPAILNPATLLPVESDDTPIHICSEILAEETGTRPDLRDQPLPGVPAWYTDGSSFIMDGRRQAGAAIVDNKRTVWASNLPEGTSAQKAELIALTQALRLAEGKSINIYTDSRYAFATAHVHGAIYKQRGWLTSAGKDIKNKEEILALLEAIHLPKRVAIIHCPGHQRGTDPVATGNRKADEAAKQAAQSTRILTETTKNAGKRTADGSEFEKRTADGSEFESPKKKAKVE

SEQ ID NO: 6252 - protein, 2088 aa, synthetic construct
MPAAKRVKLDGGDKKYSIGLDIGTNSVGWAVITDEYKVPSKKFKVLGNTDRHSIKKNLIGALLFDSGETAEATRLKRTARRRYTRRKNRICYLQEIFSNEMAKVDDSFFHRLEESFLVEEDKKHERHPIFGNIVDEVAYHEKYPTIYHLRKKLVDSTDKADLRLIYLALAHMIKFRGHFLIEGDLNPDNSDVDKLFIQLVQTYNQLFEENPINASGVDAKAILSARLSKSRRLENLIAQLPGEKKNGLFGNLIALSLGLTPNFKSNFDLAEDAKLQLSKDTYDDDLDNLLAQIGDQYADLFLAAKNLSDAILLSDILRVNTEITKAPLSASMIKRYDEHHQDLTLLKALVRQQLPEKYKEIFFDQSKNGYAGYIDGGASQEEFYKFIKPILEKMDGTEELLVKLNREDLLRKQRTFDNGSIPHQIHLGELHAILRRQEDFYPFLKDNREKIEKILTFRIPYYVGPLARGNSRFAWMTRKSEETITPWNFEEVVDKGASAQSFIERMTNFDKNLPNEKVLPKHSLLYEYFTVYNELTKVKYVTEGMRKPAFLSGEQKKAIVDLLFKTNRKVTVKQLKEDYFKKIECFDSVEISGVEDRFNASLGTYHDLLKIIKDKDFLDNEENEDILEDIVLTLTLFEDREMIEERLKTYAHLFDDKVMKQLKRRRYTGWGRLSRKLINGIRDKQSGKTILDFLKSDGFANRNFMQLIHDDSLTFKEDIQKAQVSGQGDSLHEHIANLAGSPAIKKGILQTVKVVDELVKVMGRHKPENIVIEMARENQTTQKGQKNSRERMKRIEEGIKELGSQILKEHPVENTQLQNEKLYLYYLQNGRDMYVDQELDINRLSDYDVDHIVPQSFLKDDSIDNKVLTRSDKARGKSDNVPSEEVVKKMKNYWRQLLNAKLITQRKFDNLTKAERGGLSELDKAGFIKRQLVETRQITKHVAQILDSRMNTKYDENDKLIREVKVITLKSKLVSDFRKDFQFYKVREINNYHHAHDAYLNAVVGTALIKKYPKLESEFVYGDYKVYDVRKMIAKSEQEIGKATAKYFFYSNIMNFFKTEITLANGEIRKRPLIETNGETGEIVWDKGRDFATVRKVLSMPQVNIVKKTEVQTGGFSKESILPKRNSDKLIARKKDWDPKKYGGFDSPTVAYSVLVVAKVEKGKSKKLKSVKELLGITIMERSSFEKNPIDFLEAKGYKEVKKDLIIKLPKYSLFELENGRKRMLASAGELQKGNELALPSKYVNFLYLASHYEKLKGSPEDNEQKQLFVEQHKHYLDEIIEQISEFSKRVILADANLDKVLSAYNKHRDKPIREQAENIIHLFTLTNLGAPAAFKYFDTTIDRKRYTSTKEVLDATLIHQSITGLYETRIDLSQLGGDGGGGGGGGGVLNLEEEYRLHEKPVPSSIDPSWLQLFPTVWAERAGMGLANQVPPVVVELRSGASPVAVRQYPMSKEAREGIRPHIQRFLDLGVLVPCQSPWNTPLLPVKKPGTNDYRPVQDLREINKRVQDIHPTVPNPYNLLSSLPPSHTWYSVLDLKDAFFCLKLHPNSQPLFAFEWRDPEKGNTGQLTWTRLPQGFKNSPTLFDEALHRDLAPFRALNPQVVLLQYVDDLLVAAPTYRDCKEGTQKLLQELSKLGYRVSAKKAQLCQKEVTYLGYLLKEGKRWLTPARKATVMKIPPPTTPRQVREFLGTAGFCRLWIPGFASLAAPLYPLTKESIPFIWTEEHQKAFDRIKEALLSAPALALPDLTKPFTLYVDERAGVARGVLTQTLGPWRRPVAYLSKKLDPVASGWPTCLKAVAAVALLLKDADKLTLGQNVTVIASHSLESIVRQPPDRWMTNARMTHYQSLLLNERVSFAPPAVLNPATLLPVESEATPVHRCSEILAEETGTRRDLKDQPLPGVPAWYTDGSSFIAEGKRRAGAAIVDGKRTVWASSLPEGTSAQKAELVALTQALRLAEGKDINIYTDSRYAFATAHIHGAIYKQRGLLTSAGKDIKNKEEILALLEAIHLPKRVAIIHCPGHQKGNDPVATGNRRADEAAKQAALSTRVLAETTKPAGKRTADGSEFEKRTADGSEFESPKKKAKVE

SEQ ID NO: 6253 - protein, 2090 aa, synthetic construct
MPAAKRVKLDGGDKKYSIGLDIGTNSVGWAVITDEYKVPSKKFKVLGNTDRHSIKKNLIGALLFDSGETAEATRLKRTARRRYTRRKNRICYLQEIFSNEMAKVDDSFFHRLEESFLVEEDKKHERHPIFGNIVDEVAYHEKYPTIYHLRKKLVDSTDKADLRLIYLALAHMIKFRGHFLIEGDLNPDNSDVDKLFIQLVQTYNQLFEENPINASGVDAKAILSARLSKSRRLENLIAQLPGEKKNGLFGNLIALSLGLTPNFKSNFDLAEDAKLQLSKDTYDDDLDNLLAQIGDQYADLFLAAKNLSDAILLSDILRVNTEITKAPLSASMIKRYDEHHQDLTLLKALVRQQLPEKYKEIFFDQSKNGYAGYIDGGASQEEFYKFIKPILEKMDGTEELLVKLNREDLLRKQRTFDNGSIPHQIHLGELHAILRRQEDFYPFLKDNREKIEKILTFRIPYYVGPLARGNSRFAWMTRKSEETITPWNFEEVVDKGASAQSFIERMTNFDKNLPNEKVLPKHSLLYEYFTVYNELTKVKYVTEGMRKPAFLSGEQKKAIVDLLFKTNRKVTVKQLKEDYFKKIECFDSVEISGVEDRFNASLGTYHDLLKIIKDKDFLDNEENEDILEDIVLTLTLFEDREMIEERLKTYAHLFDDKVMKQLKRRRYTGWGRLSRKLINGIRDKQSGKTILDFLKSDGFANRNFMQLIHDDSLTFKEDIQKAQVSGQGDSLHEHIANLAGSPAIKKGILQTVKVVDELVKVMGRHKPENIVIEMARENQTTQKGQKNSRERMKRIEEGIKELGSQILKEHPVENTQLQNEKLYLYYLQNGRDMYVDQELDINRLSDYDVDHIVPQSFLKDDSIDNKVLTRSDKARGKSDNVPSEEVVKKMKNYWRQLLNAKLITQRKFDNLTKAERGGLSELDKAGFIKRQLVETRQITKHVAQILDSRMNTKYDENDKLIREVKVITLKSKLVSDFRKDFQFYKVREINNYHHAHDAYLNAVVGTALIKKYPKLESEFVYGDYKVYDVRKMIAKSEQEIGKATAKYFFYSNIMNFFKTEITLANGEIRKRPLIETNGETGEIVWDKGRDFATVRKVLSMPQVNIVKKTEVQTGGFSKESILPKRNSDKLIARKKDWDPKKYGGFDSPTVAYSVLVVAKVEKGKSKKLKSVKELLGITIMERSSFEKNPIDFLEAKGYKEVKKDLIIKLPKYSLFELENGRKRMLASAGELQKGNELALPSKYVNFLYLASHYEKLKGSPEDNEQKQLFVEQHKHYLDEIIEQISEFSKRVILADANLDKVLSAYNKHRDKPIREQAENIIHLFTLTNLGAPAAFKYFDTTIDRKRYTSTKEVLDATLIHQSITGLYETRIDLSQLGGDGGGGGGGGGTLNIEDEYRLHETSKEPDVPLGSTWLSDFPQAWAETGGMGLAVRQAPLIIPLKATSTPVSIKQYPMSQEARLGIKPHIQRLLDQGILVPCQSPWNTPLLPVKKPGTNDYRPVQDLREVNKRVEDIHPTVPNPYNLLSGLPPSHQWYTVLDLKDAFFCLRLHPTSQPLFAFEWRDPEMGISGQLTWTRLPQGFKNSPTLFNEALHRDLADFRIQHPDLILLQYVDDLLLAATSEQDCQRGTRALLQTLGNLGYRASAKKAQICQKQVKYLGYLLKEGQRWLTEARKETVMGQPTPKTPRQLREFLGKAGFCRLFIPGFAEMAAPLYPLTKPGTLFNWGPDQQKAYQEIKQALLTAPALGLPDLTKPFELFVDEKQGYAKGVLTQKLGPWRRPVAYLSKKLDPVAAGWPPCLRMVAAIAVLTKDAGKLTMGQPLVILAPHAVEALVKQPPDRWLSNARMTHYQAMLLDTDRVQFGPVVALNPATLLPLPEKEAPHDCLEILAETHGTRPDLTDQPIPDADYTWYTDGSSFLQEGQRRAGAAVTTETEVIWARALPAGTSAQRAELIALTQALKMAEGKKLNVYTDSRYAFATAHVHGEIYRRRGWLTSEGREIKNKNEILALLKALFLPKRLSIIHCPGHQKGNSAEARGNRMADQAAREAAMKAVLETSTLLAGKRTADGSEFEKRTADGSEFESPKKKAKVE

SEQ ID NO: 6254 - protein, 2093 aa, synthetic construct
MPAAKRVKLDGGDKKYSIGLDIGTNSVGWAVITDEYKVPSKKFKVLGNTDRHSIKKNLIGALLFDSGETAEATRLKRTARRRYTRRKNRICYLQEIFSNEMAKVDDSFFHRLEESFLVEEDKKHERHPIFGNIVDEVAYHEKYPTIYHLRKKLVDSTDKADLRLIYLALAHMIKFRGHFLIEGDLNPDNSDVDKLFIQLVQTYNQLFEENPINASGVDAKAILSARLSKSRRLENLIAQLPGEKKNGLFGNLIALSLGLTPNFKSNFDLAEDAKLQLSKDTYDDDLDNLLAQIGDQYADLFLAAKNLSDAILLSDILRVNTEITKAPLSASMIKRYDEHHQDLTLLKALVRQQLPEKYKEIFFDQSKNGYAGYIDGGASQEEFYKFIKPILEKMDGTEELLVKLNREDLLRKQRTFDNGSIPHQIHLGELHAILRRQEDFYPFLKDNREKIEKILTFRIPYYVGPLARGNSRFAWMTRKSEETITPWNFEEVVDKGASAQSFIERMTNFDKNLPNEKVLPKHSLLYEYFTVYNELTKVKYVTEGMRKPAFLSGEQKKAIVDLLFKTNRKVTVKQLKEDYFKKIECFDSVEISGVEDRFNASLGTYHDLLKIIKDKDFLDNEENEDILEDIVLTLTLFEDREMIEERLKTYAHLFDDKVMKQLKRRRYTGWGRLSRKLINGIRDKQSGKTILDFLKSDGFANRNFMQLIHDDSLTFKEDIQKAQVSGQGDSLHEHIANLAGSPAIKKGILQTVKVVDELVKVMGRHKPENIVIEMARENQTTQKGQKNSRERMKRIEEGIKELGSQILKEHPVENTQLQNEKLYLYYLQNGRDMYVDQELDINRLSDYDVDHIVPQSFLKDDSIDNKVLTRSDKARGKSDNVPSEEVVKKMKNYWRQLLNAKLITQRKFDNLTKAERGGLSELDKAGFIKRQLVETRQITKHVAQILDSRMNTKYDENDKLIREVKVITLKSKLVSDFRKDFQFYKVREINNYHHAHDAYLNAVVGTALIKKYPKLESEFVYGDYKVYDVRKMIAKSEQEIGKATAKYFFYSNIMNFFKTEITLANGEIRKRPLIETNGETGEIVWDKGRDFATVRKVLSMPQVNIVKKTEVQTGGFSKESILPKRNSDKLIARKKDWDPKKYGGFDSPTVAYSVLVVAKVEKGKSKKLKSVKELLGITIMERSSFEKNPIDFLEAKGYKEVKKDLIIKLPKYSLFELENGRKRMLASAGELQKGNELALPSKYVNFLYLASHYEKLKGSPEDNEQKQLFVEQHKHYLDEIIEQISEFSKRVILADANLDKVLSAYNKHRDKPIREQAENIIHLFTLTNLGAPAAFKYFDTTIDRKRYTSTKEVLDATLIHQSITGLYETRIDLSQLGGDGGGGGGGGGGTAPLEEEYRLFLEAPIQNVTLLEQWKREIPKVWAEINPPGLASTQAPIHVQLLSTALPVRVRQYPITLEAKRSLRETIRKFRAAGILRPVHSPWNTPLLPVRKSGTSEYRMVQDLREVNKRVETIHPTVPNPYTLLSLLPPDRIWYSVLDLKDAFFCIPLAPESQLIFAFEWADAEEGESGQLTWTRLPQGFKNSPTLFDEALNRDLQGFRLDHPSVSLLQYVDDLLIAADTQAACLSATRDLLMTLAELGYRVSGKKAQLCQEEVTYLGFKIHKGSRSLSNSRTQAILQIPVPKTKRQVREFLGTIGYCRLWIPGFAELAQPLYAATRGGNDPLVWGEKEEEAFQSLKLALTQPPALALPSLDKPFQLFVEETSGAAKGVLTQALGPWKRPVAYLSKRLDPVAAGWPRCLRAIAAAALLTREASKLTFGQDIEITSSHNLESLLRSPPDKWLTNARITQYQVLLLDPPRVRFKQTAALNPATLLPETDDTLPIHHCLDTLDSLTSTRPDLTDQPLAQAEATLFTDGSSYIRDGKRYAGAAVVTLDSVIWAEPLPIGTSAQKAELIALTKALEWSKDKSVNIYTDSRYAFATLHVHGMIYRERGLLTAGGKAIKNAPEILALLTAVWLPKRVAVMHCKGHQKDDAPTSTGNRRADEVAREVAIRPLSTQATISAGKRTADGSEFEKRTADGSEFESPKKKAKVE

SEQ ID NO: 6255 - protein, 1996 aa, synthetic construct
MPAAKRVKLDGGDKKYSIGLDIGTNSVGWAVITDEYKVPSKKFKVLGNTDRHSIKKNLIGALLFDSGETAEATRLKRTARRRYTRRKNRICYLQEIFSNEMAKVDDSFFHRLEESFLVEEDKKHERHPIFGNIVDEVAYHEKYPTIYHLRKKLVDSTDKADLRLIYLALAHMIKFRGHFLIEGDLNPDNSDVDKLFIQLVQTYNQLFEENPINASGVDAKAILSARLSKSRRLENLIAQLPGEKKNGLFGNLIALSLGLTPNFKSNFDLAEDAKLQLSKDTYDDDLDNLLAQIGDQYADLFLAAKNLSDAILLSDILRVNTEITKAPLSASMIKRYDEHHQDLTLLKALVRQQLPEKYKEIFFDQSKNGYAGYIDGGASQEEFYKFIKPILEKMDGTEELLVKLNREDLLRKQRTFDNGSIPHQIHLGELHAILRRQEDFYPFLKDNREKIEKILTFRIPYYVGPLARGNSRFAWMTRKSEETITPWNFEEVVDKGASAQSFIERMTNFDKNLPNEKVLPKHSLLYEYFTVYNELTKVKYVTEGMRKPAFLSGEQKKAIVDLLFKTNRKVTVKQLKEDYFKKIECFDSVEISGVEDRFNASLGTYHDLLKIIKDKDFLDNEENEDILEDIVLTLTLFEDREMIEERLKTYAHLFDDKVMKQLKRRRYTGWGRLSRKLINGIRDKQSGKTILDFLKSDGFANRNFMQLIHDDSLTFKEDIQKAQVSGQGDSLHEHIANLAGSPAIKKGILQTVKVVDELVKVMGRHKPENIVIEMARENQTTQKGQKNSRERMKRIEEGIKELGSQILKEHPVENTQLQNEKLYLYYLQNGRDMYVDQELDINRLSDYDVDHIVPQSFLKDDSIDNKVLTRSDKARGKSDNVPSEEVVKKMKNYWRQLLNAKLITQRKFDNLTKAERGGLSELDKAGFIKRQLVETRQITKHVAQILDSRMNTKYDENDKLIREVKVITLKSKLVSDFRKDFQFYKVREINNYHHAHDAYLNAVVGTALIKKYPKLESEFVYGDYKVYDVRKMIAKSEQEIGKATAKYFFYSNIMNFFKTEITLANGEIRKRPLIETNGETGEIVWDKGRDFATVRKVLSMPQVNIVKKTEVQTGGFSKESILPKRNSDKLIARKKDWDPKKYGGFDSPTVAYSVLVVAKVEKGKSKKLKSVKELLGITIMERSSFEKNPIDFLEAKGYKEVKKDLIIKLPKYSLFELENGRKRMLASAGELQKGNELALPSKYVNFLYLASHYEKLKGSPEDNEQKQLFVEQHKHYLDEIIEQISEFSKRVILADANLDKVLSAYNKHRDKPIREQAENIIHLFTLTNLGAPAAFKYFDTTIDRKRYTSTKEVLDATLIHQSITGLYETRIDLSQLGGDGGGGGGGGGGGVLDTPPSHIGLEHLPPPPEVPQFPLNLERLQALQDLVHRSLEAGYISPWDGPGNNPVFPVRKPNGAWRFVHDLRATNALTKPIPALSPGPPDLTAPPTHPPHIICLDLKDAFFQIPVEDRFRFYLSFTLPSPGGLQPHRRFAWRVLPQGFINSPALFQRALQEPLRQVSAAFSQSLLVSYMDDILYASPTEEQRSQCYQALAARLRDLGFQVASEKTSQTPSPVPFLGQMVHEQIVTYQSLPTLQISSPISLHQLQAVLGDLQWVSRGTPTTRRPLQLLYSSLKRHHDPRAIIQLSPEQLQGIAELRQALSHNARSRYNEQEPLLAYVHLTRAGSTLVLFQKGAQFPLAYFQTPLTDNQASPWGLLLLLGCQYLQTQALSSYAKPILKYYHNLPKTSLDNWIQSSEDPRVQELLQLWPQISSQGIQPPGPWKTLITRAEVFLTPQFSPDPIPAALCLFSDGATGRGAYCLWKDHLLDFQAVPAPESAQKGELAGLLAGLAAAPPEPVNIWVDSKYLYSLLRTWVLGAWLQPDPVPSYALLYKSLLRHPAIVVGHVRSHSSASHPIASLNNYVDQLAGKRTADGSEFEKRTADGSEFESPKKKAKVE

SEQ ID NO: 6256 - protein, 2089 aa, synthetic construct
MPAAKRVKLDGGDKKYSIGLDIGTNSVGWAVITDEYKVPSKKFKVLGNTDRHSIKKNLIGALLFDSGETAEATRLKRTARRRYTRRKNRICYLQEIFSNEMAKVDDSFFHRLEESFLVEEDKKHERHPIFGNIVDEVAYHEKYPTIYHLRKKLVDSTDKADLRLIYLALAHMIKFRGHFLIEGDLNPDNSDVDKLFIQLVQTYNQLFEENPINASGVDAKAILSARLSKSRRLENLIAQLPGEKKNGLFGNLIALSLGLTPNFKSNFDLAEDAKLQLSKDTYDDDLDNLLAQIGDQYADLFLAAKNLSDAILLSDILRVNTEITKAPLSASMIKRYDEHHQDLTLLKALVRQQLPEKYKEIFFDQSKNGYAGYIDGGASQEEFYKFIKPILEKMDGTEELLVKLNREDLLRKQRTFDNGSIPHQIHLGELHAILRRQEDFYPFLKDNREKIEKILTFRIPYYVGPLARGNSRFAWMTRKSEETITPWNFEEVVDKGASAQSFIERMTNFDKNLPNEKVLPKHSLLYEYFTVYNELTKVKYVTEGMRKPAFLSGEQKKAIVDLLFKTNRKVTVKQLKEDYFKKIECFDSVEISGVEDRFNASLGTYHDLLKIIKDKDFLDNEENEDILEDIVLTLTLFEDREMIEERLKTYAHLFDDKVMKQLKRRRYTGWGRLSRKLINGIRDKQSGKTILDFLKSDGFANRNFMQLIHDDSLTFKEDIQKAQVSGQGDSLHEHIANLAGSPAIKKGILQTVKVVDELVKVMGRHKPENIVIEMARENQTTQKGQKNSRERMKRIEEGIKELGSQILKEHPVENTQLQNEKLYLYYLQNGRDMYVDQELDINRLSDYDVDHIVPQSFLKDDSIDNKVLTRSDKARGKSDNVPSEEVVKKMKNYWRQLLNAKLITQRKFDNLTKAERGGLSELDKAGFIKRQLVETRQITKHVAQILDSRMNTKYDENDKLIREVKVITLKSKLVSDFRKDFQFYKVREINNYHHAHDAYLNAVVGTALIKKYPKLESEFVYGDYKVYDVRKMIAKSEQEIGKATAKYFFYSNIMNFFKTEITLANGEIRKRPLIETNGETGEIVWDKGRDFATVRKVLSMPQVNIVKKTEVQTGGFSKESILPKRNSDKLIARKKDWDPKKYGGFDSPTVAYSVLVVAKVEKGKSKKLKSVKELLGITIMERSSFEKNPIDFLEAKGYKEVKKDLIIKLPKYSLFELENGRKRMLASAGELQKGNELALPSKYVNFLYLASHYEKLKGSPEDNEQKQLFVEQHKHYLDEIIEQISEFSKRVILADANLDKVLSAYNKHRDKPIREQAENIIHLFTLTNLGAPAAFKYFDTTIDRKRYTSTKEVLDATLIHQSITGLYETRIDLSQLGGDGGGGGGGGGGVLNLEEEYRLHEKPVPSSIDPSWLQLFPTVWAERAGMGLANQVPPVVVELRSGASPVAVRQYPMSKEAREGIRPHIQKFLDLGVLVPCRSPWNTPLLPVKKPGTNDYRPVQDLREINKRVQDIHPTVPNPYNLLSSLPPSYTWYSVLDLKDAFFCLRLHPNSQPLFAFEWKDPEKGNTGQLTWTRLPQGFKNSPTLFNEALHRDLAPFRALNPQVVLLQYVDDLLVAAPTYEDCKKGTQKLLQELSKLGYRVSAKKAQLCQREVTYLGYLLKEGKRWLTPARKATVMKIPVPTTPRQVREFLGKAGFCRLFIPGFASLAAPLYPLTKPSIPFIWTEEHQQAFDHIKKALLSAPALALPDLTKPFTLYIDERAGVARGVLTQTLGPWRRPVAYLSKKLDPVASGWPTCLKAVAAVALLLKDADKLTLGQNVTVIASHSLESIVRQPPDRWMTNARMTHYQSLLLNERVSFAPPAVLNPATLLPVESEATPVHRCSEILAEETGTRRDLEDQPLPGVPTWYTDGSSFITEGKRRAGAPIVDGKRTVWASSLPEGTSAQKAELVALTQALRLAEGKNINIYTDSRYAFATAHIHGAIYKQRGWLTSAGKDIKNKEEILALLEAIHLPRRVAIIHCPGHQRGSNPVATGNRRADEAAKQAALSTRVLAGTTKPAGKRTADGSEFEKRTADGSEFESPKKKAKVE

SEQ ID NO: 6257 - protein, 2213 aa, synthetic construct
MPAAKRVKLDGGDKKYSIGLDIGTNSVGWAVITDEYKVPSKKFKVLGNTDRHSIKKNLIGALLFDSGETAEATRLKRTARRRYTRRKNRICYLQEIFSNEMAKVDDSFFHRLEESFLVEEDKKHERHPIFGNIVDEVAYHEKYPTIYHLRKKLVDSTDKADLRLIYLALAHMIKFRGHFLIEGDLNPDNSDVDKLFIQLVQTYNQLFEENPINASGVDAKAILSARLSKSRRLENLIAQLPGEKKNGLFGNLIALSLGLTPNFKSNFDLAEDAKLQLSKDTYDDDLDNLLAQIGDQYADLFLAAKNLSDAILLSDILRVNTEITKAPLSASMIKRYDEHHQDLTLLKALVRQQLPEKYKEIFFDQSKNGYAGYIDGGASQEEFYKFIKPILEKMDGTEELLVKLNREDLLRKQRTFDNGSIPHQIHLGELHAILRRQEDFYPFLKDNREKIEKILTFRIPYYVGPLARGNSRFAWMTRKSEETITPWNFEEVVDKGASAQSFIERMTNFDKNLPNEKVLPKHSLLYEYFTVYNELTKVKYVTEGMRKPAFLSGEQKKAIVDLLFKTNRKVTVKQLKEDYFKKIECFDSVEISGVEDRFNASLGTYHDLLKIIKDKDFLDNEENEDILEDIVLTLTLFEDREMIEERLKTYAHLFDDKVMKQLKRRRYTGWGRLSRKLINGIRDKQSGKTILDFLKSDGFANRNFMQLIHDDSLTFKEDIQKAQVSGQGDSLHEHIANLAGSPAIKKGILQTVKVVDELVKVMGRHKPENIVIEMARENQTTQKGQKNSRERMKRIEEGIKELGSQILKEHPVENTQLQNEKLYLYYLQNGRDMYVDQELDINRLSDYDVDHIVPQSFLKDDSIDNKVLTRSDKARGKSDNVPSEEVVKKMKNYWRQLLNAKLITQRKFDNLTKAERGGLSELDKAGFIKRQLVETRQITKHVAQILDSRMNTKYDENDKLIREVKVITLKSKLVSDFRKDFQFYKVREINNYHHAHDAYLNAVVGTALIKKYPKLESEFVYGDYKVYDVRKMIAKSEQEIGKATAKYFFYSNIMNFFKTEITLANGEIRKRPLIETNGETGEIVWDKGRDFATVRKVLSMPQVNIVKKTEVQTGGFSKESILPKRNSDKLIARKKDWDPKKYGGFDSPTVAYSVLVVAKVEKGKSKKLKSVKELLGITIMERSSFEKNPIDFLEAKGYKEVKKDLIIKLPKYSLFELENGRKRMLASAGELQKGNELALPSKYVNFLYLASHYEKLKGSPEDNEQKQLFVEQHKHYLDEIIEQISEFSKRVILADANLDKVLSAYNKHRDKPIREQAENIIHLFTLTNLGAPAAFKYFDTTIDRKRYTSTKEVLDATLIHQSITGLYETRIDLSQLGGDGGGGGGGGGGTLGDQGSRGSDPLPEPRVTLTVEGIPTEFLVNTGAEHSVLTKPMGKMGSKRTVVAGATGSKVYPWTTKRLLKIGQKQVTHSFLVIPECPAPLLGRDLLTKLKAQIQFSTEGPQVTWEDRPAMCLVLNLEEEYRLHEKPVPPSIDPSWLQLFPMVWAEKAGMGLANQVPPVVVELKSDASPVAVRQYPMSKEAREGIRPHIQRFLDLGILVPCQSPWNTPLLPVKKPGTNDYRPVQDLREVNKRVQDIHPTVPNPYNLLSSLPPSHTWYSVLDLKDAFFCLKLHPNSQPLFAFEWRDPEKGNTGQLTWTRLPQGFKNSPTLFNEALHRDLASFRALNPQVVMLQYVDDLLVAAPTYRDCKEGTRRLLQELSKLGYRVSAKKAQLCREEVTYLGYLLKGGKRWLTPARKATVMKIPTPTTPRQVREFLGTAGFCRLWIPGFASLAAPLYPLTRPKVPFTWTEAHQEAFGRIKEALLSAPALALPDLTKPFALYVDEKEGVARGVLTQTLGPWRRPVAYLSKKLDPVASGWPTCLKAIAAVALLLKDADKLTLGQNVLVIAPHNLESIVRQPPDRWMTNARMTHYQSLLLNERVSFAPPAILNPATLLPVESDDTPIHICSEILAEETGTRPDLRDQPLPGVPAWYTDGSSFIMDGRRQAGAAIVDNKRTVWASNLPEGTSAQKAELIALTQALRLAEGKSINIYTDSRYAFATAHVHGAIYKQRGWLTSAGKDIKNKEEILALLEAIHLPKRVAIIHCPGHQRGTDPVATGNRKADEAAKQAAQSTRILTETTKNAGKRTADGSEFEKRTADGSEFESPKKKAKVE

SEQ ID NO: 6258 - protein, 2213 aa, synthetic construct
MPAAKRVKLDGGDKKYSIGLDIGTNSVGWAVITDEYKVPSKKFKVLGNTDRHSIKKNLIGALLFDSGETAEATRLKRTARRRYTRRKNRICYLQEIFSNEMAKVDDSFFHRLEESFLVEEDKKHERHPIFGNIVDEVAYHEKYPTIYHLRKKLVDSTDKADLRLIYLALAHMIKFRGHFLIEGDLNPDNSDVDKLFIQLVQTYNQLFEENPINASGVDAKAILSARLSKSRRLENLIAQLPGEKKNGLFGNLIALSLGLTPNFKSNFDLAEDAKLQLSKDTYDDDLDNLLAQIGDQYADLFLAAKNLSDAILLSDILRVNTEITKAPLSASMIKRYDEHHQDLTLLKALVRQQLPEKYKEIFFDQSKNGYAGYIDGGASQEEFYKFIKPILEKMDGTEELLVKLNREDLLRKQRTFDNGSIPHQIHLGELHAILRRQEDFYPFLKDNREKIEKILTFRIPYYVGPLARGNSRFAWMTRKSEETITPWNFEEVVDKGASAQSFIERMTNFDKNLPNEKVLPKHSLLYEYFTVYNELTKVKYVTEGMRKPAFLSGEQKKAIVDLLFKTNRKVTVKQLKEDYFKKIECFDSVEISGVEDRFNASLGTYHDLLKIIKDKDFLDNEENEDILEDIVLTLTLFEDREMIEERLKTYAHLFDDKVMKQLKRRRYTGWGRLSRKLINGIRDKQSGKTILDFLKSDGFANRNFMQLIHDDSLTFKEDIQKAQVSGQGDSLHEHIANLAGSPAIKKGILQTVKVVDELVKVMGRHKPENIVIEMARENQTTQKGQKNSRERMKRIEEGIKELGSQILKEHPVENTQLQNEKLYLYYLQNGRDMYVDQELDINRLSDYDVDHIVPQSFLKDDSIDNKVLTRSDKARGKSDNVPSEEVVKKMKNYWRQLLNAKLITQRKFDNLTKAERGGLSELDKAGFIKRQLVETRQITKHVAQILDSRMNTKYDENDKLIREVKVITLKSKLVSDFRKDFQFYKVREINNYHHAHDAYLNAVVGTALIKKYPKLESEFVYGDYKVYDVRKMIAKSEQEIGKATAKYFFYSNIMNFFKTEITLANGEIRKRPLIETNGETGEIVWDKGRDFATVRKVLSMPQVNIVKKTEVQTGGFSKESILPKRNSDKLIARKKDWDPKKYGGFDSPTVAYSVLVVAKVEKGKSKKLKSVKELLGITIMERSSFEKNPIDFLEAKGYKEVKKDLIIKLPKYSLFELENGRKRMLASAGELQKGNELALPSKYVNFLYLASHYEKLKGSPEDNEQKQLFVEQHKHYLDEIIEQISEFSKRVILADANLDKVLSAYNKHRDKPIREQAENIIHLFTLTNLGAPAAFKYFDTTIDRKRYTSTKEVLDATLIHQSITGLYETRIDLSQLGGDGGGGGGGGGGTLGDQGSRGSDPLPEPRVTLTVEGIPTEFLVNTGAEHSVLTKPMGKMGSKRTVVAGATGSKVYPWTTKRLLKIGQKQVTHSFLVIPECPAPLLGRDLLTKLKAQIQFSTEGPQVTWEDRPAMCLVLNLEEEYRLHEKPVPPSIDPSWLQLFPMVWAEKAGMGLANQVPPVVVELKSDASPVAVRQYPMSKEAREGIRPHIQRFLDLGILVPCQSPWNTPLLPVKKPGTNDYRPVQDLREVNKRVQDIHPTVPNPYNLLSSLPPSHTWYSVLDLKDAFFCLKLHPNSQPLFAFEWRDPEKGNTGQLTWTRLPQGFKNSPTLFNEALHRDLASFRALNPQVVMLQYVDDLLVAAPTYRDCKEGTRRLLQELSKLGYRVSAKKAQLCREEVTYLGYLLKGGKRWLTPARKATVMKIPTPTTPRQVREFLGKAGFCRLFIPGFASLAAPLYPLTRPKVPFTWTEAHQEAFGRIKEALLSAPALALPDLTKPFALYVDEKEGVARGVLTQTLGPWRRPVAYLSKKLDPVASGWPTCLKAIAAVALLLKDADKLTLGQNVLVIAPHNLESIVRQPPDRWMTNARMTHYQSLLLNERVSFAPPAILNPATLLPVESDDTPIHICSEILAEETGTRPDLRDQPLPGVPAWYTDGSSFIMDGRRQAGAAIVDNKRTVWASNLPEGTSAQKAELIALTQALRLAEGKSINIYTDSRYAFATAHVHGAIYKQRGWLTSAGKDIKNKEEILALLEAIHLPKRVAIIHCPGHQRGTDPVATGNRKADEAAKQAAQSTRILTETTKNAGKRTADGSEFEKRTADGSEFESPKKKAKVE

SEQ ID NO: 6259 - protein, 2091 aa, synthetic construct
MPAAKRVKLDGGDKKYSIGLDIGTNSVGWAVITDEYKVPSKKFKVLGNTDRHSIKKNLIGALLFDSGETAEATRLKRTARRRYTRRKNRICYLQEIFSNEMAKVDDSFFHRLEESFLVEEDKKHERHPIFGNIVDEVAYHEKYPTIYHLRKKLVDSTDKADLRLIYLALAHMIKFRGHFLIEGDLNPDNSDVDKLFIQLVQTYNQLFEENPINASGVDAKAILSARLSKSRRLENLIAQLPGEKKNGLFGNLIALSLGLTPNFKSNFDLAEDAKLQLSKDTYDDDLDNLLAQIGDQYADLFLAAKNLSDAILLSDILRVNTEITKAPLSASMIKRYDEHHQDLTLLKALVRQQLPEKYKEIFFDQSKNGYAGYIDGGASQEEFYKFIKPILEKMDGTEELLVKLNREDLLRKQRTFDNGSIPHQIHLGELHAILRRQEDFYPFLKDNREKIEKILTFRIPYYVGPLARGNSRFAWMTRKSEETITPWNFEEVVDKGASAQSFIERMTNFDKNLPNEKVLPKHSLLYEYFTVYNELTKVKYVTEGMRKPAFLSGEQKKAIVDLLFKTNRKVTVKQLKEDYFKKIECFDSVEISGVEDRFNASLGTYHDLLKIIKDKDFLDNEENEDILEDIVLTLTLFEDREMIEERLKTYAHLFDDKVMKQLKRRRYTGWGRLSRKLINGIRDKQSGKTILDFLKSDGFANRNFMQLIHDDSLTFKEDIQKAQVSGQGDSLHEHIANLAGSPAIKKGILQTVKVVDELVKVMGRHKPENIVIEMARENQTTQKGQKNSRERMKRIEEGIKELGSQILKEHPVENTQLQNEKLYLYYLQNGRDMYVDQELDINRLSDYDVDHIVPQSFLKDDSIDNKVLTRSDKARGKSDNVPSEEVVKKMKNYWRQLLNAKLITQRKFDNLTKAERGGLSELDKAGFIKRQLVETRQITKHVAQILDSRMNTKYDENDKLIREVKVITLKSKLVSDFRKDFQFYKVREINNYHHAHDAYLNAVVGTALIKKYPKLESEFVYGDYKVYDVRKMIAKSEQEIGKATAKYFFYSNIMNFFKTEITLANGEIRKRPLIETNGETGEIVWDKGRDFATVRKVLSMPQVNIVKKTEVQTGGFSKESILPKRNSDKLIARKKDWDPKKYGGFDSPTVAYSVLVVAKVEKGKSKKLKSVKELLGITIMERSSFEKNPIDFLEAKGYKEVKKDLIIKLPKYSLFELENGRKRMLASAGELQKGNELALPSKYVNFLYLASHYEKLKGSPEDNEQKQLFVEQHKHYLDEIIEQISEFSKRVILADANLDKVLSAYNKHRDKPIREQAENIIHLFTLTNLGAPAAFKYFDTTIDRKRYTSTKEVLDATLIHQSITGLYETRIDLSQLGGDGGGGGGGGGGTLNLEDEYRLYETSAEPEVSPGSTWLSDFPQAWAETGGMGLAVRQAPLIIPLKATSTPVSIKQYPMSQEAKLGIKPHIQRLLDQGILVPCQSPWNTPLLPVKKPGTNDYRPVQDLREVNKRVEDIHPTVPNPYNLLSGLPPSHRWYTVLDLKDAFFCLRLHPTSQPLFAFEWRDPGMGISGQLTWTRLPQGFKNSPTLFNEALHRDLADFRIQHPDLILLQYVDDILLAATSELDCQQGTRALLLTLGNLGYRASAKKAQLCQKQVKYLGYLLKEGQRWLTEARKETVMGQPTPKTPRQLREFLGTAGFCRLWIPGFAEMAAPLYPLTKPGTLFNWGPDQQKAYQEIKQALLTAPALGLPDLTKPFELFVDEKQGYAKGVLTQKLGPWRRPVAYLSKKLDPVAAGWPPCLRMVAAIAVLRKDAGKLTMGQPLVILAPHAVEALVKQPPDRWLSNARMTHYQAMLLDTDRVQFGPVVALNPATLLPLPEEGAPHDCLEILAETHGTRPDLTDQPIPDADHTWYTDGSSFLQEGQRKAGAAVTTETEVIWARALPAGTSAQRAELIALTQALKMAEGKRLNVYTDSRYAFATAHIHGEIYRRRGWLTSEGREIKNKSEILALLKALFLPKRLSIIHCLGHQKGDSAEARGNRLADQAAREAAIKTPPDTSTLLAGKRTADGSEFEKRTADGSEFESPKKKAKVE

SEQ ID NO: 6260 - protein, 2091 aa, synthetic construct
MPAAKRVKLDGGDKKYSIGLDIGTNSVGWAVITDEYKVPSKKFKVLGNTDRHSIKKNLIGALLFDSGETAEATRLKRTARRRYTRRKNRICYLQEIFSNEMAKVDDSFFHRLEESFLVEEDKKHERHPIFGNIVDEVAYHEKYPTIYHLRKKLVDSTDKADLRLIYLALAHMIKFRGHFLIEGDLNPDNSDVDKLFIQLVQTYNQLFEENPINASGVDAKAILSARLSKSRRLENLIAQLPGEKKNGLFGNLIALSLGLTPNFKSNFDLAEDAKLQLSKDTYDDDLDNLLAQIGDQYADLFLAAKNLSDAILLSDILRVNTEITKAPLSASMIKRYDEHHQDLTLLKALVRQQLPEKYKEIFFDQSKNGYAGYIDGGASQEEFYKFIKPILEKMDGTEELLVKLNREDLLRKQRTFDNGSIPHQIHLGELHAILRRQEDFYPFLKDNREKIEKILTFRIPYYVGPLARGNSRFAWMTRKSEETITPWNFEEVVDKGASAQSFIERMTNFDKNLPNEKVLPKHSLLYEYFTVYNELTKVKYVTEGMRKPAFLSGEQKKAIVDLLFKTNRKVTVKQLKEDYFKKIECFDSVEISGVEDRFNASLGTYHDLLKIIKDKDFLDNEENEDILEDIVLTLTLFEDREMIEERLKTYAHLFDDKVMKQLKRRRYTGWGRLSRKLINGIRDKQSGKTILDFLKSDGFANRNFMQLIHDDSLTFKEDIQKAQVSGQGDSLHEHIANLAGSPAIKKGILQTVKVVDELVKVMGRHKPENIVIEMARENQTTQKGQKNSRERMKRIEEGIKELGSQILKEHPVENTQLQNEKLYLYYLQNGRDMYVDQELDINRLSDYDVDHIVPQSFLKDDSIDNKVLTRSDKARGKSDNVPSEEVVKKMKNYWRQLLNAKLITQRKFDNLTKAERGGLSELDKAGFIKRQLVETRQITKHVAQILDSRMNTKYDENDKLIREVKVITLKSKLVSDFRKDFQFYKVREINNYHHAHDAYLNAVVGTALIKKYPKLESEFVYGDYKVYDVRKMIAKSEQEIGKATAKYFFYSNIMNFFKTEITLANGEIRKRPLIETNGETGEIVWDKGRDFATVRKVLSMPQVNIVKKTEVQTGGFSKESILPKRNSDKLIARKKDWDPKKYGGFDSPTVAYSVLVVAKVEKGKSKKLKSVKELLGITIMERSSFEKNPIDFLEAKGYKEVKKDLIIKLPKYSLFELENGRKRMLASAGELQKGNELALPSKYVNFLYLASHYEKLKGSPEDNEQKQLFVEQHKHYLDEIIEQISEFSKRVILADANLDKVLSAYNKHRDKPIREQAENIIHLFTLTNLGAPAAFKYFDTTIDRKRYTSTKEVLDATLIHQSITGLYETRIDLSQLGGDGGGGGGGGGGTLNIEDEYRLHETSKEPDVSLGSTWLSDFPQAWAETGGMGLAVRQAPLIIPLKATSTPVSIKQYPMSQEARLGIKPHIQRLLDQGILVPCQSPWNTPLLPVKKPGTNDYRPVQDLREVNKRVEDIHPTVPNPYNLLSGLPPSHQWYTVLDLKDAFFCLRLHPTSQPLFAFEWRDPEMGISGQLTWTRLPQGFKNSPTLFNEALHRDLAGFRIQHPDLILLQYVDDLLLAATSELDCQQGTRALLQTLGDLGYRASAKKAQICQKQVKYLGYLLKEGQRWLTEARKETVMGQPIPKTPRQLREFLGTAGFCRLWIPGFAEMAAPLYPLTKPGTLFNWGPDQQKAFQEIKQALLTAPALGLPDLTKPFELFVDEKQGYAKGVLTQKLGPWRRPVAYLSKKLDPVAAGWPPCLRMVAAIAVLTKDAGKLTMGQPLVILAPHAVEALVKQPPDRWLSNARMTHYQALLLDTDRVQFGPVVALNPATLLPLPEEGLQHDCLDILAEAHGTRSDLMDQPLPDADHTWYTDGSSFLQEGQRKAGAAVTTETEVIWARALPAGTSAQRAELIALTQALKMAEGKKLNVYTDSRYAFATAHIHGEIYRRRGWLTSEGKEIKNKDEILALLKALFLPKRLSIIHCPGHQKGNSAEARGNRMADQAAREVATRETPETSTLLAGKRTADGSEFEKRTADGSEFESPKKKAKVE

SEQ ID NO: 6261 - protein, 2082 aa, synthetic construct
MPAAKRVKLDGGDKKYSIGLDIGTNSVGWAVITDEYKVPSKKFKVLGNTDRHSIKKNLIGALLFDSGETAEATRLKRTARRRYTRRKNRICYLQEIFSNEMAKVDDSFFHRLEESFLVEEDKKHERHPIFGNIVDEVAYHEKYPTIYHLRKKLVDSTDKADLRLIYLALAHMIKFRGHFLIEGDLNPDNSDVDKLFIQLVQTYNQLFEENPINASGVDAKAILSARLSKSRRLENLIAQLPGEKKNGLFGNLIALSLGLTPNFKSNFDLAEDAKLQLSKDTYDDDLDNLLAQIGDQYADLFLAAKNLSDAILLSDILRVNTEITKAPLSASMIKRYDEHHQDLTLLKALVRQQLPEKYKEIFFDQSKNGYAGYIDGGASQEEFYKFIKPILEKMDGTEELLVKLNREDLLRKQRTFDNGSIPHQIHLGELHAILRRQEDFYPFLKDNREKIEKILTFRIPYYVGPLARGNSRFAWMTRKSEETITPWNFEEVVDKGASAQSFIERMTNFDKNLPNEKVLPKHSLLYEYFTVYNELTKVKYVTEGMRKPAFLSGEQKKAIVDLLFKTNRKVTVKQLKEDYFKKIECFDSVEISGVEDRFNASLGTYHDLLKIIKDKDFLDNEENEDILEDIVLTLTLFEDREMIEERLKTYAHLFDDKVMKQLKRRRYTGWGRLSRKLINGIRDKQSGKTILDFLKSDGFANRNFMQLIHDDSLTFKEDIQKAQVSGQGDSLHEHIANLAGSPAIKKGILQTVKVVDELVKVMGRHKPENIVIEMARENQTTQKGQKNSRERMKRIEEGIKELGSQILKEHPVENTQLQNEKLYLYYLQNGRDMYVDQELDINRLSDYDVDHIVPQSFLKDDSIDNKVLTRSDKARGKSDNVPSEEVVKKMKNYWRQLLNAKLITQRKFDNLTKAERGGLSELDKAGFIKRQLVETRQITKHVAQILDSRMNTKYDENDKLIREVKVITLKSKLVSDFRKDFQFYKVREINNYHHAHDAYLNAVVGTALIKKYPKLESEFVYGDYKVYDVRKMIAKSEQEIGKATAKYFFYSNIMNFFKTEITLANGEIRKRPLIETNGETGEIVWDKGRDFATVRKVLSMPQVNIVKKTEVQTGGFSKESILPKRNSDKLIARKKDWDPKKYGGFDSPTVAYSVLVVAKVEKGKSKKLKSVKELLGITIMERSSFEKNPIDFLEAKGYKEVKKDLIIKLPKYSLFELENGRKRMLASAGELQKGNELALPSKYVNFLYLASHYEKLKGSPEDNEQKQLFVEQHKHYLDEIIEQISEFSKRVILADANLDKVLSAYNKHRDKPIREQAENIIHLFTLTNLGAPAAFKYFDTTIDRKRYTSTKEVLDATLIHQSITGLYETRIDLSQLGGDGGGGGGGGGGIPWLMKKPLQLTTLVPLQEYEERLLKQTMLTGSYKEKLQSLFLKYDALWQHWENQVGHRRIKPHHIATGTVNPRPQKQYPINPKAKASIQTVINDLLKQGVLIQQNSIMNTPVYPVPKPDGKWRMVLDYREVNKTIPLIAAQNQHSAGILSSIFRGKYKTTLDLSNGFWAHSITPESYWLTAFTWLGQQYCWTRLPQGFLNSPALFNADVVDLLKEVPNVQVYVDDIYISHDDPREHLEQLEKVFSLLLNAGYVVSLKKSEIAQHEVEFLGFNITKEGRGLTETFKQKLLNITPPRDLKQLQSILGLLNFARNFIPNFSELVKPLYNIIATAPGKYITWTTDNSQQLQNIISMLNSAENLEERNPEVRLIMKVNTSPSAGYIRFYNEFAKRPIMYLNYVYTKAEVKFTNTEKLLTTIHKGLIKALDLGMGQEILVYSPIVSMTKIQKTPLPERKALPIRWITWMSYLEDPRIQFHYDKTLPELQQVPTVTDDIIAKIKHPSEFSMVFYTDGSAIKHPNVNKSHNAGMGIAQVQFKPEFTVINTWSIPLGDHTAQLAEVAAVEFACKKALKIDGPVLIVTDSFYVAESVNKELPYWQSNGFFNNKKKPLKHVSKWKSIADCIQLKPDIIIIHEKGHQPTASTFHTEGNNLADKLATQGSYVVNAGKRTADGSEFEKRTADGSEFESPKKKAKVE

SEQ ID NO: 6262 - protein, 2091 aa, synthetic construct
MPAAKRVKLDGGDKKYSIGLDIGTNSVGWAVITDEYKVPSKKFKVLGNTDRHSIKKNLIGALLFDSGETAEATRLKRTARRRYTRRKNRICYLQEIFSNEMAKVDDSFFHRLEESFLVEEDKKHERHPIFGNIVDEVAYHEKYPTIYHLRKKLVDSTDKADLRLIYLALAHMIKFRGHFLIEGDLNPDNSDVDKLFIQLVQTYNQLFEENPINASGVDAKAILSARLSKSRRLENLIAQLPGEKKNGLFGNLIALSLGLTPNFKSNFDLAEDAKLQLSKDTYDDDLDNLLAQIGDQYADLFLAAKNLSDAILLSDILRVNTEITKAPLSASMIKRYDEHHQDLTLLKALVRQQLPEKYKEIFFDQSKNGYAGYIDGGASQEEFYKFIKPILEKMDGTEELLVKLNREDLLRKQRTFDNGSIPHQIHLGELHAILRRQEDFYPFLKDNREKIEKILTFRIPYYVGPLARGNSRFAWMTRKSEETITPWNFEEVVDKGASAQSFIERMTNFDKNLPNEKVLPKHSLLYEYFTVYNELTKVKYVTEGMRKPAFLSGEQKKAIVDLLFKTNRKVTVKQLKEDYFKKIECFDSVEISGVEDRFNASLGTYHDLLKIIKDKDFLDNEENEDILEDIVLTLTLFEDREMIEERLKTYAHLFDDKVMKQLKRRRYTGWGRLSRKLINGIRDKQSGKTILDFLKSDGFANRNFMQLIHDDSLTFKEDIQKAQVSGQGDSLHEHIANLAGSPAIKKGILQTVKVVDELVKVMGRHKPENIVIEMARENQTTQKGQKNSRERMKRIEEGIKELGSQILKEHPVENTQLQNEKLYLYYLQNGRDMYVDQELDINRLSDYDVDHIVPQSFLKDDSIDNKVLTRSDKARGKSDNVPSEEVVKKMKNYWRQLLNAKLITQRKFDNLTKAERGGLSELDKAGFIKRQLVETRQITKHVAQILDSRMNTKYDENDKLIREVKVITLKSKLVSDFRKDFQFYKVREINNYHHAHDAYLNAVVGTALIKKYPKLESEFVYGDYKVYDVRKMIAKSEQEIGKATAKYFFYSNIMNFFKTEITLANGEIRKRPLIETNGETGEIVWDKGRDFATVRKVLSMPQVNIVKKTEVQTGGFSKESILPKRNSDKLIARKKDWDPKKYGGFDSPTVAYSVLVVAKVEKGKSKKLKSVKELLGITIMERSSFEKNPIDFLEAKGYKEVKKDLIIKLPKYSLFELENGRKRMLASAGELQKGNELALPSKYVNFLYLASHYEKLKGSPEDNEQKQLFVEQHKHYLDEIIEQISEFSKRVILADANLDKVLSAYNKHRDKPIREQAENIIHLFTLTNLGAPAAFKYFDTTIDRKRYTSTKEVLDATLIHQSITGLYETRIDLSQLGGDGGGGGGGGGGTLNIEDEYRLHETSKEPDVPLGSTWLSDFPQAWAETGGMGLAVRQAPLIIPLKATSTPVSIKQYPMSQEARLGIKPHIQRLLDQGILVPCQSPWNTPLLPVKKPGTNDYRPVQDLREVNKRVEDIHPTVPNPYNLLSGLPPSHQWYTVLDLKDAFFCLRLHPTSQPLFAFEWRDPEMGISGQLTWTRLPQGFKNSPTLFNEALHRDLADFRIQHPDLILLQYVDDLLLAATSEQDCQRGTRALLQTLGNLGYRASAKKAQICQKQVKYLGYLLKEGQRWLTEARKETVMGQPTPKTPRQLREFLGTAGFCRLWIPGFAEMAAPLYPLTKPGTLFNWGPDQQKAYQEIKQALLTAPALGLPDLTKPFELFVDEKQGYAKGVLTQKLGPWRRPVAYLSKKLDPVAAGWPPCLRMVAAIAVLTKDAGKLTMGQPLVILAPHAVEALVKQPPDRWLSNARMTHYQAMLLDTDRVQFGPVVALNPATLLPLPEKEAPHDCLEILAETHGTRPDLTDQPIPDADYTWYTDGSSFLQEGQRRAGAAVTTETEVIWARALPAGTSAQRAELIALTQALKMAEGKKLNVYTDSRYAFATAHVHGEIYRRRGWLTSEGREIKNKNEILALLKALFLPKRLSIIHCPGHQKGNSAEARGNRMADQAAREAAMKAVLETSTLLAGKRTADGSEFEKRTADGSEFESPKKKAKVE

SEQ ID NO: 6263 - protein, 2091 aa, synthetic construct
MPAAKRVKLDGGDKKYSIGLDIGTNSVGWAVITDEYKVPSKKFKVLGNTDRHSIKKNLIGALLFDSGETAEATRLKRTARRRYTRRKNRICYLQEIFSNEMAKVDDSFFHRLEESFLVEEDKKHERHPIFGNIVDEVAYHEKYPTIYHLRKKLVDSTDKADLRLIYLALAHMIKFRGHFLIEGDLNPDNSDVDKLFIQLVQTYNQLFEENPINASGVDAKAILSARLSKSRRLENLIAQLPGEKKNGLFGNLIALSLGLTPNFKSNFDLAEDAKLQLSKDTYDDDLDNLLAQIGDQYADLFLAAKNLSDAILLSDILRVNTEITKAPLSASMIKRYDEHHQDLTLLKALVRQQLPEKYKEIFFDQSKNGYAGYIDGGASQEEFYKFIKPILEKMDGTEELLVKLNREDLLRKQRTFDNGSIPHQIHLGELHAILRRQEDFYPFLKDNREKIEKILTFRIPYYVGPLARGNSRFAWMTRKSEETITPWNFEEVVDKGASAQSFIERMTNFDKNLPNEKVLPKHSLLYEYFTVYNELTKVKYVTEGMRKPAFLSGEQKKAIVDLLFKTNRKVTVKQLKEDYFKKIECFDSVEISGVEDRFNASLGTYHDLLKIIKDKDFLDNEENEDILEDIVLTLTLFEDREMIEERLKTYAHLFDDKVMKQLKRRRYTGWGRLSRKLINGIRDKQSGKTILDFLKSDGFANRNFMQLIHDDSLTFKEDIQKAQVSGQGDSLHEHIANLAGSPAIKKGILQTVKVVDELVKVMGRHKPENIVIEMARENQTTQKGQKNSRERMKRIEEGIKELGSQILKEHPVENTQLQNEKLYLYYLQNGRDMYVDQELDINRLSDYDVDHIVPQSFLKDDSIDNKVLTRSDKARGKSDNVPSEEVVKKMKNYWRQLLNAKLITQRKFDNLTKAERGGLSELDKAGFIKRQLVETRQITKHVAQILDSRMNTKYDENDKLIREVKVITLKSKLVSDFRKDFQFYKVREINNYHHAHDAYLNAVVGTALIKKYPKLESEFVYGDYKVYDVRKMIAKSEQEIGKATAKYFFYSNIMNFFKTEITLANGEIRKRPLIETNGETGEIVWDKGRDFATVRKVLSMPQVNIVKKTEVQTGGFSKESILPKRNSDKLIARKKDWDPKKYGGFDSPTVAYSVLVVAKVEKGKSKKLKSVKELLGITIMERSSFEKNPIDFLEAKGYKEVKKDLIIKLPKYSLFELENGRKRMLASAGELQKGNELALPSKYVNFLYLASHYEKLKGSPEDNEQKQLFVEQHKHYLDEIIEQISEFSKRVILADANLDKVLSAYNKHRDKPIREQAENIIHLFTLTNLGAPAAFKYFDTTIDRKRYTSTKEVLDATLIHQSITGLYETRIDLSQLGGDGGGGGGGGGGTLNIEDEYRLHETSKEPDVPLGSTWLSDFPQAWAETGGMGLAVRQAPLIIPLKATSTPVSIKQYPMSQEARLGIKPHIQRLLDQGILVPCQSPWNTPLLPVKKPGTNDYRPVQDLREVNKRVEDIHPTVPNPYNLLSGLPPSHQWYTVLDLKDAFFCLRLHPTSQPLFAFEWRDPEMGISGQLTWTRLPQGFKNSPTLFNEALHRDLADFRIQHPDLILLQYVDDLLLAATSEQDCQRGTRALLQTLGNLGYRASAKKAQICQKQVKYLGYLLKEGQRWLTEARKETVMGQPTPKTPRQLREFLGKAGFCRLFIPGFAEMAAPLYPLTKPGTLFNWGPDQQKAYQEIKQALLTAPALGLPDLTKPFELFVDEKQGYAKGVLTQKLGPWRRPVAYLSKKLDPVAAGWPPCLRMVAAIAVLTKDAGKLTMGQPLVILAPHAVEALVKQPPDRWLSNARMTHYQAMLLDTDRVQFGPVVALNPATLLPLPEKEAPHDCLEILAETHGTRPDLTDQPIPDADYTWYTDGSSFLQEGQRRAGAAVTTETEVIWARALPAGTSAQRAELIALTQALKMAEGKKLNVYTDSRYAFATAHVHGEIYRRRGWLTSEGREIKNKNEILALLKALFLPKRLSIIHCPGHQKGNSAEARGNRMADQAAREAAMKAVLETSTLLAGKRTADGSEFEKRTADGSEFESPKKKAKVE

SEQ ID NO: 6264 - protein, 2094 aa, synthetic construct
MPAAKRVKLDGGDKKYSIGLDIGTNSVGWAVITDEYKVPSKKFKVLGNTDRHSIKKNLIGALLFDSGETAEATRLKRTARRRYTRRKNRICYLQEIFSNEMAKVDDSFFHRLEESFLVEEDKKHERHPIFGNIVDEVAYHEKYPTIYHLRKKLVDSTDKADLRLIYLALAHMIKFRGHFLIEGDLNPDNSDVDKLFIQLVQTYNQLFEENPINASGVDAKAILSARLSKSRRLENLIAQLPGEKKNGLFGNLIALSLGLTPNFKSNFDLAEDAKLQLSKDTYDDDLDNLLAQIGDQYADLFLAAKNLSDAILLSDILRVNTEITKAPLSASMIKRYDEHHQDLTLLKALVRQQLPEKYKEIFFDQSKNGYAGYIDGGASQEEFYKFIKPILEKMDGTEELLVKLNREDLLRKQRTFDNGSIPHQIHLGELHAILRRQEDFYPFLKDNREKIEKILTFRIPYYVGPLARGNSRFAWMTRKSEETITPWNFEEVVDKGASAQSFIERMTNFDKNLPNEKVLPKHSLLYEYFTVYNELTKVKYVTEGMRKPAFLSGEQKKAIVDLLFKTNRKVTVKQLKEDYFKKIECFDSVEISGVEDRFNASLGTYHDLLKIIKDKDFLDNEENEDILEDIVLTLTLFEDREMIEERLKTYAHLFDDKVMKQLKRRRYTGWGRLSRKLINGIRDKQSGKTILDFLKSDGFANRNFMQLIHDDSLTFKEDIQKAQVSGQGDSLHEHIANLAGSPAIKKGILQTVKVVDELVKVMGRHKPENIVIEMARENQTTQKGQKNSRERMKRIEEGIKELGSQILKEHPVENTQLQNEKLYLYYLQNGRDMYVDQELDINRLSDYDVDHIVPQSFLKDDSIDNKVLTRSDKARGKSDNVPSEEVVKKMKNYWRQLLNAKLITQRKFDNLTKAERGGLSELDKAGFIKRQLVETRQITKHVAQILDSRMNTKYDENDKLIREVKVITLKSKLVSDFRKDFQFYKVREINNYHHAHDAYLNAVVGTALIKKYPKLESEFVYGDYKVYDVRKMIAKSEQEIGKATAKYFFYSNIMNFFKTEITLANGEIRKRPLIETNGETGEIVWDKGRDFATVRKVLSMPQVNIVKKTEVQTGGFSKESILPKRNSDKLIARKKDWDPKKYGGFDSPTVAYSVLVVAKVEKGKSKKLKSVKELLGITIMERSSFEKNPIDFLEAKGYKEVKKDLIIKLPKYSLFELENGRKRMLASAGELQKGNELALPSKYVNFLYLASHYEKLKGSPEDNEQKQLFVEQHKHYLDEIIEQISEFSKRVILADANLDKVLSAYNKHRDKPIREQAENIIHLFTLTNLGAPAAFKYFDTTIDRKRYTSTKEVLDATLIHQSITGLYETRIDLSQLGGDGGGGGGGGGGGTAPLEEEYRLFLEAPIQNVTLLEQWKREIPKVWAEINPPGLASTQAPIHVQLLSTALPVRVRQYPITLEAKRSLRETIRKFRAAGILRPVHSPWNTPLLPVRKSGTSEYRMVQDLREVNKRVETIHPTVPNPYTLLSLLPPDRIWYSVLDLKDAFFCIPLAPESQLIFAFEWADAEEGESGQLTWTRLPQGFKNSPTLFNEALNRDLQGFRLDHPSVSLLQYVDDLLIAADTQAACLSATRDLLMTLAELGYRVSGKKAQLCQEEVTYLGFKIHKGSRSLSNSRTQAILQIPVPKTKRQVREFLGTIGYCRLWIPGFAELAQPLYAATRPGNDPLVWGEKEEEAFQSLKLALTQPPALALPSLDKPFQLFVEETSGAAKGVLTQALGPWKRPVAYLSKRLDPVAAGWPRCLRAIAAAALLTREASKLTFGQDIEITSSHNLESLLRSPPDKWLTNARITQYQVLLLDPPRVRFKQTAALNPATLLPETDDTLPIHHCLDTLDSLTSTRPDLTDQPLAQAEATLFTDGSSYIRDGKRYAGAAVVTLDSVIWAEPLPIGTSAQKAELIALTKALEWSKDKSVNIYTDSRYAFATLHVHGMIYRERGWLTAGGKAIKNAPEILALLTAVWLPKRVAVMHCKGHQKDDAPTSTGNRRADEVAREVAIRPLSTQATISAGKRTADGSEFEKRTADGSEFESPKKKAKVE

SEQ ID NO: 6265 - protein, 2094 aa, synthetic construct
MPAAKRVKLDGGDKKYSIGLDIGTNSVGWAVITDEYKVPSKKFKVLGNTDRHSIKKNLIGALLFDSGETAEATRLKRTARRRYTRRKNRICYLQEIFSNEMAKVDDSFFHRLEESFLVEEDKKHERHPIFGNIVDEVAYHEKYPTIYHLRKKLVDSTDKADLRLIYLALAHMIKFRGHFLIEGDLNPDNSDVDKLFIQLVQTYNQLFEENPINASGVDAKAILSARLSKSRRLENLIAQLPGEKKNGLFGNLIALSLGLTPNFKSNFDLAEDAKLQLSKDTYDDDLDNLLAQIGDQYADLFLAAKNLSDAILLSDILRVNTEITKAPLSASMIKRYDEHHQDLTLLKALVRQQLPEKYKEIFFDQSKNGYAGYIDGGASQEEFYKFIKPILEKMDGTEELLVKLNREDLLRKQRTFDNGSIPHQIHLGELHAILRRQEDFYPFLKDNREKIEKILTFRIPYYVGPLARGNSRFAWMTRKSEETITPWNFEEVVDKGASAQSFIERMTNFDKNLPNEKVLPKHSLLYEYFTVYNELTKVKYVTEGMRKPAFLSGEQKKAIVDLLFKTNRKVTVKQLKEDYFKKIECFDSVEISGVEDRFNASLGTYHDLLKIIKDKDFLDNEENEDILEDIVLTLTLFEDREMIEERLKTYAHLFDDKVMKQLKRRRYTGWGRLSRKLINGIRDKQSGKTILDFLKSDGFANRNFMQLIHDDSLTFKEDIQKAQVSGQGDSLHEHIANLAGSPAIKKGILQTVKVVDELVKVMGRHKPENIVIEMARENQTTQKGQKNSRERMKRIEEGIKELGSQILKEHPVENTQLQNEKLYLYYLQNGRDMYVDQELDINRLSDYDVDHIVPQSFLKDDSIDNKVLTRSDKARGKSDNVPSEEVVKKMKNYWRQLLNAKLITQRKFDNLTKAERGGLSELDKAGFIKRQLVETRQITKHVAQILDSRMNTKYDENDKLIREVKVITLKSKLVSDFRKDFQFYKVREINNYHHAHDAYLNAVVGTALIKKYPKLESEFVYGDYKVYDVRKMIAKSEQEIGKATAKYFFYSNIMNFFKTEITLANGEIRKRPLIETNGETGEIVWDKGRDFATVRKVLSMPQVNIVKKTEVQTGGFSKESILPKRNSDKLIARKKDWDPKKYGGFDSPTVAYSVLVVAKVEKGKSKKLKSVKELLGITIMERSSFEKNPIDFLEAKGYKEVKKDLIIKLPKYSLFELENGRKRMLASAGELQKGNELALPSKYVNFLYLASHYEKLKGSPEDNEQKQLFVEQHKHYLDEIIEQISEFSKRVILADANLDKVLSAYNKHRDKPIREQAENIIHLFTLTNLGAPAAFKYFDTTIDRKRYTSTKEVLDATLIHQSITGLYETRIDLSQLGGDGGGGGGGGGGGTAPLEEEYRLFLEAPIQNVTLLEQWKREIPKVWAEINPPGLASTQAPIHVQLLSTALPVRVRQYPITLEAKRSLRETIRKFRAAGILRPVHSPWNTPLLPVRKSGTSEYRMVQDLREVNKRVETIHPTVPNPYTLLSLLPPDRIWYSVLDLKDAFFCIPLAPESQLIFAFEWADAEEGESGQLTWTRLPQGFKNSPTLFNEALNRDLQGFRLDHPSVSLLQYVDDLLIAADTQAACLSATRDLLMTLAELGYRVSGKKAQLCQEEVTYLGFKIHKGSRSLSNSRTQAILQIPVPKTKRQVREFLGKIGYCRLFIPGFAELAQPLYAATRPGNDPLVWGEKEEEAFQSLKLALTQPPALALPSLDKPFQLFVEETSGAAKGVLTQALGPWKRPVAYLSKRLDPVAAGWPRCLRAIAAAALLTREASKLTFGQDIEITSSHNLESLLRSPPDKWLTNARITQYQVLLLDPPRVRFKQTAALNPATLLPETDDTLPIHHCLDTLDSLTSTRPDLTDQPLAQAEATLFTDGSSYIRDGKRYAGAAVVTLDSVIWAEPLPIGTSAQKAELIALTKALEWSKDKSVNIYTDSRYAFATLHVHGMIYRERGWLTAGGKAIKNAPEILALLTAVWLPKRVAVMHCKGHQKDDAPTSTGNRRADEVAREVAIRPLSTQATISAGKRTADGSEFEKRTADGSEFESPKKKAKVE

SEQ ID NO: 6266 - protein, 2098 aa, synthetic construct
MPAAKRVKLDGGDKKYSIGLDIGTNSVGWAVITDEYKVPSKKFKVLGNTDRHSIKKNLIGALLFDSGETAEATRLKRTARRRYTRRKNRICYLQEIFSNEMAKVDDSFFHRLEESFLVEEDKKHERHPIFGNIVDEVAYHEKYPTIYHLRKKLVDSTDKADLRLIYLALAHMIKFRGHFLIEGDLNPDNSDVDKLFIQLVQTYNQLFEENPINASGVDAKAILSARLSKSRRLENLIAQLPGEKKNGLFGNLIALSLGLTPNFKSNFDLAEDAKLQLSKDTYDDDLDNLLAQIGDQYADLFLAAKNLSDAILLSDILRVNTEITKAPLSASMIKRYDEHHQDLTLLKALVRQQLPEKYKEIFFDQSKNGYAGYIDGGASQEEFYKFIKPILEKMDGTEELLVKLNREDLLRKQRTFDNGSIPHQIHLGELHAILRRQEDFYPFLKDNREKIEKILTFRIPYYVGPLARGNSRFAWMTRKSEETITPWNFEEVVDKGASAQSFIERMTNFDKNLPNEKVLPKHSLLYEYFTVYNELTKVKYVTEGMRKPAFLSGEQKKAIVDLLFKTNRKVTVKQLKEDYFKKIECFDSVEISGVEDRFNASLGTYHDLLKIIKDKDFLDNEENEDILEDIVLTLTLFEDREMIEERLKTYAHLFDDKVMKQLKRRRYTGWGRLSRKLINGIRDKQSGKTILDFLKSDGFANRNFMQLIHDDSLTFKEDIQKAQVSGQGDSLHEHIANLAGSPAIKKGILQTVKVVDELVKVMGRHKPENIVIEMARENQTTQKGQKNSRERMKRIEEGIKELGSQILKEHPVENTQLQNEKLYLYYLQNGRDMYVDQELDINRLSDYDVDHIVPQSFLKDDSIDNKVLTRSDKARGKSDNVPSEEVVKKMKNYWRQLLNAKLITQRKFDNLTKAERGGLSELDKAGFIKRQLVETRQITKHVAQILDSRMNTKYDENDKLIREVKVITLKSKLVSDFRKDFQFYKVREINNYHHAHDAYLNAVVGTALIKKYPKLESEFVYGDYKVYDVRKMIAKSEQEIGKATAKYFFYSNIMNFFKTEITLANGEIRKRPLIETNGETGEIVWDKGRDFATVRKVLSMPQVNIVKKTEVQTGGFSKESILPKRNSDKLIARKKDWDPKKYGGFDSPTVAYSVLVVAKVEKGKSKKLKSVKELLGITIMERSSFEKNPIDFLEAKGYKEVKKDLIIKLPKYSLFELENGRKRMLASAGELQKGNELALPSKYVNFLYLASHYEKLKGSPEDNEQKQLFVEQHKHYLDEIIEQISEFSKRVILADANLDKVLSAYNKHRDKPIREQAENIIHLFTLTNLGAPAAFKYFDTTIDRKRYTSTKEVLDATLIHQSITGLYETRIDLSQLGGDGGGGGGGGGGGTVSLQDEHRLFDIPVTTSLPDVWLQDFPQAWAETGGLGRAKCQAPIIIDLKPTAVPVSIKQYPMSLEAHMGIRQHIIKFLELGVLRPCRSPWNTPLLPVKKPGTQDYRPVQDLREINKRTVDIHPTVPNPYNLLSTLKPDYSWYTVLDLKDAFFCLPLAPQSQELFAFEWKDPERGISGQLTWTRLPQGFKNSPTLFNEALHRDLTDFRTQHPEVTLLQYVDDLLLAAPTKKACTQGTRHLLQELGEKGYRASAKKAQICQTKVTYLGYILSEGKRWLTPGRIETVARIPPPRNPREVREFLGKAGFCRLFIPGFAELAAPLYALTKPSTPFTWQTEHQLAFEALKKALLSAPALGLPDTSKPFTLFLDERQGIAKGVLTQKLGPWKRPVAYLSKKLDPVAAGWPPCLRIMAATAMLVKDSAKLTLGQPLTVITPHTLEAIVRQPPDRWITNARLTHYQALLLDTDRVQFGPPVTLNPATLLPVPENQPSPHDCRQVLAETHGTREDLKDQELPDADHTWYTDGSSYLDSGTRRAGAAVVDGHNTIWAQSLPPGTSAQKAELIALTKALELSKGKKANIYTDSRYAFATAHTHGSIYERRGWLTSEGKEIKNKAEIIALLKALFLPQEVAIIHCPGHQKGQDPVAVGNRQADRVARQAAMAEVLTLATEPDNTSHITAGKRTADGSEFEKRTADGSEFESPKKKAKVE

SEQ ID NO: 6267 - protein, 2091 aa, synthetic construct
MPAAKRVKLDGGDKKYSIGLDIGTNSVGWAVITDEYKVPSKKFKVLGNTDRHSIKKNLIGALLFDSGETAEATRLKRTARRRYTRRKNRICYLQEIFSNEMAKVDDSFFHRLEESFLVEEDKKHERHPIFGNIVDEVAYHEKYPTIYHLRKKLVDSTDKADLRLIYLALAHMIKFRGHFLIEGDLNPDNSDVDKLFIQLVQTYNQLFEENPINASGVDAKAILSARLSKSRRLENLIAQLPGEKKNGLFGNLIALSLGLTPNFKSNFDLAEDAKLQLSKDTYDDDLDNLLAQIGDQYADLFLAAKNLSDAILLSDILRVNTEITKAPLSASMIKRYDEHHQDLTLLKALVRQQLPEKYKEIFFDQSKNGYAGYIDGGASQEEFYKFIKPILEKMDGTEELLVKLNREDLLRKQRTFDNGSIPHQIHLGELHAILRRQEDFYPFLKDNREKIEKILTFRIPYYVGPLARGNSRFAWMTRKSEETITPWNFEEVVDKGASAQSFIERMTNFDKNLPNEKVLPKHSLLYEYFTVYNELTKVKYVTEGMRKPAFLSGEQKKAIVDLLFKTNRKVTVKQLKEDYFKKIECFDSVEISGVEDRFNASLGTYHDLLKIIKDKDFLDNEENEDILEDIVLTLTLFEDREMIEERLKTYAHLFDDKVMKQLKRRRYTGWGRLSRKLINGIRDKQSGKTILDFLKSDGFANRNFMQLIHDDSLTFKEDIQKAQVSGQGDSLHEHIANLAGSPAIKKGILQTVKVVDELVKVMGRHKPENIVIEMARENQTTQKGQKNSRERMKRIEEGIKELGSQILKEHPVENTQLQNEKLYLYYLQNGRDMYVDQELDINRLSDYDVDHIVPQSFLKDDSIDNKVLTRSDKARGKSDNVPSEEVVKKMKNYWRQLLNAKLITQRKFDNLTKAERGGLSELDKAGFIKRQLVETRQITKHVAQILDSRMNTKYDENDKLIREVKVITLKSKLVSDFRKDFQFYKVREINNYHHAHDAYLNAVVGTALIKKYPKLESEFVYGDYKVYDVRKMIAKSEQEIGKATAKYFFYSNIMNFFKTEITLANGEIRKRPLIETNGETGEIVWDKGRDFATVRKVLSMPQVNIVKKTEVQTGGFSKESILPKRNSDKLIARKKDWDPKKYGGFDSPTVAYSVLVVAKVEKGKSKKLKSVKELLGITIMERSSFEKNPIDFLEAKGYKEVKKDLIIKLPKYSLFELENGRKRMLASAGELQKGNELALPSKYVNFLYLASHYEKLKGSPEDNEQKQLFVEQHKHYLDEIIEQISEFSKRVILADANLDKVLSAYNKHRDKPIREQAENIIHLFTLTNLGAPAAFKYFDTTIDRKRYTSTKEVLDATLIHQSITGLYETRIDLSQLGGDGGGGGGGGGGGTLQLEEEYRLFEPESTQKQEMDIWLKNFPQAWAETGGMGTAHCQAPVLIQLKATATPISIRQYPMPHEAYQGIKPHIRRMLDQGILKPCQSPWNTPLLPVKKPGTEDYRPVQDLREVNKRVEDIHPTVPNPYNLLSTLPPSHPWYTVLDLKDAFFCLRLHSESQLLFAFEWRDPEIGLSGQLTWTRLPQGFKNSPTLFNEALHSDLADFRVRYPALVLLQYVDDLLLAAATRTECLEGTKALLETLGNKGYRASAKKAQICLQEVTYLGYSLKDGQRWLTKARKEAILSIPVPKNSRQVREFLGKAGYCRLFIPGFAELAAPLYPLTRPGTLFQWGTEQQLAFEDIKKALLSSPALGLPDITKPFELFIDENSGFAKGVLVQKLGPWKRPVAYLSKKLDTVASGWPPCLRMVAAIAILVKDAGKLTLGQPLTILTSHPVEALVRQPPNKWLSNARMTHYQAMLLDAERVHFGPTVSLNPATLLPLPSGGNHHDCLQILAETHGTRPDLTDQPLPDADLTWYTDGSSFIRNGEREAGAAVTTESEVIWAAPLPPGTSAQRAELIALTQALKMAEGKKLTVYTDSRYAFATTHVHGEIYRRRGWLTSEGKEIKNKNEILALLEALFLPKRLSIIHCPGHQKGDSPQAKGNRLADDTAKKAATETHSSLTVLPAGKRTADGSEFEKRTADGSEFESPKKKAKVE

SEQ ID NO: 6268 - protein, 2123 aa, synthetic construct
MPAAKRVKLDGGDKKYSIGLDIGTNSVGWAVITDEYKVPSKKFKVLGNTDRHSIKKNLIGALLFDSGETAEATRLKRTARRRYTRRKNRICYLQEIFSNEMAKVDDSFFHRLEESFLVEEDKKHERHPIFGNIVDEVAYHEKYPTIYHLRKKLVDSTDKADLRLIYLALAHMIKFRGHFLIEGDLNPDNSDVDKLFIQLVQTYNQLFEENPINASGVDAKAILSARLSKSRRLENLIAQLPGEKKNGLFGNLIALSLGLTPNFKSNFDLAEDAKLQLSKDTYDDDLDNLLAQIGDQYADLFLAAKNLSDAILLSDILRVNTEITKAPLSASMIKRYDEHHQDLTLLKALVRQQLPEKYKEIFFDQSKNGYAGYIDGGASQEEFYKFIKPILEKMDGTEELLVKLNREDLLRKQRTFDNGSIPHQIHLGELHAILRRQEDFYPFLKDNREKIEKILTFRIPYYVGPLARGNSRFAWMTRKSEETITPWNFEEVVDKGASAQSFIERMTNFDKNLPNEKVLPKHSLLYEYFTVYNELTKVKYVTEGMRKPAFLSGEQKKAIVDLLFKTNRKVTVKQLKEDYFKKIECFDSVEISGVEDRFNASLGTYHDLLKIIKDKDFLDNEENEDILEDIVLTLTLFEDREMIEERLKTYAHLFDDKVMKQLKRRRYTGWGRLSRKLINGIRDKQSGKTILDFLKSDGFANRNFMQLIHDDSLTFKEDIQKAQVSGQGDSLHEHIANLAGSPAIKKGILQTVKVVDELVKVMGRHKPENIVIEMARENQTTQKGQKNSRERMKRIEEGIKELGSQILKEHPVENTQLQNEKLYLYYLQNGRDMYVDQELDINRLSDYDVDHIVPQSFLKDDSIDNKVLTRSDKARGKSDNVPSEEVVKKMKNYWRQLLNAKLITQRKFDNLTKAERGGLSELDKAGFIKRQLVETRQITKHVAQILDSRMNTKYDENDKLIREVKVITLKSKLVSDFRKDFQFYKVREINNYHHAHDAYLNAVVGTALIKKYPKLESEFVYGDYKVYDVRKMIAKSEQEIGKATAKYFFYSNIMNFFKTEITLANGEIRKRPLIETNGETGEIVWDKGRDFATVRKVLSMPQVNIVKKTEVQTGGFSKESILPKRNSDKLIARKKDWDPKKYGGFDSPTVAYSVLVVAKVEKGKSKKLKSVKELLGITIMERSSFEKNPIDFLEAKGYKEVKKDLIIKLPKYSLFELENGRKRMLASAGELQKGNELALPSKYVNFLYLASHYEKLKGSPEDNEQKQLFVEQHKHYLDEIIEQISEFSKRVILADANLDKVLSAYNKHRDKPIREQAENIIHLFTLTNLGAPAAFKYFDTTIDRKRYTSTKEVLDATLIHQSITGLYETRIDLSQLGGDGGGGGGGGGGGLLGRDLLTKLKAQIQFSTEGPQVTWEDRPAMCLVLNLEEEYRLHEKPVPPSIDPSWLQLFPMVWAEKAGMGLANQVPPVVVELKSDASPVAVRQYPMSKEAREGIRPHIQRFLDLGILVPCQSPWNTPLLPVKKPGTNDYRPVQDLREVNKRVQDIHPTVPNPYNLLSSLPPSHTWYSVLDLKDAFFCLKLHPNSQPLFAFEWRDPEKGNTGQLTWTRLPQGFKNSPTLFNEALHRDLASFRALNPQVVMLQYVDDLLVAAPTYRDCKEGTRRLLQELSKLGYRVSAKKAQLCREEVTYLGYLLKGGKRWLTPARKATVMKIPTPTTPRQVREFLGTAGFCRLWIPGFASLAAPLYPLTRPKVPFTWTEAHQEAFGRIKEALLSAPALALPDLTKPFALYVDEKEGVARGVLTQTLGPWRRPVAYLSKKLDPVASGWPTCLKAIAAVALLLKDADKLTLGQNVLVIAPHNLESIVRQPPDRWMTNARMTHYQSLLLNERVSFAPPAILNPATLLPVESDDTPIHICSEILAEETGTRPDLRDQPLPGVPAWYTDGSSFIMDGRRQAGAAIVDNKRTVWASNLPEGTSAQKAELIALTQALRLAEGKSINIYTDSRYAFATAHVHGAIYKQRGWLTSAGKDIKNKEEILALLEAIHLPKRVAIIHCPGHQRGTDPVATGNRKADEAAKQAAQSTRILTETTKNAGKRTADGSEFEKRTADGSEFESPKKKAKVE

SEQ ID NO: 6269 - protein, 2123 aa, synthetic construct
MPAAKRVKLDGGDKKYSIGLDIGTNSVGWAVITDEYKVPSKKFKVLGNTDRHSIKKNLIGALLFDSGETAEATRLKRTARRRYTRRKNRICYLQEIFSNEMAKVDDSFFHRLEESFLVEEDKKHERHPIFGNIVDEVAYHEKYPTIYHLRKKLVDSTDKADLRLIYLALAHMIKFRGHFLIEGDLNPDNSDVDKLFIQLVQTYNQLFEENPINASGVDAKAILSARLSKSRRLENLIAQLPGEKKNGLFGNLIALSLGLTPNFKSNFDLAEDAKLQLSKDTYDDDLDNLLAQIGDQYADLFLAAKNLSDAILLSDILRVNTEITKAPLSASMIKRYDEHHQDLTLLKALVRQQLPEKYKEIFFDQSKNGYAGYIDGGASQEEFYKFIKPILEKMDGTEELLVKLNREDLLRKQRTFDNGSIPHQIHLGELHAILRRQEDFYPFLKDNREKIEKILTFRIPYYVGPLARGNSRFAWMTRKSEETITPWNFEEVVDKGASAQSFIERMTNFDKNLPNEKVLPKHSLLYEYFTVYNELTKVKYVTEGMRKPAFLSGEQKKAIVDLLFKTNRKVTVKQLKEDYFKKIECFDSVEISGVEDRFNASLGTYHDLLKIIKDKDFLDNEENEDILEDIVLTLTLFEDREMIEERLKTYAHLFDDKVMKQLKRRRYTGWGRLSRKLINGIRDKQSGKTILDFLKSDGFANRNFMQLIHDDSLTFKEDIQKAQVSGQGDSLHEHIANLAGSPAIKKGILQTVKVVDELVKVMGRHKPENIVIEMARENQTTQKGQKNSRERMKRIEEGIKELGSQILKEHPVENTQLQNEKLYLYYLQNGRDMYVDQELDINRLSDYDVDHIVPQSFLKDDSIDNKVLTRSDKARGKSDNVPSEEVVKKMKNYWRQLLNAKLITQRKFDNLTKAERGGLSELDKAGFIKRQLVETRQITKHVAQILDSRMNTKYDENDKLIREVKVITLKSKLVSDFRKDFQFYKVREINNYHHAHDAYLNAVVGTALIKKYPKLESEFVYGDYKVYDVRKMIAKSEQEIGKATAKYFFYSNIMNFFKTEITLANGEIRKRPLIETNGETGEIVWDKGRDFATVRKVLSMPQVNIVKKTEVQTGGFSKESILPKRNSDKLIARKKDWDPKKYGGFDSPTVAYSVLVVAKVEKGKSKKLKSVKELLGITIMERSSFEKNPIDFLEAKGYKEVKKDLIIKLPKYSLFELENGRKRMLASAGELQKGNELALPSKYVNFLYLASHYEKLKGSPEDNEQKQLFVEQHKHYLDEIIEQISEFSKRVILADANLDKVLSAYNKHRDKPIREQAENIIHLFTLTNLGAPAAFKYFDTTIDRKRYTSTKEVLDATLIHQSITGLYETRIDLSQLGGDGGGGGGGGGGGLLGRDLLTKLKAQIQFSTEGPQVTWEDRPAMCLVLNLEEEYRLHEKPVPPSIDPSWLQLFPMVWAEKAGMGLANQVPPVVVELKSDASPVAVRQYPMSKEAREGIRPHIQRFLDLGILVPCQSPWNTPLLPVKKPGTNDYRPVQDLREVNKRVQDIHPTVPNPYNLLSSLPPSHTWYSVLDLKDAFFCLKLHPNSQPLFAFEWRDPEKGNTGQLTWTRLPQGFKNSPTLFNEALHRDLASFRALNPQVVMLQYVDDLLVAAPTYRDCKEGTRRLLQELSKLGYRVSAKKAQLCREEVTYLGYLLKGGKRWLTPARKATVMKIPTPTTPRQVREFLGKAGFCRLFIPGFASLAAPLYPLTRPKVPFTWTEAHQEAFGRIKEALLSAPALALPDLTKPFALYVDEKEGVARGVLTQTLGPWRRPVAYLSKKLDPVASGWPTCLKAIAAVALLLKDADKLTLGQNVLVIAPHNLESIVRQPPDRWMTNARMTHYQSLLLNERVSFAPPAILNPATLLPVESDDTPIHICSEILAEETGTRPDLRDQPLPGVPAWYTDGSSFIMDGRRQAGAAIVDNKRTVWASNLPEGTSAQKAELIALTQALRLAEGKSINIYTDSRYAFATAHVHGAIYKQRGWLTSAGKDIKNKEEILALLEAIHLPKRVAIIHCPGHQRGTDPVATGNRKADEAAKQAAQSTRILTETTKNAGKRTADGSEFEKRTADGSEFESPKKKAKVE

SEQ ID NO: 6270 - protein, 2092 aa, synthetic construct
MPAAKRVKLDGGDKKYSIGLDIGTNSVGWAVITDEYKVPSKKFKVLGNTDRHSIKKNLIGALLFDSGETAEATRLKRTARRRYTRRKNRICYLQEIFSNEMAKVDDSFFHRLEESFLVEEDKKHERHPIFGNIVDEVAYHEKYPTIYHLRKKLVDSTDKADLRLIYLALAHMIKFRGHFLIEGDLNPDNSDVDKLFIQLVQTYNQLFEENPINASGVDAKAILSARLSKSRRLENLIAQLPGEKKNGLFGNLIALSLGLTPNFKSNFDLAEDAKLQLSKDTYDDDLDNLLAQIGDQYADLFLAAKNLSDAILLSDILRVNTEITKAPLSASMIKRYDEHHQDLTLLKALVRQQLPEKYKEIFFDQSKNGYAGYIDGGASQEEFYKFIKPILEKMDGTEELLVKLNREDLLRKQRTFDNGSIPHQIHLGELHAILRRQEDFYPFLKDNREKIEKILTFRIPYYVGPLARGNSRFAWMTRKSEETITPWNFEEVVDKGASAQSFIERMTNFDKNLPNEKVLPKHSLLYEYFTVYNELTKVKYVTEGMRKPAFLSGEQKKAIVDLLFKTNRKVTVKQLKEDYFKKIECFDSVEISGVEDRFNASLGTYHDLLKIIKDKDFLDNEENEDILEDIVLTLTLFEDREMIEERLKTYAHLFDDKVMKQLKRRRYTGWGRLSRKLINGIRDKQSGKTILDFLKSDGFANRNFMQLIHDDSLTFKEDIQKAQVSGQGDSLHEHIANLAGSPAIKKGILQTVKVVDELVKVMGRHKPENIVIEMARENQTTQKGQKNSRERMKRIEEGIKELGSQILKEHPVENTQLQNEKLYLYYLQNGRDMYVDQELDINRLSDYDVDHIVPQSFLKDDSIDNKVLTRSDKARGKSDNVPSEEVVKKMKNYWRQLLNAKLITQRKFDNLTKAERGGLSELDKAGFIKRQLVETRQITKHVAQILDSRMNTKYDENDKLIREVKVITLKSKLVSDFRKDFQFYKVREINNYHHAHDAYLNAVVGTALIKKYPKLESEFVYGDYKVYDVRKMIAKSEQEIGKATAKYFFYSNIMNFFKTEITLANGEIRKRPLIETNGETGEIVWDKGRDFATVRKVLSMPQVNIVKKTEVQTGGFSKESILPKRNSDKLIARKKDWDPKKYGGFDSPTVAYSVLVVAKVEKGKSKKLKSVKELLGITIMERSSFEKNPIDFLEAKGYKEVKKDLIIKLPKYSLFELENGRKRMLASAGELQKGNELALPSKYVNFLYLASHYEKLKGSPEDNEQKQLFVEQHKHYLDEIIEQISEFSKRVILADANLDKVLSAYNKHRDKPIREQAENIIHLFTLTNLGAPAAFKYFDTTIDRKRYTSTKEVLDATLIHQSITGLYETRIDLSQLGGDGGGGGGGGGGGTLNLEDEYRLYETSAEPEVSPGSTWLSDFPQAWAETGGMGLAVRQAPLIIPLKATSTPVSIKQYPMSQEAKLGIKPHIQRLLDQGILVPCQSPWNTPLLPVKKPGTNDYRPVQDLREVNKRVEDIHPTVPNPYNLLSGLPPSHRWYTVLDLKDAFFCLRLHPTSQPLFAFEWRDPGMGISGQLTWTRLPQGFKNSPTLFNEALHRDLADFRIQHPDLILLQYVDDILLAATSELDCQQGTRALLLTLGNLGYRASAKKAQLCQKQVKYLGYLLKEGQRWLTEARKETVMGQPTPKTPRQLREFLGTAGFCRLWIPGFAEMAAPLYPLTKPGTLFNWGPDQQKAYQEIKQALLTAPALGLPDLTKPFELFVDEKQGYAKGVLTQKLGPWRRPVAYLSKKLDPVAAGWPPCLRMVAAIAVLRKDAGKLTMGQPLVILAPHAVEALVKQPPDRWLSNARMTHYQAMLLDTDRVQFGPVVALNPATLLPLPEEGAPHDCLEILAETHGTRPDLTDQPIPDADHTWYTDGSSFLQEGQRKAGAAVTTETEVIWARALPAGTSAQRAELIALTQALKMAEGKRLNVYTDSRYAFATAHIHGEIYRRRGWLTSEGREIKNKSEILALLKALFLPKRLSIIHCLGHQKGDSAEARGNRLADQAAREAAIKTPPDTSTLLAGKRTADGSEFEKRTADGSEFESPKKKAKVE

SEQ ID NO: 6271 - protein, 2092 aa, synthetic construct
MPAAKRVKLDGGDKKYSIGLDIGTNSVGWAVITDEYKVPSKKFKVLGNTDRHSIKKNLIGALLFDSGETAEATRLKRTARRRYTRRKNRICYLQEIFSNEMAKVDDSFFHRLEESFLVEEDKKHERHPIFGNIVDEVAYHEKYPTIYHLRKKLVDSTDKADLRLIYLALAHMIKFRGHFLIEGDLNPDNSDVDKLFIQLVQTYNQLFEENPINASGVDAKAILSARLSKSRRLENLIAQLPGEKKNGLFGNLIALSLGLTPNFKSNFDLAEDAKLQLSKDTYDDDLDNLLAQIGDQYADLFLAAKNLSDAILLSDILRVNTEITKAPLSASMIKRYDEHHQDLTLLKALVRQQLPEKYKEIFFDQSKNGYAGYIDGGASQEEFYKFIKPILEKMDGTEELLVKLNREDLLRKQRTFDNGSIPHQIHLGELHAILRRQEDFYPFLKDNREKIEKILTFRIPYYVGPLARGNSRFAWMTRKSEETITPWNFEEVVDKGASAQSFIERMTNFDKNLPNEKVLPKHSLLYEYFTVYNELTKVKYVTEGMRKPAFLSGEQKKAIVDLLFKTNRKVTVKQLKEDYFKKIECFDSVEISGVEDRFNASLGTYHDLLKIIKDKDFLDNEENEDILEDIVLTLTLFEDREMIEERLKTYAHLFDDKVMKQLKRRRYTGWGRLSRKLINGIRDKQSGKTILDFLKSDGFANRNFMQLIHDDSLTFKEDIQKAQVSGQGDSLHEHIANLAGSPAIKKGILQTVKVVDELVKVMGRHKPENIVIEMARENQTTQKGQKNSRERMKRIEEGIKELGSQILKEHPVENTQLQNEKLYLYYLQNGRDMYVDQELDINRLSDYDVDHIVPQSFLKDDSIDNKVLTRSDKARGKSDNVPSEEVVKKMKNYWRQLLNAKLITQRKFDNLTKAERGGLSELDKAGFIKRQLVETRQITKHVAQILDSRMNTKYDENDKLIREVKVITLKSKLVSDFRKDFQFYKVREINNYHHAHDAYLNAVVGTALIKKYPKLESEFVYGDYKVYDVRKMIAKSEQEIGKATAKYFFYSNIMNFFKTEITLANGEIRKRPLIETNGETGEIVWDKGRDFATVRKVLSMPQVNIVKKTEVQTGGFSKESILPKRNSDKLIARKKDWDPKKYGGFDSPTVAYSVLVVAKVEKGKSKKLKSVKELLGITIMERSSFEKNPIDFLEAKGYKEVKKDLIIKLPKYSLFELENGRKRMLASAGELQKGNELALPSKYVNFLYLASHYEKLKGSPEDNEQKQLFVEQHKHYLDEIIEQISEFSKRVILADANLDKVLSAYNKHRDKPIREQAENIIHLFTLTNLGAPAAFKYFDTTIDRKRYTSTKEVLDATLIHQSITGLYETRIDLSQLGGDGGGGGGGGGGGTLNLEDEYRLYETSAEPEVSPGSTWLSDFPQAWAETGGMGLAVRQAPLIIPLKATSTPVSIKQYPMSQEAKLGIKPHIQRLLDQGILVPCQSPWNTPLLPVKKPGTNDYRPVQDLREVNKRVEDIHPTVPNPYNLLSGLPPSHRWYTVLDLKDAFFCLRLHPTSQPLFAFEWRDPGMGISGQLTWTRLPQGFKNSPTLFNEALHRDLADFRIQHPDLILLQYVDDILLAATSELDCQQGTRALLLTLGNLGYRASAKKAQLCQKQVKYLGYLLKEGQRWLTEARKETVMGQPTPKTPRQLREFLGKAGFCRLFIPGFAEMAAPLYPLTKPGTLFNWGPDQQKAYQEIKQALLTAPALGLPDLTKPFELFVDEKQGYAKGVLTQKLGPWRRPVAYLSKKLDPVAAGWPPCLRMVAAIAVLRKDAGKLTMGQPLVILAPHAVEALVKQPPDRWLSNARMTHYQAMLLDTDRVQFGPVVALNPATLLPLPEEGAPHDCLEILAETHGTRPDLTDQPIPDADHTWYTDGSSFLQEGQRKAGAAVTTETEVIWARALPAGTSAQRAELIALTQALKMAEGKRLNVYTDSRYAFATAHIHGEIYRRRGWLTSEGREIKNKSEILALLKALFLPKRLSIIHCLGHQKGDSAEARGNRLADQAAREAAIKTPPDTSTLLAGKRTADGSEFEKRTADGSEFESPKKKAKVE

SEQ ID NO: 6272 - protein, 2090 aa, synthetic construct
MPAAKRVKLDGGDKKYSIGLDIGTNSVGWAVITDEYKVPSKKFKVLGNTDRHSIKKNLIGALLFDSGETAEATRLKRTARRRYTRRKNRICYLQEIFSNEMAKVDDSFFHRLEESFLVEEDKKHERHPIFGNIVDEVAYHEKYPTIYHLRKKLVDSTDKADLRLIYLALAHMIKFRGHFLIEGDLNPDNSDVDKLFIQLVQTYNQLFEENPINASGVDAKAILSARLSKSRRLENLIAQLPGEKKNGLFGNLIALSLGLTPNFKSNFDLAEDAKLQLSKDTYDDDLDNLLAQIGDQYADLFLAAKNLSDAILLSDILRVNTEITKAPLSASMIKRYDEHHQDLTLLKALVRQQLPEKYKEIFFDQSKNGYAGYIDGGASQEEFYKFIKPILEKMDGTEELLVKLNREDLLRKQRTFDNGSIPHQIHLGELHAILRRQEDFYPFLKDNREKIEKILTFRIPYYVGPLARGNSRFAWMTRKSEETITPWNFEEVVDKGASAQSFIERMTNFDKNLPNEKVLPKHSLLYEYFTVYNELTKVKYVTEGMRKPAFLSGEQKKAIVDLLFKTNRKVTVKQLKEDYFKKIECFDSVEISGVEDRFNASLGTYHDLLKIIKDKDFLDNEENEDILEDIVLTLTLFEDREMIEERLKTYAHLFDDKVMKQLKRRRYTGWGRLSRKLINGIRDKQSGKTILDFLKSDGFANRNFMQLIHDDSLTFKEDIQKAQVSGQGDSLHEHIANLAGSPAIKKGILQTVKVVDELVKVMGRHKPENIVIEMARENQTTQKGQKNSRERMKRIEEGIKELGSQILKEHPVENTQLQNEKLYLYYLQNGRDMYVDQELDINRLSDYDVDHIVPQSFLKDDSIDNKVLTRSDKARGKSDNVPSEEVVKKMKNYWRQLLNAKLITQRKFDNLTKAERGGLSELDKAGFIKRQLVETRQITKHVAQILDSRMNTKYDENDKLIREVKVITLKSKLVSDFRKDFQFYKVREINNYHHAHDAYLNAVVGTALIKKYPKLESEFVYGDYKVYDVRKMIAKSEQEIGKATAKYFFYSNIMNFFKTEITLANGEIRKRPLIETNGETGEIVWDKGRDFATVRKVLSMPQVNIVKKTEVQTGGFSKESILPKRNSDKLIARKKDWDPKKYGGFDSPTVAYSVLVVAKVEKGKSKKLKSVKELLGITIMERSSFEKNPIDFLEAKGYKEVKKDLIIKLPKYSLFELENGRKRMLASAGELQKGNELALPSKYVNFLYLASHYEKLKGSPEDNEQKQLFVEQHKHYLDEIIEQISEFSKRVILADANLDKVLSAYNKHRDKPIREQAENIIHLFTLTNLGAPAAFKYFDTTIDRKRYTSTKEVLDATLIHQSITGLYETRIDLSQLGGDGGGGGGGGGGGVLNLEEEYRLHEKPVPSSIDPSWLQLFPTVWAERAGMGLANQVPPVVVELRSGASPVAVRQYPMSKEAREGIRPHIQRFLDLGVLVPCQSPWNTPLLPVKKPGTNDYRPVQDLREINKRVQDIHPTVPNPYNLLSSLPPSHTWYSVLDLKDAFFCLKLHPNSQPLFAFEWRDPEKGNTGQLTWTRLPQGFKNSPTLFNEALHRDLAPFRALNPQVVLLQYVDDLLVAAPTYRDCKEGTQKLLQELSKLGYRVSAKKAQLCQKEVTYLGYLLKEGKRWLTPARKATVMKIPPPTTPRQVREFLGKAGFCRLFIPGFASLAAPLYPLTKPSIPFIWTEEHQKAFDRIKEALLSAPALALPDLTKPFTLYVDERAGVARGVLTQTLGPWRRPVAYLSKKLDPVASGWPTCLKAVAAVALLLKDADKLTLGQNVTVIASHSLESIVRQPPDRWMTNARMTHYQSLLLNERVSFAPPAVLNPATLLPVESEATPVHRCSEILAEETGTRRDLKDQPLPGVPAWYTDGSSFIAEGKRRAGAAIVDGKRTVWASSLPEGTSAQKAELVALTQALRLAEGKDINIYTDSRYAFATAHIHGAIYKQRGWLTSAGKDIKNKEEILALLEAIHLPKRVAIIHCPGHQKGNDPVATGNRRADEAAKQAALSTRVLAETTKPAGKRTADGSEFEKRTADGSEFESPKKKAKVE

SEQ ID NO: 6273 - protein, 2092 aa, synthetic construct
MPAAKRVKLDGGDKKYSIGLDIGTNSVGWAVITDEYKVPSKKFKVLGNTDRHSIKKNLIGALLFDSGETAEATRLKRTARRRYTRRKNRICYLQEIFSNEMAKVDDSFFHRLEESFLVEEDKKHERHPIFGNIVDEVAYHEKYPTIYHLRKKLVDSTDKADLRLIYLALAHMIKFRGHFLIEGDLNPDNSDVDKLFIQLVQTYNQLFEENPINASGVDAKAILSARLSKSRRLENLIAQLPGEKKNGLFGNLIALSLGLTPNFKSNFDLAEDAKLQLSKDTYDDDLDNLLAQIGDQYADLFLAAKNLSDAILLSDILRVNTEITKAPLSASMIKRYDEHHQDLTLLKALVRQQLPEKYKEIFFDQSKNGYAGYIDGGASQEEFYKFIKPILEKMDGTEELLVKLNREDLLRKQRTFDNGSIPHQIHLGELHAILRRQEDFYPFLKDNREKIEKILTFRIPYYVGPLARGNSRFAWMTRKSEETITPWNFEEVVDKGASAQSFIERMTNFDKNLPNEKVLPKHSLLYEYFTVYNELTKVKYVTEGMRKPAFLSGEQKKAIVDLLFKTNRKVTVKQLKEDYFKKIECFDSVEISGVEDRFNASLGTYHDLLKIIKDKDFLDNEENEDILEDIVLTLTLFEDREMIEERLKTYAHLFDDKVMKQLKRRRYTGWGRLSRKLINGIRDKQSGKTILDFLKSDGFANRNFMQLIHDDSLTFKEDIQKAQVSGQGDSLHEHIANLAGSPAIKKGILQTVKVVDELVKVMGRHKPENIVIEMARENQTTQKGQKNSRERMKRIEEGIKELGSQILKEHPVENTQLQNEKLYLYYLQNGRDMYVDQELDINRLSDYDVDHIVPQSFLKDDSIDNKVLTRSDKARGKSDNVPSEEVVKKMKNYWRQLLNAKLITQRKFDNLTKAERGGLSELDKAGFIKRQLVETRQITKHVAQILDSRMNTKYDENDKLIREVKVITLKSKLVSDFRKDFQFYKVREINNYHHAHDAYLNAVVGTALIKKYPKLESEFVYGDYKVYDVRKMIAKSEQEIGKATAKYFFYSNIMNFFKTEITLANGEIRKRPLIETNGETGEIVWDKGRDFATVRKVLSMPQVNIVKKTEVQTGGFSKESILPKRNSDKLIARKKDWDPKKYGGFDSPTVAYSVLVVAKVEKGKSKKLKSVKELLGITIMERSSFEKNPIDFLEAKGYKEVKKDLIIKLPKYSLFELENGRKRMLASAGELQKGNELALPSKYVNFLYLASHYEKLKGSPEDNEQKQLFVEQHKHYLDEIIEQISEFSKRVILADANLDKVLSAYNKHRDKPIREQAENIIHLFTLTNLGAPAAFKYFDTTIDRKRYTSTKEVLDATLIHQSITGLYETRIDLSQLGGDGGGGGGGGGGGTLNIEDEYRLHETSKEPDVPLGSTWLSDFPQAWAETGGMGLAVRQAPLIIPLKATSTPVSIKQYPMSQEARLGIKPHIQRLLDQGILVPCQSPWNTPLLPVKKPGTNDYRPVQDLREVNKRVEDIHPTVPNPYNLLSGLPPSHQWYTVLDLKDAFFCLRLHPTSQPLFAFEWRDPEMGISGQLTWTRLPQGFKNSPTLFNEALHRDLADFRIQHPDLILLQYVDDLLLAATSEQDCQRGTRALLQTLGNLGYRASAKKAQICQKQVKYLGYLLKEGQRWLTEARKETVMGQPTPKTPRQLREFLGKAGFCRLFIPGFAEMAAPLYPLTKPGTLFNWGPDQQKAYQEIKQALLTAPALGLPDLTKPFELFVDEKQGYAKGVLTQKLGPWRRPVAYLSKKLDPVAAGWPPCLRMVAAIAVLTKDAGKLTMGQPLVILAPHAVEALVKQPPDRWLSNARMTHYQAMLLDTDRVQFGPVVALNPATLLPLPEKEAPHDCLEILAETHGTRPDLTDQPIPDADYTWYTDGSSFLQEGQRRAGAAVTTETEVIWARALPAGTSAQRAELIALTQALKMAEGKKLNVYTDSRYAFATAHVHGEIYRRRGWLTSEGREIKNKNEILALLKALFLPKRLSIIHCPGHQKGNSAEARGNRMADQAAREAAMKAVLETSTLLAGKRTADGSEFEKRTADGSEFESPKKKAKVE

SEQ ID NO: 6274 - protein, 2095 aa, synthetic construct
MPAAKRVKLDGGDKKYSIGLDIGTNSVGWAVITDEYKVPSKKFKVLGNTDRHSIKKNLIGALLFDSGETAEATRLKRTARRRYTRRKNRICYLQEIFSNEMAKVDDSFFHRLEESFLVEEDKKHERHPIFGNIVDEVAYHEKYPTIYHLRKKLVDSTDKADLRLIYLALAHMIKFRGHFLIEGDLNPDNSDVDKLFIQLVQTYNQLFEENPINASGVDAKAILSARLSKSRRLENLIAQLPGEKKNGLFGNLIALSLGLTPNFKSNFDLAEDAKLQLSKDTYDDDLDNLLAQIGDQYADLFLAAKNLSDAILLSDILRVNTEITKAPLSASMIKRYDEHHQDLTLLKALVRQQLPEKYKEIFFDQSKNGYAGYIDGGASQEEFYKFIKPILEKMDGTEELLVKLNREDLLRKQRTFDNGSIPHQIHLGELHAILRRQEDFYPFLKDNREKIEKILTFRIPYYVGPLARGNSRFAWMTRKSEETITPWNFEEVVDKGASAQSFIERMTNFDKNLPNEKVLPKHSLLYEYFTVYNELTKVKYVTEGMRKPAFLSGEQKKAIVDLLFKTNRKVTVKQLKEDYFKKIECFDSVEISGVEDRFNASLGTYHDLLKIIKDKDFLDNEENEDILEDIVLTLTLFEDREMIEERLKTYAHLFDDKVMKQLKRRRYTGWGRLSRKLINGIRDKQSGKTILDFLKSDGFANRNFMQLIHDDSLTFKEDIQKAQVSGQGDSLHEHIANLAGSPAIKKGILQTVKVVDELVKVMGRHKPENIVIEMARENQTTQKGQKNSRERMKRIEEGIKELGSQILKEHPVENTQLQNEKLYLYYLQNGRDMYVDQELDINRLSDYDVDHIVPQSFLKDDSIDNKVLTRSDKARGKSDNVPSEEVVKKMKNYWRQLLNAKLITQRKFDNLTKAERGGLSELDKAGFIKRQLVETRQITKHVAQILDSRMNTKYDENDKLIREVKVITLKSKLVSDFRKDFQFYKVREINNYHHAHDAYLNAVVGTALIKKYPKLESEFVYGDYKVYDVRKMIAKSEQEIGKATAKYFFYSNIMNFFKTEITLANGEIRKRPLIETNGETGEIVWDKGRDFATVRKVLSMPQVNIVKKTEVQTGGFSKESILPKRNSDKLIARKKDWDPKKYGGFDSPTVAYSVLVVAKVEKGKSKKLKSVKELLGITIMERSSFEKNPIDFLEAKGYKEVKKDLIIKLPKYSLFELENGRKRMLASAGELQKGNELALPSKYVNFLYLASHYEKLKGSPEDNEQKQLFVEQHKHYLDEIIEQISEFSKRVILADANLDKVLSAYNKHRDKPIREQAENIIHLFTLTNLGAPAAFKYFDTTIDRKRYTSTKEVLDATLIHQSITGLYETRIDLSQLGGDGGGGGGGGGGGGTAPLEEEYRLFLEAPIQNVTLLEQWKREIPKVWAEINPPGLASTQAPIHVQLLSTALPVRVRQYPITLEAKRSLRETIRKFRAAGILRPVHSPWNTPLLPVRKSGTSEYRMVQDLREVNKRVETIHPTVPNPYTLLSLLPPDRIWYSVLDLKDAFFCIPLAPESQLIFAFEWADAEEGESGQLTWTRLPQGFKNSPTLFDEALNRDLQGFRLDHPSVSLLQYVDDLLIAADTQAACLSATRDLLMTLAELGYRVSGKKAQLCQEEVTYLGFKIHKGSRSLSNSRTQAILQIPVPKTKRQVREFLGTIGYCRLWIPGFAELAQPLYAATRGGNDPLVWGEKEEEAFQSLKLALTQPPALALPSLDKPFQLFVEETSGAAKGVLTQALGPWKRPVAYLSKRLDPVAAGWPRCLRAIAAAALLTREASKLTFGQDIEITSSHNLESLLRSPPDKWLTNARITQYQVLLLDPPRVRFKQTAALNPATLLPETDDTLPIHHCLDTLDSLTSTRPDLTDQPLAQAEATLFTDGSSYIRDGKRYAGAAVVTLDSVIWAEPLPIGTSAQKAELIALTKALEWSKDKSVNIYTDSRYAFATLHVHGMIYRERGLLTAGGKAIKNAPEILALLTAVWLPKRVAVMHCKGHQKDDAPTSTGNRRADEVAREVAIRPLSTQATISAGKRTADGSEFEKRTADGSEFESPKKKAKVE

SEQ ID NO: 6275 - protein, 2095 aa, synthetic construct
MPAAKRVKLDGGDKKYSIGLDIGTNSVGWAVITDEYKVPSKKFKVLGNTDRHSIKKNLIGALLFDSGETAEATRLKRTARRRYTRRKNRICYLQEIFSNEMAKVDDSFFHRLEESFLVEEDKKHERHPIFGNIVDEVAYHEKYPTIYHLRKKLVDSTDKADLRLIYLALAHMIKFRGHFLIEGDLNPDNSDVDKLFIQLVQTYNQLFEENPINASGVDAKAILSARLSKSRRLENLIAQLPGEKKNGLFGNLIALSLGLTPNFKSNFDLAEDAKLQLSKDTYDDDLDNLLAQIGDQYADLFLAAKNLSDAILLSDILRVNTEITKAPLSASMIKRYDEHHQDLTLLKALVRQQLPEKYKEIFFDQSKNGYAGYIDGGASQEEFYKFIKPILEKMDGTEELLVKLNREDLLRKQRTFDNGSIPHQIHLGELHAILRRQEDFYPFLKDNREKIEKILTFRIPYYVGPLARGNSRFAWMTRKSEETITPWNFEEVVDKGASAQSFIERMTNFDKNLPNEKVLPKHSLLYEYFTVYNELTKVKYVTEGMRKPAFLSGEQKKAIVDLLFKTNRKVTVKQLKEDYFKKIECFDSVEISGVEDRFNASLGTYHDLLKIIKDKDFLDNEENEDILEDIVLTLTLFEDREMIEERLKTYAHLFDDKVMKQLKRRRYTGWGRLSRKLINGIRDKQSGKTILDFLKSDGFANRNFMQLIHDDSLTFKEDIQKAQVSGQGDSLHEHIANLAGSPAIKKGILQTVKVVDELVKVMGRHKPENIVIEMARENQTTQKGQKNSRERMKRIEEGIKELGSQILKEHPVENTQLQNEKLYLYYLQNGRDMYVDQELDINRLSDYDVDHIVPQSFLKDDSIDNKVLTRSDKARGKSDNVPSEEVVKKMKNYWRQLLNAKLITQRKFDNLTKAERGGLSELDKAGFIKRQLVETRQITKHVAQILDSRMNTKYDENDKLIREVKVITLKSKLVSDFRKDFQFYKVREINNYHHAHDAYLNAVVGTALIKKYPKLESEFVYGDYKVYDVRKMIAKSEQEIGKATAKYFFYSNIMNFFKTEITLANGEIRKRPLIETNGETGEIVWDKGRDFATVRKVLSMPQVNIVKKTEVQTGGFSKESILPKRNSDKLIARKKDWDPKKYGGFDSPTVAYSVLVVAKVEKGKSKKLKSVKELLGITIMERSSFEKNPIDFLEAKGYKEVKKDLIIKLPKYSLFELENGRKRMLASAGELQKGNELALPSKYVNFLYLASHYEKLKGSPEDNEQKQLFVEQHKHYLDEIIEQISEFSKRVILADANLDKVLSAYNKHRDKPIREQAENIIHLFTLTNLGAPAAFKYFDTTIDRKRYTSTKEVLDATLIHQSITGLYETRIDLSQLGGDGGGGGGGGGGGGTAPLEEEYRLFLEAPIQNVTLLEQWKREIPKVWAEINPPGLASTQAPIHVQLLSTALPVRVRQYPITLEAKRSLRETIRKFRAAGILRPVHSPWNTPLLPVRKSGTSEYRMVQDLREVNKRVETIHPTVPNPYTLLSLLPPDRIWYSVLDLKDAFFCIPLAPESQLIFAFEWADAEEGESGQLTWTRLPQGFKNSPTLFNEALNRDLQGFRLDHPSVSLLQYVDDLLIAADTQAACLSATRDLLMTLAELGYRVSGKKAQLCQEEVTYLGFKIHKGSRSLSNSRTQAILQIPVPKTKRQVREFLGKIGYCRLFIPGFAELAQPLYAATRPGNDPLVWGEKEEEAFQSLKLALTQPPALALPSLDKPFQLFVEETSGAAKGVLTQALGPWKRPVAYLSKRLDPVAAGWPRCLRAIAAAALLTREASKLTFGQDIEITSSHNLESLLRSPPDKWLTNARITQYQVLLLDPPRVRFKQTAALNPATLLPETDDTLPIHHCLDTLDSLTSTRPDLTDQPLAQAEATLFTDGSSYIRDGKRYAGAAVVTLDSVIWAEPLPIGTSAQKAELIALTKALEWSKDKSVNIYTDSRYAFATLHVHGMIYRERGWLTAGGKAIKNAPEILALLTAVWLPKRVAVMHCKGHQKDDAPTSTGNRRADEVAREVAIRPLSTQATISAGKRTADGSEFEKRTADGSEFESPKKKAKVE

SEQ ID NO: 6276 - protein, 2099 aa, synthetic construct
MPAAKRVKLDGGDKKYSIGLDIGTNSVGWAVITDEYKVPSKKFKVLGNTDRHSIKKNLIGALLFDSGETAEATRLKRTARRRYTRRKNRICYLQEIFSNEMAKVDDSFFHRLEESFLVEEDKKHERHPIFGNIVDEVAYHEKYPTIYHLRKKLVDSTDKADLRLIYLALAHMIKFRGHFLIEGDLNPDNSDVDKLFIQLVQTYNQLFEENPINASGVDAKAILSARLSKSRRLENLIAQLPGEKKNGLFGNLIALSLGLTPNFKSNFDLAEDAKLQLSKDTYDDDLDNLLAQIGDQYADLFLAAKNLSDAILLSDILRVNTEITKAPLSASMIKRYDEHHQDLTLLKALVRQQLPEKYKEIFFDQSKNGYAGYIDGGASQEEFYKFIKPILEKMDGTEELLVKLNREDLLRKQRTFDNGSIPHQIHLGELHAILRRQEDFYPFLKDNREKIEKILTFRIPYYVGPLARGNSRFAWMTRKSEETITPWNFEEVVDKGASAQSFIERMTNFDKNLPNEKVLPKHSLLYEYFTVYNELTKVKYVTEGMRKPAFLSGEQKKAIVDLLFKTNRKVTVKQLKEDYFKKIECFDSVEISGVEDRFNASLGTYHDLLKIIKDKDFLDNEENEDILEDIVLTLTLFEDREMIEERLKTYAHLFDDKVMKQLKRRRYTGWGRLSRKLINGIRDKQSGKTILDFLKSDGFANRNFMQLIHDDSLTFKEDIQKAQVSGQGDSLHEHIANLAGSPAIKKGILQTVKVVDELVKVMGRHKPENIVIEMARENQTTQKGQKNSRERMKRIEEGIKELGSQILKEHPVENTQLQNEKLYLYYLQNGRDMYVDQELDINRLSDYDVDHIVPQSFLKDDSIDNKVLTRSDKARGKSDNVPSEEVVKKMKNYWRQLLNAKLITQRKFDNLTKAERGGLSELDKAGFIKRQLVETRQITKHVAQILDSRMNTKYDENDKLIREVKVITLKSKLVSDFRKDFQFYKVREINNYHHAHDAYLNAVVGTALIKKYPKLESEFVYGDYKVYDVRKMIAKSEQEIGKATAKYFFYSNIMNFFKTEITLANGEIRKRPLIETNGETGEIVWDKGRDFATVRKVLSMPQVNIVKKTEVQTGGFSKESILPKRNSDKLIARKKDWDPKKYGGFDSPTVAYSVLVVAKVEKGKSKKLKSVKELLGITIMERSSFEKNPIDFLEAKGYKEVKKDLIIKLPKYSLFELENGRKRMLASAGELQKGNELALPSKYVNFLYLASHYEKLKGSPEDNEQKQLFVEQHKHYLDEIIEQISEFSKRVILADANLDKVLSAYNKHRDKPIREQAENIIHLFTLTNLGAPAAFKYFDTTIDRKRYTSTKEVLDATLIHQSITGLYETRIDLSQLGGDGGGGGGGGGGGGTVSLQDEHRLFDIPVTTSLPDVWLQDFPQAWAETGGLGRAKCQAPIIIDLKPTAVPVSIKQYPMSLEAHMGIRQHIIKFLELGVLRPCRSPWNTPLLPVKKPGTQDYRPVQDLREINKRTVDIHPTVPNPYNLLSTLKPDYSWYTVLDLKDAFFCLPLAPQSQELFAFEWKDPERGISGQLTWTRLPQGFKNSPTLFDEALHRDLTDFRTQHPEVTLLQYVDDLLLAAPTKKACTQGTRHLLQELGEKGYRASAKKAQICQTKVTYLGYILSEGKRWLTPGRIETVARIPPPRNPREVREFLGTAGFCRLWIPGFAELAAPLYALTKESTPFTWQTEHQLAFEALKKALLSAPALGLPDTSKPFTLFLDERQGIAKGVLTQKLGPWKRPVAYLSKKLDPVAAGWPPCLRIMAATAMLVKDSAKLTLGQPLTVITPHTLEAIVRQPPDRWITNARLTHYQALLLDTDRVQFGPPVTLNPATLLPVPENQPSPHDCRQVLAETHGTREDLKDQELPDADHTWYTDGSSYLDSGTRRAGAAVVDGHNTIWAQSLPPGTSAQKAELIALTKALELSKGKKANIYTDSRYAFATAHTHGSIYERRGLLTSEGKEIKNKAEIIALLKALFLPQEVAIIHCPGHQKGQDPVAVGNRQADRVARQAAMAEVLTLATEPDNTSHITAGKRTADGSEFEKRTADGSEFESPKKKAKVE

SEQ ID NO: 6277 - protein, 2091 aa, synthetic construct
MPAAKRVKLDGGDKKYSIGLDIGTNSVGWAVITDEYKVPSKKFKVLGNTDRHSIKKNLIGALLFDSGETAEATRLKRTARRRYTRRKNRICYLQEIFSNEMAKVDDSFFHRLEESFLVEEDKKHERHPIFGNIVDEVAYHEKYPTIYHLRKKLVDSTDKADLRLIYLALAHMIKFRGHFLIEGDLNPDNSDVDKLFIQLVQTYNQLFEENPINASGVDAKAILSARLSKSRRLENLIAQLPGEKKNGLFGNLIALSLGLTPNFKSNFDLAEDAKLQLSKDTYDDDLDNLLAQIGDQYADLFLAAKNLSDAILLSDILRVNTEITKAPLSASMIKRYDEHHQDLTLLKALVRQQLPEKYKEIFFDQSKNGYAGYIDGGASQEEFYKFIKPILEKMDGTEELLVKLNREDLLRKQRTFDNGSIPHQIHLGELHAILRRQEDFYPFLKDNREKIEKILTFRIPYYVGPLARGNSRFAWMTRKSEETITPWNFEEVVDKGASAQSFIERMTNFDKNLPNEKVLPKHSLLYEYFTVYNELTKVKYVTEGMRKPAFLSGEQKKAIVDLLFKTNRKVTVKQLKEDYFKKIECFDSVEISGVEDRFNASLGTYHDLLKIIKDKDFLDNEENEDILEDIVLTLTLFEDREMIEERLKTYAHLFDDKVMKQLKRRRYTGWGRLSRKLINGIRDKQSGKTILDFLKSDGFANRNFMQLIHDDSLTFKEDIQKAQVSGQGDSLHEHIANLAGSPAIKKGILQTVKVVDELVKVMGRHKPENIVIEMARENQTTQKGQKNSRERMKRIEEGIKELGSQILKEHPVENTQLQNEKLYLYYLQNGRDMYVDQELDINRLSDYDVDHIVPQSFLKDDSIDNKVLTRSDKARGKSDNVPSEEVVKKMKNYWRQLLNAKLITQRKFDNLTKAERGGLSELDKAGFIKRQLVETRQITKHVAQILDSRMNTKYDENDKLIREVKVITLKSKLVSDFRKDFQFYKVREINNYHHAHDAYLNAVVGTALIKKYPKLESEFVYGDYKVYDVRKMIAKSEQEIGKATAKYFFYSNIMNFFKTEITLANGEIRKRPLIETNGETGEIVWDKGRDFATVRKVLSMPQVNIVKKTEVQTGGFSKESILPKRNSDKLIARKKDWDPKKYGGFDSPTVAYSVLVVAKVEKGKSKKLKSVKELLGITIMERSSFEKNPIDFLEAKGYKEVKKDLIIKLPKYSLFELENGRKRMLASAGELQKGNELALPSKYVNFLYLASHYEKLKGSPEDNEQKQLFVEQHKHYLDEIIEQISEFSKRVILADANLDKVLSAYNKHRDKPIREQAENIIHLFTLTNLGAPAAFKYFDTTIDRKRYTSTKEVLDATLIHQSITGLYETRIDLSQLGGDGGGGGGGGGGGGVLNLEEEYRLHEKPVPSSIDPSWLQLFPTVWAERAGMGLANQVPPVVVELRSGASPVAVRQYPMSKEAREGIRPHIQKFLDLGVLVPCRSPWNTPLLPVKKPGTNDYRPVQDLREINKRVQDIHPTVPNPYNLLSSLPPSYTWYSVLDLKDAFFCLRLHPNSQPLFAFEWKDPEKGNTGQLTWTRLPQGFKNSPTLFNEALHRDLAPFRALNPQVVLLQYVDDLLVAAPTYEDCKKGTQKLLQELSKLGYRVSAKKAQLCQREVTYLGYLLKEGKRWLTPARKATVMKIPVPTTPRQVREFLGTAGFCRLWIPGFASLAAPLYPLTKPSIPFIWTEEHQQAFDHIKKALLSAPALALPDLTKPFTLYIDERAGVARGVLTQTLGPWRRPVAYLSKKLDPVASGWPTCLKAVAAVALLLKDADKLTLGQNVTVIASHSLESIVRQPPDRWMTNARMTHYQSLLLNERVSFAPPAVLNPATLLPVESEATPVHRCSEILAEETGTRRDLEDQPLPGVPTWYTDGSSFITEGKRRAGAPIVDGKRTVWASSLPEGTSAQKAELVALTQALRLAEGKNINIYTDSRYAFATAHIHGAIYKQRGWLTSAGKDIKNKEEILALLEAIHLPRRVAIIHCPGHQRGSNPVATGNRRADEAAKQAALSTRVLAGTTKPAGKRTADGSEFEKRTADGSEFESPKKKAKVE

SEQ ID NO: 6278 - protein, 2124 aa, synthetic construct
MPAAKRVKLDGGDKKYSIGLDIGTNSVGWAVITDEYKVPSKKFKVLGNTDRHSIKKNLIGALLFDSGETAEATRLKRTARRRYTRRKNRICYLQEIFSNEMAKVDDSFFHRLEESFLVEEDKKHERHPIFGNIVDEVAYHEKYPTIYHLRKKLVDSTDKADLRLIYLALAHMIKFRGHFLIEGDLNPDNSDVDKLFIQLVQTYNQLFEENPINASGVDAKAILSARLSKSRRLENLIAQLPGEKKNGLFGNLIALSLGLTPNFKSNFDLAEDAKLQLSKDTYDDDLDNLLAQIGDQYADLFLAAKNLSDAILLSDILRVNTEITKAPLSASMIKRYDEHHQDLTLLKALVRQQLPEKYKEIFFDQSKNGYAGYIDGGASQEEFYKFIKPILEKMDGTEELLVKLNREDLLRKQRTFDNGSIPHQIHLGELHAILRRQEDFYPFLKDNREKIEKILTFRIPYYVGPLARGNSRFAWMTRKSEETITPWNFEEVVDKGASAQSFIERMTNFDKNLPNEKVLPKHSLLYEYFTVYNELTKVKYVTEGMRKPAFLSGEQKKAIVDLLFKTNRKVTVKQLKEDYFKKIECFDSVEISGVEDRFNASLGTYHDLLKIIKDKDFLDNEENEDILEDIVLTLTLFEDREMIEERLKTYAHLFDDKVMKQLKRRRYTGWGRLSRKLINGIRDKQSGKTILDFLKSDGFANRNFMQLIHDDSLTFKEDIQKAQVSGQGDSLHEHIANLAGSPAIKKGILQTVKVVDELVKVMGRHKPENIVIEMARENQTTQKGQKNSRERMKRIEEGIKELGSQILKEHPVENTQLQNEKLYLYYLQNGRDMYVDQELDINRLSDYDVDHIVPQSFLKDDSIDNKVLTRSDKARGKSDNVPSEEVVKKMKNYWRQLLNAKLITQRKFDNLTKAERGGLSELDKAGFIKRQLVETRQITKHVAQILDSRMNTKYDENDKLIREVKVITLKSKLVSDFRKDFQFYKVREINNYHHAHDAYLNAVVGTALIKKYPKLESEFVYGDYKVYDVRKMIAKSEQEIGKATAKYFFYSNIMNFFKTEITLANGEIRKRPLIETNGETGEIVWDKGRDFATVRKVLSMPQVNIVKKTEVQTGGFSKESILPKRNSDKLIARKKDWDPKKYGGFDSPTVAYSVLVVAKVEKGKSKKLKSVKELLGITIMERSSFEKNPIDFLEAKGYKEVKKDLIIKLPKYSLFELENGRKRMLASAGELQKGNELALPSKYVNFLYLASHYEKLKGSPEDNEQKQLFVEQHKHYLDEIIEQISEFSKRVILADANLDKVLSAYNKHRDKPIREQAENIIHLFTLTNLGAPAAFKYFDTTIDRKRYTSTKEVLDATLIHQSITGLYETRIDLSQLGGDGGGGGGGGGGGGLLGRDLLTKLKAQIQFSTEGPQVTWEDRPAMCLVLNLEEEYRLHEKPVPPSIDPSWLQLFPMVWAEKAGMGLANQVPPVVVELKSDASPVAVRQYPMSKEAREGIRPHIQRFLDLGILVPCQSPWNTPLLPVKKPGTNDYRPVQDLREVNKRVQDIHPTVPNPYNLLSSLPPSHTWYSVLDLKDAFFCLKLHPNSQPLFAFEWRDPEKGNTGQLTWTRLPQGFKNSPTLFNEALHRDLASFRALNPQVVMLQYVDDLLVAAPTYRDCKEGTRRLLQELSKLGYRVSAKKAQLCREEVTYLGYLLKGGKRWLTPARKATVMKIPTPTTPRQVREFLGTAGFCRLWIPGFASLAAPLYPLTRPKVPFTWTEAHQEAFGRIKEALLSAPALALPDLTKPFALYVDEKEGVARGVLTQTLGPWRRPVAYLSKKLDPVASGWPTCLKAIAAVALLLKDADKLTLGQNVLVIAPHNLESIVRQPPDRWMTNARMTHYQSLLLNERVSFAPPAILNPATLLPVESDDTPIHICSEILAEETGTRPDLRDQPLPGVPAWYTDGSSFIMDGRRQAGAAIVDNKRTVWASNLPEGTSAQKAELIALTQALRLAEGKSINIYTDSRYAFATAHVHGAIYKQRGWLTSAGKDIKNKEEILALLEAIHLPKRVAIIHCPGHQRGTDPVATGNRKADEAAKQAAQSTRILTETTKNAGKRTADGSEFEKRTADGSEFESPKKKAKVE

SEQ ID NO: 6279 - protein, 2124 aa, synthetic construct
MPAAKRVKLDGGDKKYSIGLDIGTNSVGWAVITDEYKVPSKKFKVLGNTDRHSIKKNLIGALLFDSGETAEATRLKRTARRRYTRRKNRICYLQEIFSNEMAKVDDSFFHRLEESFLVEEDKKHERHPIFGNIVDEVAYHEKYPTIYHLRKKLVDSTDKADLRLIYLALAHMIKFRGHFLIEGDLNPDNSDVDKLFIQLVQTYNQLFEENPINASGVDAKAILSARLSKSRRLENLIAQLPGEKKNGLFGNLIALSLGLTPNFKSNFDLAEDAKLQLSKDTYDDDLDNLLAQIGDQYADLFLAAKNLSDAILLSDILRVNTEITKAPLSASMIKRYDEHHQDLTLLKALVRQQLPEKYKEIFFDQSKNGYAGYIDGGASQEEFYKFIKPILEKMDGTEELLVKLNREDLLRKQRTFDNGSIPHQIHLGELHAILRRQEDFYPFLKDNREKIEKILTFRIPYYVGPLARGNSRFAWMTRKSEETITPWNFEEVVDKGASAQSFIERMTNFDKNLPNEKVLPKHSLLYEYFTVYNELTKVKYVTEGMRKPAFLSGEQKKAIVDLLFKTNRKVTVKQLKEDYFKKIECFDSVEISGVEDRFNASLGTYHDLLKIIKDKDFLDNEENEDILEDIVLTLTLFEDREMIEERLKTYAHLFDDKVMKQLKRRRYTGWGRLSRKLINGIRDKQSGKTILDFLKSDGFANRNFMQLIHDDSLTFKEDIQKAQVSGQGDSLHEHIANLAGSPAIKKGILQTVKVVDELVKVMGRHKPENIVIEMARENQTTQKGQKNSRERMKRIEEGIKELGSQILKEHPVENTQLQNEKLYLYYLQNGRDMYVDQELDINRLSDYDVDHIVPQSFLKDDSIDNKVLTRSDKARGKSDNVPSEEVVKKMKNYWRQLLNAKLITQRKFDNLTKAERGGLSELDKAGFIKRQLVETRQITKHVAQILDSRMNTKYDENDKLIREVKVITLKSKLVSDFRKDFQFYKVREINNYHHAHDAYLNAVVGTALIKKYPKLESEFVYGDYKVYDVRKMIAKSEQEIGKATAKYFFYSNIMNFFKTEITLANGEIRKRPLIETNGETGEIVWDKGRDFATVRKVLSMPQVNIVKKTEVQTGGFSKESILPKRNSDKLIARKKDWDPKKYGGFDSPTVAYSVLVVAKVEKGKSKKLKSVKELLGITIMERSSFEKNPIDFLEAKGYKEVKKDLIIKLPKYSLFELENGRKRMLASAGELQKGNELALPSKYVNFLYLASHYEKLKGSPEDNEQKQLFVEQHKHYLDEIIEQISEFSKRVILADANLDKVLSAYNKHRDKPIREQAENIIHLFTLTNLGAPAAFKYFDTTIDRKRYTSTKEVLDATLIHQSITGLYETRIDLSQLGGDGGGGGGGGGGGGLLGRDLLTKLKAQIQFSTEGPQVTWEDRPAMCLVLNLEEEYRLHEKPVPPSIDPSWLQLFPMVWAEKAGMGLANQVPPVVVELKSDASPVAVRQYPMSKEAREGIRPHIQRFLDLGILVPCQSPWNTPLLPVKKPGTNDYRPVQDLREVNKRVQDIHPTVPNPYNLLSSLPPSHTWYSVLDLKDAFFCLKLHPNSQPLFAFEWRDPEKGNTGQLTWTRLPQGFKNSPTLFNEALHRDLASFRALNPQVVMLQYVDDLLVAAPTYRDCKEGTRRLLQELSKLGYRVSAKKAQLCREEVTYLGYLLKGGKRWLTPARKATVMKIPTPTTPRQVREFLGKAGFCRLFIPGFASLAAPLYPLTRPKVPFTWTEAHQEAFGRIKEALLSAPALALPDLTKPFALYVDEKEGVARGVLTQTLGPWRRPVAYLSKKLDPVASGWPTCLKAIAAVALLLKDADKLTLGQNVLVIAPHNLESIVRQPPDRWMTNARMTHYQSLLLNERVSFAPPAILNPATLLPVESDDTPIHICSEILAEETGTRPDLRDQPLPGVPAWYTDGSSFIMDGRRQAGAAIVDNKRTVWASNLPEGTSAQKAELIALTQALRLAEGKSINIYTDSRYAFATAHVHGAIYKQRGWLTSAGKDIKNKEEILALLEAIHLPKRVAIIHCPGHQRGTDPVATGNRKADEAAKQAAQSTRILTETTKNAGKRTADGSEFEKRTADGSEFESPKKKAKVE

SEQ ID NO: 6280 - protein, 2093 aa, synthetic construct
MPAAKRVKLDGGDKKYSIGLDIGTNSVGWAVITDEYKVPSKKFKVLGNTDRHSIKKNLIGALLFDSGETAEATRLKRTARRRYTRRKNRICYLQEIFSNEMAKVDDSFFHRLEESFLVEEDKKHERHPIFGNIVDEVAYHEKYPTIYHLRKKLVDSTDKADLRLIYLALAHMIKFRGHFLIEGDLNPDNSDVDKLFIQLVQTYNQLFEENPINASGVDAKAILSARLSKSRRLENLIAQLPGEKKNGLFGNLIALSLGLTPNFKSNFDLAEDAKLQLSKDTYDDDLDNLLAQIGDQYADLFLAAKNLSDAILLSDILRVNTEITKAPLSASMIKRYDEHHQDLTLLKALVRQQLPEKYKEIFFDQSKNGYAGYIDGGASQEEFYKFIKPILEKMDGTEELLVKLNREDLLRKQRTFDNGSIPHQIHLGELHAILRRQEDFYPFLKDNREKIEKILTFRIPYYVGPLARGNSRFAWMTRKSEETITPWNFEEVVDKGASAQSFIERMTNFDKNLPNEKVLPKHSLLYEYFTVYNELTKVKYVTEGMRKPAFLSGEQKKAIVDLLFKTNRKVTVKQLKEDYFKKIECFDSVEISGVEDRFNASLGTYHDLLKIIKDKDFLDNEENEDILEDIVLTLTLFEDREMIEERLKTYAHLFDDKVMKQLKRRRYTGWGRLSRKLINGIRDKQSGKTILDFLKSDGFANRNFMQLIHDDSLTFKEDIQKAQVSGQGDSLHEHIANLAGSPAIKKGILQTVKVVDELVKVMGRHKPENIVIEMARENQTTQKGQKNSRERMKRIEEGIKELGSQILKEHPVENTQLQNEKLYLYYLQNGRDMYVDQELDINRLSDYDVDHIVPQSFLKDDSIDNKVLTRSDKARGKSDNVPSEEVVKKMKNYWRQLLNAKLITQRKFDNLTKAERGGLSELDKAGFIKRQLVETRQITKHVAQILDSRMNTKYDENDKLIREVKVITLKSKLVSDFRKDFQFYKVREINNYHHAHDAYLNAVVGTALIKKYPKLESEFVYGDYKVYDVRKMIAKSEQEIGKATAKYFFYSNIMNFFKTEITLANGEIRKRPLIETNGETGEIVWDKGRDFATVRKVLSMPQVNIVKKTEVQTGGFSKESILPKRNSDKLIARKKDWDPKKYGGFDSPTVAYSVLVVAKVEKGKSKKLKSVKELLGITIMERSSFEKNPIDFLEAKGYKEVKKDLIIKLPKYSLFELENGRKRMLASAGELQKGNELALPSKYVNFLYLASHYEKLKGSPEDNEQKQLFVEQHKHYLDEIIEQISEFSKRVILADANLDKVLSAYNKHRDKPIREQAENIIHLFTLTNLGAPAAFKYFDTTIDRKRYTSTKEVLDATLIHQSITGLYETRIDLSQLGGDGGGGGGGGGGGGTLNLEDEYRLYETSAEPEVSPGSTWLSDFPQAWAETGGMGLAVRQAPLIIPLKATSTPVSIKQYPMSQEAKLGIKPHIQRLLDQGILVPCQSPWNTPLLPVKKPGTNDYRPVQDLREVNKRVEDIHPTVPNPYNLLSGLPPSHRWYTVLDLKDAFFCLRLHPTSQPLFAFEWRDPGMGISGQLTWTRLPQGFKNSPTLFNEALHRDLADFRIQHPDLILLQYVDDILLAATSELDCQQGTRALLLTLGNLGYRASAKKAQLCQKQVKYLGYLLKEGQRWLTEARKETVMGQPTPKTPRQLREFLGKAGFCRLFIPGFAEMAAPLYPLTKPGTLFNWGPDQQKAYQEIKQALLTAPALGLPDLTKPFELFVDEKQGYAKGVLTQKLGPWRRPVAYLSKKLDPVAAGWPPCLRMVAAIAVLRKDAGKLTMGQPLVILAPHAVEALVKQPPDRWLSNARMTHYQAMLLDTDRVQFGPVVALNPATLLPLPEEGAPHDCLEILAETHGTRPDLTDQPIPDADHTWYTDGSSFLQEGQRKAGAAVTTETEVIWARALPAGTSAQRAELIALTQALKMAEGKRLNVYTDSRYAFATAHIHGEIYRRRGWLTSEGREIKNKSEILALLKALFLPKRLSIIHCLGHQKGDSAEARGNRLADQAAREAAIKTPPDTSTLLAGKRTADGSEFEKRTADGSEFESPKKKAKVE

SEQ ID NO: 6281 - protein, 2093 aa, synthetic construct
MPAAKRVKLDGGDKKYSIGLDIGTNSVGWAVITDEYKVPSKKFKVLGNTDRHSIKKNLIGALLFDSGETAEATRLKRTARRRYTRRKNRICYLQEIFSNEMAKVDDSFFHRLEESFLVEEDKKHERHPIFGNIVDEVAYHEKYPTIYHLRKKLVDSTDKADLRLIYLALAHMIKFRGHFLIEGDLNPDNSDVDKLFIQLVQTYNQLFEENPINASGVDAKAILSARLSKSRRLENLIAQLPGEKKNGLFGNLIALSLGLTPNFKSNFDLAEDAKLQLSKDTYDDDLDNLLAQIGDQYADLFLAAKNLSDAILLSDILRVNTEITKAPLSASMIKRYDEHHQDLTLLKALVRQQLPEKYKEIFFDQSKNGYAGYIDGGASQEEFYKFIKPILEKMDGTEELLVKLNREDLLRKQRTFDNGSIPHQIHLGELHAILRRQEDFYPFLKDNREKIEKILTFRIPYYVGPLARGNSRFAWMTRKSEETITPWNFEEVVDKGASAQSFIERMTNFDKNLPNEKVLPKHSLLYEYFTVYNELTKVKYVTEGMRKPAFLSGEQKKAIVDLLFKTNRKVTVKQLKEDYFKKIECFDSVEISGVEDRFNASLGTYHDLLKIIKDKDFLDNEENEDILEDIVLTLTLFEDREMIEERLKTYAHLFDDKVMKQLKRRRYTGWGRLSRKLINGIRDKQSGKTILDFLKSDGFANRNFMQLIHDDSLTFKEDIQKAQVSGQGDSLHEHIANLAGSPAIKKGILQTVKVVDELVKVMGRHKPENIVIEMARENQTTQKGQKNSRERMKRIEEGIKELGSQILKEHPVENTQLQNEKLYLYYLQNGRDMYVDQELDINRLSDYDVDHIVPQSFLKDDSIDNKVLTRSDKARGKSDNVPSEEVVKKMKNYWRQLLNAKLITQRKFDNLTKAERGGLSELDKAGFIKRQLVETRQITKHVAQILDSRMNTKYDENDKLIREVKVITLKSKLVSDFRKDFQFYKVREINNYHHAHDAYLNAVVGTALIKKYPKLESEFVYGDYKVYDVRKMIAKSEQEIGKATAKYFFYSNIMNFFKTEITLANGEIRKRPLIETNGETGEIVWDKGRDFATVRKVLSMPQVNIVKKTEVQTGGFSKESILPKRNSDKLIARKKDWDPKKYGGFDSPTVAYSVLVVAKVEKGKSKKLKSVKELLGITIMERSSFEKNPIDFLEAKGYKEVKKDLIIKLPKYSLFELENGRKRMLASAGELQKGNELALPSKYVNFLYLASHYEKLKGSPEDNEQKQLFVEQHKHYLDEIIEQISEFSKRVILADANLDKVLSAYNKHRDKPIREQAENIIHLFTLTNLGAPAAFKYFDTTIDRKRYTSTKEVLDATLIHQSITGLYETRIDLSQLGGDGGGGGGGGGGGGLGIEDEYRLHETSTEPDVSLGSTWLSDFPQAWAETGGMGLAVRQAPLIIPLKATSTPVSIQQYPMSHEARLGIKPHIQRLLDQGILVPCQSPWNTPLLPVKKPGTNDYRPVQDLREVNKRVEDIHPTVPNPYNLLSGLPPSHQWYTVLDLKDAFFCLRLHPTSQPLFAFEWRDPGMGISGQLTWTRLPQGFKNSPTLFNEALHRDLADFRIQHPDLILLQYVDDILLAATSELDCQQGTRALLQTLGDLGYRASAKKAQICQKQVKYLGYLLREGQRWLTEARKETVMGQPVPKTPRQLREFLGKAGFCRLFIPGFAEMAAPLYPLTKPGTLFSWGPDQQKAYQEIKQALLTAPALGLPDLTKPFELFVDEKQGYAKGVLTQKLGPWRRPVAYLSKKLDPVAAGWPPCLRMVAAIAVLTKDAGKLTMGQPLVILAPHAVEALVKQPPDRWLSNARMTHYQAMLLDTDRVQFGPVVALNPATLLPLPEEGAPHDCLEILAETHGTRPDLTDQPIPDADHTWYTDGSSFLQEGQRKAGAAVTTETEVIWAGALPAGTSAQRAELIALTQALKMAEGKRLNVYTDSRYAFATAHIHGEIYRRRGWLTSEGREIKNKSEILALLKALFLPKRLSIIHCLGHQKGDSAEARGNRLADQAAREAAIKTPPDTSTLLIAGKRTADGSEFEKRTADGSEFESPKKKAKVE

SEQ ID NO: 6282 - protein, 2093 aa, synthetic construct; identical to SEQ ID NO: 6281

SEQ ID NO: 6283 - protein, 2093 aa, synthetic construct
MPAAKRVKLDGGDKKYSIGLDIGTNSVGWAVITDEYKVPSKKFKVLGNTDRHSIKKNLIGALLFDSGETAEATRLKRTARRRYTRRKNRICYLQEIFSNEMAKVDDSFFHRLEESFLVEEDKKHERHPIFGNIVDEVAYHEKYPTIYHLRKKLVDSTDKADLRLIYLALAHMIKFRGHFLIEGDLNPDNSDVDKLFIQLVQTYNQLFEENPINASGVDAKAILSARLSKSRRLENLIAQLPGEKKNGLFGNLIALSLGLTPNFKSNFDLAEDAKLQLSKDTYDDDLDNLLAQIGDQYADLFLAAKNLSDAILLSDILRVNTEITKAPLSASMIKRYDEHHQDLTLLKALVRQQLPEKYKEIFFDQSKNGYAGYIDGGASQEEFYKFIKPILEKMDGTEELLVKLNREDLLRKQRTFDNGSIPHQIHLGELHAILRRQEDFYPFLKDNREKIEKILTFRIPYYVGPLARGNSRFAWMTRKSEETITPWNFEEVVDKGASAQSFIERMTNFDKNLPNEKVLPKHSLLYEYFTVYNELTKVKYVTEGMRKPAFLSGEQKKAIVDLLFKTNRKVTVKQLKEDYFKKIECFDSVEISGVEDRFNASLGTYHDLLKIIKDKDFLDNEENEDILEDIVLTLTLFEDREMIEERLKTYAHLFDDKVMKQLKRRRYTGWGRLSRKLINGIRDKQSGKTILDFLKSDGFANRNFMQLIHDDSLTFKEDIQKAQVSGQGDSLHEHIANLAGSPAIKKGILQTVKVVDELVKVMGRHKPENIVIEMARENQTTQKGQKNSRERMKRIEEGIKELGSQILKEHPVENTQLQNEKLYLYYLQNGRDMYVDQELDINRLSDYDVDHIVPQSFLKDDSIDNKVLTRSDKARGKSDNVPSEEVVKKMKNYWRQLLNAKLITQRKFDNLTKAERGGLSELDKAGFIKRQLVETRQITKHVAQILDSRMNTKYDENDKLIREVKVITLKSKLVSDFRKDFQFYKVREINNYHHAHDAYLNAVVGTALIKKYPKLESEFVYGDYKVYDVRKMIAKSEQEIGKATAKYFFYSNIMNFFKTEITLANGEIRKRPLIETNGETGEIVWDKGRDFATVRKVLSMPQVNIVKKTEVQTGGFSKESILPKRNSDKLIARKKDWDPKKYGGFDSPTVAYSVLVVAKVEKGKSKKLKSVKELLGITIMERSSFEKNPIDFLEAKGYKEVKKDLIIKLPKYSLFELENGRKRMLASAGELQKGNELALPSKYVNFLYLASHYEKLKGSPEDNEQKQLFVEQHKHYLDEIIEQISEFSKRVILADANLDKVLSAYNKHRDKPIREQAENIIHLFTLTNLGAPAAFKYFDTTIDRKRYTSTKEVLDATLIHQSITGLYETRIDLSQLGGDGGGGGGGGGGGGTLNIEDEYRLHETSKEPDVSLGSTWLSDFPQAWAETGGMGLAVRQAPLIIPLKATSTPVSIKQYPMSQEARLGIKPHIQRLLDQGILVPCQSPWNTPLLPVKKPGTNDYRPVQDLREVNKRVEDIHPTVPNPYNLLSGLPPSHQWYTVLDLKDAFFCLRLHPTSQPLFAFEWRDPEMGISGQLTWTRLPQGFKNSPTLFNEALHRDLAGFRIQHPDLILLQYVDDLLLAATSELDCQQGTRALLQTLGDLGYRASAKKAQICQKQVKYLGYLLKEGQRWLTEARKETVMGQPIPKTPRQLREFLGTAGFCRLWIPGFAEMAAPLYPLTKPGTLFNWGPDQQKAFQEIKQALLTAPALGLPDLTKPFELFVDEKQGYAKGVLTQKLGPWRRPVAYLSKKLDPVAAGWPPCLRMVAAIAVLTKDAGKLTMGQPLVILAPHAVEALVKQPPDRWLSNARMTHYQALLLDTDRVQFGPVVALNPATLLPLPEEGLQHDCLDILAEAHGTRSDLMDQPLPDADHTWYTDGSSFLQEGQRKAGAAVTTETEVIWARALPAGTSAQRAELIALTQALKMAEGKKLNVYTDSRYAFATAHIHGEIYRRRGWLTSEGKEIKNKDEILALLKALFLPKRLSIIHCPGHQKGNSAEARGNRMADQAAREVATRETPETSTLLAGKRTADGSEFEKRTADGSEFESPKKKAKVE

SEQ ID NO: 6284 - protein, 2093 aa, synthetic construct
MPAAKRVKLDGGDKKYSIGLDIGTNSVGWAVITDEYKVPSKKFKVLGNTDRHSIKKNLIGALLFDSGETAEATRLKRTARRRYTRRKNRICYLQEIFSNEMAKVDDSFFHRLEESFLVEEDKKHERHPIFGNIVDEVAYHEKYPTIYHLRKKLVDSTDKADLRLIYLALAHMIKFRGHFLIEGDLNPDNSDVDKLFIQLVQTYNQLFEENPINASGVDAKAILSARLSKSRRLENLIAQLPGEKKNGLFGNLIALSLGLTPNFKSNFDLAEDAKLQLSKDTYDDDLDNLLAQIGDQYADLFLAAKNLSDAILLSDILRVNTEITKAPLSASMIKRYDEHHQDLTLLKALVRQQLPEKYKEIFFDQSKNGYAGYIDGGASQEEFYKFIKPILEKMDGTEELLVKLNREDLLRKQRTFDNGSIPHQIHLGELHAILRRQEDFYPFLKDNREKIEKILTFRIPYYVGPLARGNSRFAWMTRKSEETITPWNFEEVVDKGASAQSFIERMTNFDKNLPNEKVLPKHSLLYEYFTVYNELTKVKYVTEGMRKPAFLSGEQKKAIVDLLFKTNRKVTVKQLKEDYFKKIECFDSVEISGVEDRFNASLGTYHDLLKIIKDKDFLDNEENEDILEDIVLTLTLFEDREMIEERLKTYAHLFDDKVMKQLKRRRYTGWGRLSRKLINGIRDKQSGKTILDFLKSDGFANRNFMQLIHDDSLTFKEDIQKAQVSGQGDSLHEHIANLAGSPAIKKGILQTVKVVDELVKVMGRHKPENIVIEMARENQTTQKGQKNSRERMKRIEEGIKELGSQILKEHPVENTQLQNEKLYLYYLQNGRDMYVDQELDINRLSDYDVDHIVPQSFLKDDSIDNKVLTRSDKARGKSDNVPSEEVVKKMKNYWRQLLNAKLITQRKFDNLTKAERGGLSELDKAGFIKRQLVETRQITKHVAQILDSRMNTKYDENDKLIREVKVITLKSKLVSDFRKDFQFYKVREINNYHHAHDAYLNAVVGTALIKKYPKLESEFVYGDYKVYDVRKMIAKSEQEIGKATAKYFFYSNIMNFFKTEITLANGEIRKRPLIETNGETGEIVWDKGRDFATVRKVLSMPQVNIVKKTEVQTGGFSKESILPKRNSDKLIARKKDWDPKKYGGFDSPTVAYSVLVVAKVEKGKSKKLKSVKELLGITIMERSSFEKNPIDFLEAKGYKEVKKDLIIKLPKYSLFELENGRKRMLASAGELQKGNELALPSKYVNFLYLASHYEKLKGSPEDNEQKQLFVEQHKHYLDEIIEQISEFSKRVILADANLDKVLSAYNKHRDKPIREQAENIIHLFTLTNLGAPAAFKYFDTTIDRKRYTSTKEVLDATLIHQSITGLYETRIDLSQLGGDGGGGGGGGGGGGTLNIEDEHRLHETSKEPDVSLGSTWLSDFPQAWAETGGMGLAVRQAPLIIPLKATSTPVSIKQYPMSQEARLGIKPHIQRLLDQGILVPCQSPWNTPLLPVKKPGTNDYRPVQDLREVNKRVEDIHPTVPNPYNLLSGLPPSHQWYTVLDLKDAFFCLRLHPTSQPLFAFEWRDPEMGISGQLTWTRLPQGFKNSPTLFNEALHRDLADFRIQHPDLILLQYVDDLLLAATSELDCQQGTRALLQTLGNLGYRASAKKAQICQKQVKYLGYLLKEGQRWLTEARKETVMGQPTPKTPRQLREFLGKAGFCRLFIPGFAEMAAPLYPLTKPGTLFNWGPDQQKAYQEIKQALLTAPALGLPDLTKPFELFVDEKQGYAKGVLTQKLGPWRRPVAYLSKKLDPVAAGWPPCLRMVAAIAVLTKDAGKLTMGQPLVILAPHAVEALVKQPPDRWLSNARMTHYQALLLDTDRVQFGPVVALNPATLLPLPEEGLQHNCLDILAEAHGTRPDLTDQPLPDADHTWYTDGSSLLQEGQRKAGAAVTTETEVIWAKALPAGTSAQRAELIALTQALKMAEGKKLNVYTDSRYAFATAHIHGEIYRRRGWLTSEGKEIKNKDEILALLKALFLPKRLSIIHCPGHQKGHSAEARGNRMADQAARKAAITETPDTSTLLAGKRTADGSEFEKRTADGSEFESPKKKAKVE

SEQ ID NO: 6285 - protein, 2093 aa, synthetic construct; identical to SEQ ID NO: 6284

SEQ ID NO: 6286 - protein, 2091 aa, synthetic construct
MPAAKRVKLDGGDKKYSIGLDIGTNSVGWAVITDEYKVPSKKFKVLGNTDRHSIKKNLIGALLFDSGETAEATRLKRTARRRYTRRKNRICYLQEIFSNEMAKVDDSFFHRLEESFLVEEDKKHERHPIFGNIVDEVAYHEKYPTIYHLRKKLVDSTDKADLRLIYLALAHMIKFRGHFLIEGDLNPDNSDVDKLFIQLVQTYNQLFEENPINASGVDAKAILSARLSKSRRLENLIAQLPGEKKNGLFGNLIALSLGLTPNFKSNFDLAEDAKLQLSKDTYDDDLDNLLAQIGDQYADLFLAAKNLSDAILLSDILRVNTEITKAPLSASMIKRYDEHHQDLTLLKALVRQQLPEKYKEIFFDQSKNGYAGYIDGGASQEEFYKFIKPILEKMDGTEELLVKLNREDLLRKQRTFDNGSIPHQIHLGELHAILRRQEDFYPFLKDNREKIEKILTFRIPYYVGPLARGNSRFAWMTRKSEETITPWNFEEVVDKGASAQSFIERMTNFDKNLPNEKVLPKHSLLYEYFTVYNELTKVKYVTEGMRKPAFLSGEQKKAIVDLLFKTNRKVTVKQLKEDYFKKIECFDSVEISGVEDRFNASLGTYHDLLKIIKDKDFLDNEENEDILEDIVLTLTLFEDREMIEERLKTYAHLFDDKVMKQLKRRRYTGWGRLSRKLINGIRDKQSGKTILDFLKSDGFANRNFMQLIHDDSLTFKEDIQKAQVSGQGDSLHEHIANLAGSPAIKKGILQTVKVVDELVKVMGRHKPENIVIEMARENQTTQKGQKNSRERMKRIEEGIKELGSQILKEHPVENTQLQNEKLYLYYLQNGRDMYVDQELDINRLSDYDVDHIVPQSFLKDDSIDNKVLTRSDKARGKSDNVPSEEVVKKMKNYWRQLLNAKLITQRKFDNLTKAERGGLSELDKAGFIKRQLVETRQITKHVAQILDSRMNTKYDENDKLIREVKVITLKSKLVSDFRKDFQFYKVREINNYHHAHDAYLNAVVGTALIKKYPKLESEFVYGDYKVYDVRKMIAKSEQEIGKATAKYFFYSNIMNFFKTEITLANGEIRKRPLIETNGETGEIVWDKGRDFATVRKVLSMPQVNIVKKTEVQTGGFSKESILPKRNSDKLIARKKDWDPKKYGGFDSPTVAYSVLVVAKVEKGKSKKLKSVKELLGITIMERSSFEKNPIDFLEAKGYKEVKKDLIIKLPKYSLFELENGRKRMLASAGELQKGNELALPSKYVNFLYLASHYEKLKGSPEDNEQKQLFVEQHKHYLDEIIEQISEFSKRVILADANLDKVLSAYNKHRDKPIREQAENIIHLFTLTNLGAPAAFKYFDTTIDRKRYTSTKEVLDATLIHQSITGLYETRIDLSQLGGDGGGGGGGGGGGGVLNLEEEYRLHEKPVPSSIDPSWLQLFPTVWAERAGMGLANQVPPVVVELRSGASPVAVRQYPMSKEAREGIRPHIQRFLDLGVLVPCQSPWNTPLLPVKKPGTNDYRPVQDLREINKRVQDIHPTVPNPYNLLSSLPPSHTWYSVLDLKDAFFCLKLHPNSQPLFAFEWRDPEKGNTGQLTWTRLPQGFKNSPTLFNEALHRDLAPFRALNPQVVLLQYVDDLLVAAPTYRDCKEGTQKLLQELSKLGYRVSAKKAQLCQKEVTYLGYLLKEGKRWLTPARKATVMKIPPPTTPRQVREFLGKAGFCRLFIPGFASLAAPLYPLTKPSIPFIWTEEHQKAFDRIKEALLSAPALALPDLTKPFTLYVDERAGVARGVLTQTLGPWRRPVAYLSKKLDPVASGWPTCLKAVAAVALLLKDADKLTLGQNVTVIASHSLESIVRQPPDRWMTNARMTHYQSLLLNERVSFAPPAVLNPATLLPVESEATPVHRCSEILAEETGTRRDLKDQPLPGVPAWYTDGSSFIAEGKRRAGAAIVDGKRTVWASSLPEGTSAQKAELVALTQALRLAEGKDINIYTDSRYAFATAHIHGAIYKQRGWLTSAGKDIKNKEEILALLEAIHLPKRVAIIHCPGHQKGNDPVATGNRRADEAAKQAALSTRVLAETTKPAGKRTADGSEFEKRTADGSEFESPKKKAKVE

SEQ ID NO: 6287 - protein, 2093 aa, synthetic construct
MPAAKRVKLDGGDKKYSIGLDIGTNSVGWAVITDEYKVPSKKFKVLGNTDRHSIKKNLIGALLFDSGETAEATRLKRTARRRYTRRKNRICYLQEIFSNEMAKVDDSFFHRLEESFLVEEDKKHERHPIFGNIVDEVAYHEKYPTIYHLRKKLVDSTDKADLRLIYLALAHMIKFRGHFLIEGDLNPDNSDVDKLFIQLVQTYNQLFEENPINASGVDAKAILSARLSKSRRLENLIAQLPGEKKNGLFGNLIALSLGLTPNFKSNFDLAEDAKLQLSKDTYDDDLDNLLAQIGDQYADLFLAAKNLSDAILLSDILRVNTEITKAPLSASMIKRYDEHHQDLTLLKALVRQQLPEKYKEIFFDQSKNGYAGYIDGGASQEEFYKFIKPILEKMDGTEELLVKLNREDLLRKQRTFDNGSIPHQIHLGELHAILRRQEDFYPFLKDNREKIEKILTFRIPYYVGPLARGNSRFAWMTRKSEETITPWNFEEVVDKGASAQSFIERMTNFDKNLPNEKVLPKHSLLYEYFTVYNELTKVKYVTEGMRKPAFLSGEQKKAIVDLLFKTNRKVTVKQLKEDYFKKIECFDSVEISGVEDRFNASLGTYHDLLKIIKDKDFLDNEENEDILEDIVLTLTLFEDREMIEERLKTYAHLFDDKVMKQLKRRRYTGWGRLSRKLINGIRDKQSGKTILDFLKSDGFANRNFMQLIHDDSLTFKEDIQKAQVSGQGDSLHEHIANLAGSPAIKKGILQTVKVVDELVKVMGRHKPENIVIEMARENQTTQKGQKNSRERMKRIEEGIKELGSQILKEHPVENTQLQNEKLYLYYLQNGRDMYVDQELDINRLSDYDVDHIVPQSFLKDDSIDNKVLTRSDKARGKSDNVPSEEVVKKMKNYWRQLLNAKLITQRKFDNLTKAERGGLSELDKAGFIKRQLVETRQITKHVAQILDSRMNTKYDENDKLIREVKVITLKSKLVSDFRKDFQFYKVREINNYHHAHDAYLNAVVGTALIKKYPKLESEFVYGDYKVYDVRKMIAKSEQEIGKATAKYFFYSNIMNFFKTEITLANGEIRKRPLIETNGETGEIVWDKGRDFATVRKVLSMPQVNIVKKTEVQTGGFSKESILPKRNSDKLIARKKDWDPKKYGGFDSPTVAYSVLVVAKVEKGKSKKLKSVKELLGITIMERSSFEKNPIDFLEAKGYKEVKKDLIIKLPKYSLFELENGRKRMLASAGELQKGNELALPSKYVNFLYLASHYEKLKGSPEDNEQKQLFVEQHKHYLDEIIEQISEFSKRVILADANLDKVLSAYNKHRDKPIREQAENIIHLFTLTNLGAPAAFKYFDTTIDRKRYTSTKEVLDATLIHQSITGLYETRIDLSQLGGDGGGGGGGGGGGGTLNIEDEYRLHETSKEPDVPLGSTWLSDFPQAWAETGGMGLAVRQAPLIIPLKATSTPVSIKQYPMSQEARLGIKPHIQRLLDQGILVPCQSPWNTPLLPVKKPGTNDYRPVQDLREVNKRVEDIHPTVPNPYNLLSGLPPSHQWYTVLDLKDAFFCLRLHPTSQPLFAFEWRDPEMGISGQLTWTRLPQGFKNSPTLFNEALHRDLADFRIQHPDLILLQYVDDLLLAATSEQDCQRGTRALLQTLGNLGYRASAKKAQICQKQVKYLGYLLKEGQRWLTEARKETVMGQPTPKTPRQLREFLGTAGFCRLWIPGFAEMAAPLYPLTKPGTLFNWGPDQQKAYQEIKQALLTAPALGLPDLTKPFELFVDEKQGYAKGVLTQKLGPWRRPVAYLSKKLDPVAAGWPPCLRMVAAIAVLTKDAGKLTMGQPLVILAPHAVEALVKQPPDRWLSNARMTHYQAMLLDTDRVQFGPVVALNPATLLPLPEKEAPHDCLEILAETHGTRPDLTDQPIPDADYTWYTDGSSFLQEGQRRAGAAVTTETEVIWARALPAGTSAQRAELIALTQALKMAEGKKLNVYTDSRYAFATAHVHGEIYRRRGWLTSEGREIKNKNEILALLKALFLPKRLSIIHCPGHQKGNSAEARGNRMADQAAREAAMKAVLETSTLLAGKRTADGSEFEKRTADGSEFESPKKKAKVE

SEQ ID NO: 6288 - protein, 2093 aa, synthetic construct
MPAAKRVKLDGGDKKYSIGLDIGTNSVGWAVITDEYKVPSKKFKVLGNTDRHSIKKNLIGALLFDSGETAEATRLKRTARRRYTRRKNRICYLQEIFSNEMAKVDDSFFHRLEESFLVEEDKKHERHPIFGNIVDEVAYHEKYPTIYHLRKKLVDSTDKADLRLIYLALAHMIKFRGHFLIEGDLNPDNSDVDKLFIQLVQTYNQLFEENPINASGVDAKAILSARLSKSRRLENLIAQLPGEKKNGLFGNLIALSLGLTPNFKSNFDLAEDAKLQLSKDTYDDDLDNLLAQIGDQYADLFLAAKNLSDAILLSDILRVNTEITKAPLSASMIKRYDEHHQDLTLLKALVRQQLPEKYKEIFFDQSKNGYAGYIDGGASQEEFYKFIKPILEKMDGTEELLVKLNREDLLRKQRTFDNGSIPHQIHLGELHAILRRQEDFYPFLKDNREKIEKILTFRIPYYVGPLARGNSRFAWMTRKSEETITPWNFEEVVDKGASAQSFIERMTNFDKNLPNEKVLPKHSLLYEYFTVYNELTKVKYVTEGMRKPAFLSGEQKKAIVDLLFKTNRKVTVKQLKEDYFKKIECFDSVEISGVEDRFNASLGTYHDLLKIIKDKDFLDNEENEDILEDIVLTLTLFEDREMIEERLKTYAHLFDDKVMKQLKRRRYTGWGRLSRKLINGIRDKQSGKTILDFLKSDGFANRNFMQLIHDDSLTFKEDIQKAQVSGQGDSLHEHIANLAGSPAIKKGILQTVKVVDELVKVMGRHKPENIVIEMARENQTTQKGQKNSRERMKRIEEGIKELGSQILKEHPVENTQLQNEKLYLYYLQNGRDMYVDQELDINRLSDYDVDHIVPQSFLKDDSIDNKVLTRSDKARGKSDNVPSEEVVKKMKNYWRQLLNAKLITQRKFDNLTKAERGGLSELDKAGFIKRQLVETRQITKHVAQILDSRMNTKYDENDKLIREVKVITLKSKLVSDFRKDFQFYKVREINNYHHAHDAYLNAVVGTALIKKYPKLESEFVYGDYKVYDVRKMIAKSEQEIGKATAKYFFYSNIMNFFKTEITLANGEIRKRPLIETNGETGEIVWDKGRDFATVRKVLSMPQVNIVKKTEVQTGGFSKESILPKRNSDKLIARKKDWDPKKYGGFDSPTVAYSVLVVAKVEKGKSKKLKSVKELLGITIMERSSFEKNPIDFLEAKGYKEVKKDLIIKLPKYSLFELENGRKRMLASAGELQKGNELALPSKYVNFLYLASHYEKLKGSPEDNEQKQLFVEQHKHYLDEIIEQISEFSKRVILADANLDKVLSAYNKHRDKPIREQAENIIHLFTLTNLGAPAAFKYFDTTIDRKRYTSTKEVLDATLIHQSITGLYETRIDLSQLGGDGGGGGGGGGGGGTLNIEDEYRLHETSKEPDVPLGSTWLSDFPQAWAETGGMGLAVRQAPLIIPLKATSTPVSIKQYPMSQEARLGIKPHIQRLLDQGILVPCQSPWNTPLLPVKKPGTNDYRPVQDLREVNKRVEDIHPTVPNPYNLLSGLPPSHQWYTVLDLKDAFFCLRLHPTSQPLFAFEWRDPEMGISGQLTWTRLPQGFKNSPTLFNEALHRDLADFRIQHPDLILLQYVDDLLLAATSEQDCQRGTRALLQTLGNLGYRASAKKAQICQKQVKYLGYLLKEGQRWLTEARKETVMGQPTPKTPRQLREFLGKAGFCRLFIPGFAEMAAPLYPLTKPGTLFNWGPDQQKAYQEIKQALLTAPALGLPDLTKPFELFVDEKQGYAKGVLTQKLGPWRRPVAYLSKKLDPVAAGWPPCLRMVAAIAVLTKDAGKLTMGQPLVILAPHAVEALVKQPPDRWLSNARMTHYQAMLLDTDRVQFGPVVALNPATLLPLPEKEAPHDCLEILAETHGTRPDLTDQPIPDADYTWYTDGSSFLQEGQRRAGAAVTTETEVIWARALPAGTSAQRAELIALTQALKMAEGKKLNVYTDSRYAFATAHVHGEIYRRRGWLTSEGREIKNKNEILALLKALFLPKRLSIIHCPGHQKGNSAEARGNRMADQAAREAAMKAVLETSTLLAGKRTADGSEFEKRTADGSEFESPKKKAKVE

SEQ ID NO: 6289 - protein, 2090 aa, synthetic construct
MPAAKRVKLDGGDKKYSIGLDIGTNSVGWAVITDEYKVPSKKFKVLGNTDRHSIKKNLIGALLFDSGETAEATRLKRTARRRYTRRKNRICYLQEIFSNEMAKVDDSFFHRLEESFLVEEDKKHERHPIFGNIVDEVAYHEKYPTIYHLRKKLVDSTDKADLRLIYLALAHMIKFRGHFLIEGDLNPDNSDVDKLFIQLVQTYNQLFEENPINASGVDAKAILSARLSKSRRLENLIAQLPGEKKNGLFGNLIALSLGLTPNFKSNFDLAEDAKLQLSKDTYDDDLDNLLAQIGDQYADLFLAAKNLSDAILLSDILRVNTEITKAPLSASMIKRYDEHHQDLTLLKALVRQQLPEKYKEIFFDQSKNGYAGYIDGGASQEEFYKFIKPILEKMDGTEELLVKLNREDLLRKQRTFDNGSIPHQIHLGELHAILRRQEDFYPFLKDNREKIEKILTFRIPYYVGPLARGNSRFAWMTRKSEETITPWNFEEVVDKGASAQSFIERMTNFDKNLPNEKVLPKHSLLYEYFTVYNELTKVKYVTEGMRKPAFLSGEQKKAIVDLLFKTNRKVTVKQLKEDYFKKIECFDSVEISGVEDRFNASLGTYHDLLKIIKDKDFLDNEENEDILEDIVLTLTLFEDREMIEERLKTYAHLFDDKVMKQLKRRRYTGWGRLSRKLINGIRDKQSGKTILDFLKSDGFANRNFMQLIHDDSLTFKEDIQKAQVSGQGDSLHEHIANLAGSPAIKKGILQTVKVVDELVKVMGRHKPENIVIEMARENQTTQKGQKNSRERMKRIEEGIKELGSQILKEHPVENTQLQNEKLYLYYLQNGRDMYVDQELDINRLSDYDVDHIVPQSFLKDDSIDNKVLTRSDKARGKSDNVPSEEVVKKMKNYWRQLLNAKLITQRKFDNLTKAERGGLSELDKAGFIKRQLVETRQITKHVAQILDSRMNTKYDENDKLIREVKVITLKSKLVSDFRKDFQFYKVREINNYHHAHDAYLNAVVGTALIKKYPKLESEFVYGDYKVYDVRKMIAKSEQEIGKATAKYFFYSNIMNFFKTEITLANGEIRKRPLIETNGETGEIVWDKGRDFATVRKVLSMPQVNIVKKTEVQTGGFSKESILPKRNSDKLIARKKDWDPKKYGGFDSPTVAYSVLVVAKVEKGKSKKLKSVKELLGITIMERSSFEKNPIDFLEAKGYKEVKKDLIIKLPKYSLFELENGRKRMLASAGELQKGNELALPSKYVNFLYLASHYEKLKGSPEDNEQKQLFVEQHKHYLDEIIEQISEFSKRVILADANLDKVLSAYNKHRDKPIREQAENIIHLFTLTNLGAPAAFKYFDTTIDRKRYTSTKEVLDATLIHQSITGLYETRIDLSQLGGDGGGSSGGTAPLEEEYRLFLEAPIQNVTLLEQWKREIPKVWAEINPPGLASTQAPIHVQLLSTALPVRVRQYPITLEAKRSLRETIRKFRAAGILRPVHSPWNTPLLPVRKSGTSEYRMVQDLREVNKRVETIHPTVPNPYTLLSLLPPDRIWYSVLDLKDAFFCIPLAPESQLIFAFEWADAEEGESGQLTWTRLPQGFKNSPTLFNEALNRDLQGFRLDHPSVSLLQYVDDLLIAADTQAACLSATRDLLMTLAELGYRVSGKKAQLCQEEVTYLGFKIHKGSRSLSNSRTQAILQIPVPKTKRQVREFLGTIGYCRLWIPGFAELAQPLYAATRPGNDPLVWGEKEEEAFQSLKLALTQPPALALPSLDKPFQLFVEETSGAAKGVLTQALGPWKRPVAYLSKRLDPVAAGWPRCLRAIAAAALLTREASKLTFGQDIEITSSHNLESLLRSPPDKWLTNARITQYQVLLLDPPRVRFKQTAALNPATLLPETDDTLPIHHCLDTLDSLTSTRPDLTDQPLAQAEATLFTDGSSYIRDGKRYAGAAVVTLDSVIWAEPLPIGTSAQKAELIALTKALEWSKDKSVNIYTDSRYAFATLHVHGMIYRERGWLTAGGKAIKNAPEILALLTAVWLPKRVAVMHCKGHQKDDAPTSTGNRRADEVAREVAIRPLSTQATISAGKRTADGSEFEKRTADGSEFESPKKKAKVE

SEQ ID NO: 6290 - protein, 2210 aa, synthetic construct
MPAAKRVKLDGGDKKYSIGLDIGTNSVGWAVITDEYKVPSKKFKVLGNTDRHSIKKNLIGALLFDSGETAEATRLKRTARRRYTRRKNRICYLQEIFSNEMAKVDDSFFHRLEESFLVEEDKKHERHPIFGNIVDEVAYHEKYPTIYHLRKKLVDSTDKADLRLIYLALAHMIKFRGHFLIEGDLNPDNSDVDKLFIQLVQTYNQLFEENPINASGVDAKAILSARLSKSRRLENLIAQLPGEKKNGLFGNLIALSLGLTPNFKSNFDLAEDAKLQLSKDTYDDDLDNLLAQIGDQYADLFLAAKNLSDAILLSDILRVNTEITKAPLSASMIKRYDEHHQDLTLLKALVRQQLPEKYKEIFFDQSKNGYAGYIDGGASQEEFYKFIKPILEKMDGTEELLVKLNREDLLRKQRTFDNGSIPHQIHLGELHAILRRQEDFYPFLKDNREKIEKILTFRIPYYVGPLARGNSRFAWMTRKSEETITPWNFEEVVDKGASAQSFIERMTNFDKNLPNEKVLPKHSLLYEYFTVYNELTKVKYVTEGMRKPAFLSGEQKKAIVDLLFKTNRKVTVKQLKEDYFKKIECFDSVEISGVEDRFNASLGTYHDLLKIIKDKDFLDNEENEDILEDIVLTLTLFEDREMIEERLKTYAHLFDDKVMKQLKRRRYTGWGRLSRKLINGIRDKQSGKTILDFLKSDGFANRNFMQLIHDDSLTFKEDIQKAQVSGQGDSLHEHIANLAGSPAIKKGILQTVKVVDELVKVMGRHKPENIVIEMARENQTTQKGQKNSRERMKRIEEGIKELGSQILKEHPVENTQLQNEKLYLYYLQNGRDMYVDQELDINRLSDYDVDHIVPQSFLKDDSIDNKVLTRSDKARGKSDNVPSEEVVKKMKNYWRQLLNAKLITQRKFDNLTKAERGGLSELDKAGFIKRQLVETRQITKHVAQILDSRMNTKYDENDKLIREVKVITLKSKLVSDFRKDFQFYKVREINNYHHAHDAYLNAVVGTALIKKYPKLESEFVYGDYKVYDVRKMIAKSEQEIGKATAKYFFYSNIMNFFKTEITLANGEIRKRPLIETNGETGEIVWDKGRDFATVRKVLSMPQVNIVKKTEVQTGGFSKESILPKRNSDKLIARKKDWDPKKYGGFDSPTVAYSVLVVAKVEKGKSKKLKSVKELLGITIMERSSFEKNPIDFLEAKGYKEVKKDLIIKLPKYSLFELENGRKRMLASAGELQKGNELALPSKYVNFLYLASHYEKLKGSPEDNEQKQLFVEQHKHYLDEIIEQISEFSKRVILADANLDKVLSAYNKHRDKPIREQAENIIHLFTLTNLGAPAAFKYFDTTIDRKRYTSTKEVLDATLIHQSITGLYETRIDLSQLGGDGGGSSGGTLGDQGSRGSDPLPEPRVTLTVEGIPTEFLVNTGAEHSVLTKPMGKMGSKRTVVAGATGSKVYPWTTKRLLKIGQKQVTHSFLVIPECPAPLLGRDLLTKLKAQIQFSTEGPQVTWEDRPAMCLVLNLEEEYRLHEKPVPPSIDPSWLQLFPMVWAEKAGMGLANQVPPVVVELKSDASPVAVRQYPMSKEAREGIRPHIQRFLDLGILVPCQSPWNTPLLPVKKPGTNDYRPVQDLREVNKRVQDIHPTVPNPYNLLSSLPPSHTWYSVLDLKDAFFCLKLHPNSQPLFAFEWRDPEKGNTGQLTWTRLPQGFKNSPTLFNEALHRDLASFRALNPQVVMLQYVDDLLVAAPTYRDCKEGTRRLLQELSKLGYRVSAKKAQLCREEVTYLGYLLKGGKRWLTPARKATVMKIPTPTTPRQVREFLGTAGFCRLWIPGFASLAAPLYPLTRPKVPFTWTEAHQEAFGRIKEALLSAPALALPDLTKPFALYVDEKEGVARGVLTQTLGPWRRPVAYLSKKLDPVASGWPTCLKAIAAVALLLKDADKLTLGQNVLVIAPHNLESIVRQPPDRWMTNARMTHYQSLLLNERVSFAPPAILNPATLLPVESDDTPIHICSEILAEETGTRPDLRDQPLPGVPAWYTDGSSFIMDGRRQAGAAIVDNKRTVWASNLPEGTSAQKAELIALTQALRLAEGKSINIYTDSRYAFATAHVHGAIYKQRGWLTSAGKDIKNKEEILALLEAIHLPKRVAIIHCPGHQRGTDPVATGNRKADEAAKQAAQSTRILTETTKNAGKRTADGSEFEKRTADGSEFESPKKKAKVE

SEQ ID NO: 6291 - protein, 2088 aa, synthetic construct
MPAAKRVKLDGGDKKYSIGLDIGTNSVGWAVITDEYKVPSKKFKVLGNTDRHSIKKNLIGALLFDSGETAEATRLKRTARRRYTRRKNRICYLQEIFSNEMAKVDDSFFHRLEESFLVEEDKKHERHPIFGNIVDEVAYHEKYPTIYHLRKKLVDSTDKADLRLIYLALAHMIKFRGHFLIEGDLNPDNSDVDKLFIQLVQTYNQLFEENPINASGVDAKAILSARLSKSRRLENLIAQLPGEKKNGLFGNLIALSLGLTPNFKSNFDLAEDAKLQLSKDTYDDDLDNLLAQIGDQYADLFLAAKNLSDAILLSDILRVNTEITKAPLSASMIKRYDEHHQDLTLLKALVRQQLPEKYKEIFFDQSKNGYAGYIDGGASQEEFYKFIKPILEKMDGTEELLVKLNREDLLRKQRTFDNGSIPHQIHLGELHAILRRQEDFYPFLKDNREKIEKILTFRIPYYVGPLARGNSRFAWMTRKSEETITPWNFEEVVDKGASAQSFIERMTNFDKNLPNEKVLPKHSLLYEYFTVYNELTKVKYVTEGMRKPAFLSGEQKKAIVDLLFKTNRKVTVKQLKEDYFKKIECFDSVEISGVEDRFNASLGTYHDLLKIIKDKDFLDNEENEDILEDIVLTLTLFEDREMIEERLKTYAHLFDDKVMKQLKRRRYTGWGRLSRKLINGIRDKQSGKTILDFLKSDGFANRNFMQLIHDDSLTFKEDIQKAQVSGQGDSLHEHIANLAGSPAIKKGILQTVKVVDELVKVMGRHKPENIVIEMARENQTTQKGQKNSRERMKRIEEGIKELGSQILKEHPVENTQLQNEKLYLYYLQNGRDMYVDQELDINRLSDYDVDHIVPQSFLKDDSIDNKVLTRSDKARGKSDNVPSEEVVKKMKNYWRQLLNAKLITQRKFDNLTKAERGGLSELDKAGFIKRQLVETRQITKHVAQILDSRMNTKYDENDKLIREVKVITLKSKLVSDFRKDFQFYKVREINNYHHAHDAYLNAVVGTALIKKYPKLESEFVYGDYKVYDVRKMIAKSEQEIGKATAKYFFYSNIMNFFKTEITLANGEIRKRPLIETNGETGEIVWDKGRDFATVRKVLSMPQVNIVKKTEVQTGGFSKESILPKRNSDKLIARKKDWDPKKYGGFDSPTVAYSVLVVAKVEKGKSKKLKSVKELLGITIMERSSFEKNPIDFLEAKGYKEVKKDLIIKLPKYSLFELENGRKRMLASAGELQKGNELALPSKYVNFLYLASHYEKLKGSPEDNEQKQLFVEQHKHYLDEIIEQISEFSKRVILADANLDKVLSAYNKHRDKPIREQAENIIHLFTLTNLGAPAAFKYFDTTIDRKRYTSTKEVLDATLIHQSITGLYETRIDLSQLGGDGGGSSGGTLNLEDEYRLYETSAEPEVSPGSTWLSDFPQAWAETGGMGLAVRQAPLIIPLKATSTPVSIKQYPMSQEAKLGIKPHIQRLLDQGILVPCQSPWNTPLLPVKKPGTNDYRPVQDLREVNKRVEDIHPTVPNPYNLLSGLPPSHRWYTVLDLKDAFFCLRLHPTSQPLFAFEWRDPGMGISGQLTWTRLPQGFKNSPTLFNEALHRDLADFRIQHPDLILLQYVDDILLAATSELDCQQGTRALLLTLGNLGYRASAKKAQLCQKQVKYLGYLLKEGQRWLTEARKETVMGQPTPKTPRQLREFLGKAGFCRLFIPGFAEMAAPLYPLTKPGTLFNWGPDQQKAYQEIKQALLTAPALGLPDLTKPFELFVDEKQGYAKGVLTQKLGPWRRPVAYLSKKLDPVAAGWPPCLRMVAAIAVLRKDAGKLTMGQPLVILAPHAVEALVKQPPDRWLSNARMTHYQAMLLDTDRVQFGPVVALNPATLLPLPEEGAPHDCLEILAETHGTRPDLTDQPIPDADHTWYTDGSSFLQEGQRKAGAAVTTETEVIWARALPAGTSAQRAELIALTQALKMAEGKRLNVYTDSRYAFATAHIHGEIYRRRGWLTSEGREIKNKSEILALLKALFLPKRLSIIHCLGHQKGDSAEARGNRLADQAAREAAIKTPPDTSTLLAGKRTADGSEFEKRTADGSEFESPKKKAKVE

SEQ ID NO: 6292 - protein, 2088 aa, synthetic construct
MPAAKRVKLDGGDKKYSIGLDIGTNSVGWAVITDEYKVPSKKFKVLGNTDRHSIKKNLIGALLFDSGETAEATRLKRTARRRYTRRKNRICYLQEIFSNEMAKVDDSFFHRLEESFLVEEDKKHERHPIFGNIVDEVAYHEKYPTIYHLRKKLVDSTDKADLRLIYLALAHMIKFRGHFLIEGDLNPDNSDVDKLFIQLVQTYNQLFEENPINASGVDAKAILSARLSKSRRLENLIAQLPGEKKNGLFGNLIALSLGLTPNFKSNFDLAEDAKLQLSKDTYDDDLDNLLAQIGDQYADLFLAAKNLSDAILLSDILRVNTEITKAPLSASMIKRYDEHHQDLTLLKALVRQQLPEKYKEIFFDQSKNGYAGYIDGGASQEEFYKFIKPILEKMDGTEELLVKLNREDLLRKQRTFDNGSIPHQIHLGELHAILRRQEDFYPFLKDNREKIEKILTFRIPYYVGPLARGNSRFAWMTRKSEETITPWNFEEVVDKGASAQSFIERMTNFDKNLPNEKVLPKHSLLYEYFTVYNELTKVKYVTEGMRKPAFLSGEQKKAIVDLLFKTNRKVTVKQLKEDYFKKIECFDSVEISGVEDRFNASLGTYHDLLKIIKDKDFLDNEENEDILEDIVLTLTLFEDREMIEERLKTYAHLFDDKVMKQLKRRRYTGWGRLSRKLINGIRDKQSGKTILDFLKSDGFANRNFMQLIHDDSLTFKEDIQKAQVSGQGDSLHEHIANLAGSPAIKKGILQTVKVVDELVKVMGRHKPENIVIEMARENQTTQKGQKNSRERMKRIEEGIKELGSQILKEHPVENTQLQNEKLYLYYLQNGRDMYVDQELDINRLSDYDVDHIVPQSFLKDDSIDNKVLTRSDKARGKSDNVPSEEVVKKMKNYWRQLLNAKLITQRKFDNLTKAERGGLSELDKAGFIKRQLVETRQITKHVAQILDSRMNTKYDENDKLIREVKVITLKSKLVSDFRKDFQFYKVREINNYHHAHDAYLNAVVGTALIKKYPKLESEFVYGDYKVYDVRKMIAKSEQEIGKATAKYFFYSNIMNFFKTEITLANGEIRKRPLIETNGETGEIVWDKGRDFATVRKVLSMPQVNIVKKTEVQTGGFSKESILPKRNSDKLIARKKDWDPKKYGGFDSPTVAYSVLVVAKVEKGKSKKLKSVKELLGITIMERSSFEKNPIDFLEAKGYKEVKKDLIIKLPKYSLFELENGRKRMLASAGELQKGNELALPSKYVNFLYLASHYEKLKGSPEDNEQKQLFVEQHKHYLDEIIEQISEFSKRVILADANLDKVLSAYNKHRDKPIREQAENIIHLFTLTNLGAPAAFKYFDTTIDRKRYTSTKEVLDATLIHQSITGLYETRIDLSQLGGDGGGSSGGTLGIEDEYRLHETSTEPDVSLGSTWLSDFPQAWAETGGMGLAVRQAPLIIPLKATSTPVSIQQYPMSHEARLGIKPHIQRLLDQGILVPCQSPWNTPLLPVKKPGTNDYRPVQDLREVNKRVEDIHPTVPNPYNLLSGLPPSHQWYTVLDLKDAFFCLRLHPTSQPLFAFEWRDPGMGISGQLTWTRLPQGFKNSPTLFNEALHRDLADFRIQHPDLILLQYVDDILLAATSELDCQQGTRALLQTLGDLGYRASAKKAQICQKQVKYLGYLLREGQRWLTEARKETVMGQPVPKTPRQLREFLGTAGFCRLWIPGFAEMAAPLYPLTKPGTLFSWGPDQQKAYQEIKQALLTAPALGLPDLTKPFELFVDEKQGYAKGVLTQKLGPWRRPVAYLSKKLDPVAAGWPPCLRMVAAIAVLTKDAGKLTMGQPLVILAPHAVEALVKQPPDRWLSNARMTHYQAMLLDTDRVQFGPVVALNPATLLPLPEEGAPHDCLEILAETHGTRPDLTDQPIPDADHTWYTDGSSFLQEGQRKAGAAVTTETEVIWAGALPAGTSAQRAELIALTQALKMAEGKRLNVYTDSRYAFATAHIHGEIYRRRGWLTSEGREIKNKSEILALLKALFLPKRLSIIHCLGHQKGDSAEARGNRLADQAAREAAIKTPPDTSTLLAGKRTADGSEFEKRTADGSEFESPKKKAKVE

SEQ ID NO: 6293 - protein, 2080 aa, synthetic construct
MPAAKRVKLDGGDKKYSIGLDIGTNSVGWAVITDEYKVPSKKFKVLGNTDRHSIKKNLIGALLFDSGETAEATRLKRTARRRYTRRKNRICYLQEIFSNEMAKVDDSFFHRLEESFLVEEDKKHERHPIFGNIVDEVAYHEKYPTIYHLRKKLVDSTDKADLRLIYLALAHMIKFRGHFLIEGDLNPDNSDVDKLFIQLVQTYNQLFEENPINASGVDAKAILSARLSKSRRLENLIAQLPGEKKNGLFGNLIALSLGLTPNFKSNFDLAEDAKLQLSKDTYDDDLDNLLAQIGDQYADLFLAAKNLSDAILLSDILRVNTEITKAPLSASMIKRYDEHHQDLTLLKALVRQQLPEKYKEIFFDQSKNGYAGYIDGGASQEEFYKFIKPILEKMDGTEELLVKLNREDLLRKQRTFDNGSIPHQIHLGELHAILRRQEDFYPFLKDNREKIEKILTFRIPYYVGPLARGNSRFAWMTRKSEETITPWNFEEVVDKGASAQSFIERMTNFDKNLPNEKVLPKHSLLYEYFTVYNELTKVKYVTEGMRKPAFLSGEQKKAIVDLLFKTNRKVTVKQLKEDYFKKIECFDSVEISGVEDRFNASLGTYHDLLKIIKDKDFLDNEENEDILEDIVLTLTLFEDREMIEERLKTYAHLFDDKVMKQLKRRRYTGWGRLSRKLINGIRDKQSGKTILDFLKSDGFANRNFMQLIHDDSLTFKEDIQKAQVSGQGDSLHEHIANLAGSPAIKKGILQTVKVVDELVKVMGRHKPENIVIEMARENQTTQKGQKNSRERMKRIEEGIKELGSQILKEHPVENTQLQNEKLYLYYLQNGRDMYVDQELDINRLSDYDVDHIVPQSFLKDDSIDNKVLTRSDKARGKSDNVPSEEVVKKMKNYWRQLLNAKLITQRKFDNLTKAERGGLSELDKAGFIKRQLVETRQITKHVAQILDSRMNTKYDENDKLIREVKVITLKSKLVSDFRKDFQFYKVREINNYHHAHDAYLNAVVGTALIKKYPKLESEFVYGDYKVYDVRKMIAKSEQEIGKATAKYFFYSNIMNFFKTEITLANGEIRKRPLIETNGETGEIVWDKGRDFATVRKVLSMPQVNIVKKTEVQTGGFSKESILPKRNSDKLIARKKDWDPKKYGGFDSPTVAYSVLVVAKVEKGKSKKLKSVKELLGITIMERSSFEKNPIDFLEAKGYKEVKKDLIIKLPKYSLFELENGRKRMLASAGELQKGNELALPSKYVNFLYLASHYEKLKGSPEDNEQKQLFVEQHKHYLDEIIEQISEFSKRVILADANLDKVLSAYNKHRDKPIREQAENIIHLFTLTNLGAPAAFKYFDTTIDRKRYTSTKEVLDATLIHQSITGLYETRIDLSQLGGDGGGSSGGLDDEYRLYSPLVKPDQNIQFWLEQFPQAWAETAGMGLAKQVPPQVIQLKASATPVSVRQYPLSKEAQEGIRPHVQRLIQQGILVPVQSPWNTPLLPVRKPGTNDYRPVQDLREVNKRVQDIHPTVPNPYNLLCALPPQRSWYTVLDLKDAFFCLRLHPTSQPLFAFEWRDPGTGRTGQLTWTRLPQGFKNSPTIFNEALHRDLANFRIQHPQVTLLQYVDDLLLAGATKQDCLEGTKALLLELSDLGYRASAKKAQICRREVTYLGYSLRDGQRWLTEARKKTVVQIPAPTTAKQVREFLGKAGFCRLFIPGFATLAAPLYPLTKPKGEFSWAPEHQKAFDAIKKALLSAPALALPDVTKPFTLYVDERKGVARGVLTQTLGPWRRPVAYLSKKLDPVASGWPVCLKAIAAVAILVKDADKLTLGQNITVIAPHALENIVRQPPDRWMTNARMTHYQSLLLTERVTFAPPAALNPATLLPEETDEPVTHDCHQLLIEETGVRKDLTDIPLTGEVLTWFTDGSSYVVEGKRMAGAAVVDGTRTIWASSLPEGTSAQKAELMALTQALRLAEGKSINIYTDSRYAFATAHVHGAIYKQRGWLTSAGREIKNKEEILSLLEALHLPKRLAIIHCPGHQKAKDPISRGNQMADRVAKQAAQGVNLLPAGKRTADGSEFEKRTADGSEFESPKKKAKVE

SEQ ID NO: 6294 - protein, 2080 aa, synthetic construct; identical to SEQ ID NO: 6293

SEQ ID NO: 6295 - protein, 2168 aa, synthetic construct
MPAAKRVKLDGGDKKYSIGLDIGTNSVGWAVITDEYKVPSKKFKVLGNTDRHSIKKNLIGALLFDSGETAEATRLKRTARRRYTRRKNRICYLQEIFSNEMAKVDDSFFHRLEESFLVEEDKKHERHPIFGNIVDEVAYHEKYPTIYHLRKKLVDSTDKADLRLIYLALAHMIKFRGHFLIEGDLNPDNSDVDKLFIQLVQTYNQLFEENPINASGVDAKAILSARLSKSRRLENLIAQLPGEKKNGLFGNLIALSLGLTPNFKSNFDLAEDAKLQLSKDTYDDDLDNLLAQIGDQYADLFLAAKNLSDAILLSDILRVNTEITKAPLSASMIKRYDEHHQDLTLLKALVRQQLPEKYKEIFFDQSKNGYAGYIDGGASQEEFYKFIKPILEKMDGTEELLVKLNREDLLRKQRTFDNGSIPHQIHLGELHAILRRQEDFYPFLKDNREKIEKILTFRIPYYVGPLARGNSRFAWMTRKSEETITPWNFEEVVDKGASAQSFIERMTNFDKNLPNEKVLPKHSLLYEYFTVYNELTKVKYVTEGMRKPAFLSGEQKKAIVDLLFKTNRKVTVKQLKEDYFKKIECFDSVEISGVEDRFNASLGTYHDLLKIIKDKDFLDNEENEDILEDIVLTLTLFEDREMIEERLKTYAHLFDDKVMKQLKRRRYTGWGRLSRKLINGIRDKQSGKTILDFLKSDGFANRNFMQLIHDDSLTFKEDIQKAQVSGQGDSLHEHIANLAGSPAIKKGILQTVKVVDELVKVMGRHKPENIVIEMARENQTTQKGQKNSRERMKRIEEGIKELGSQILKEHPVENTQLQNEKLYLYYLQNGRDMYVDQELDINRLSDYDVDHIVPQSFLKDDSIDNKVLTRSDKARGKSDNVPSEEVVKKMKNYWRQLLNAKLITQRKFDNLTKAERGGLSELDKAGFIKRQLVETRQITKHVAQILDSRMNTKYDENDKLIREVKVITLKSKLVSDFRKDFQFYKVREINNYHHAHDAYLNAVVGTALIKKYPKLESEFVYGDYKVYDVRKMIAKSEQEIGKATAKYFFYSNIMNFFKTEITLANGEIRKRPLIETNGETGEIVWDKGRDFATVRKVLSMPQVNIVKKTEVQTGGFSKESILPKRNSDKLIARKKDWDPKKYGGFDSPTVAYSVLVVAKVEKGKSKKLKSVKELLGITIMERSSFEKNPIDFLEAKGYKEVKKDLIIKLPKYSLFELENGRKRMLASAGELQKGNELALPSKYVNFLYLASHYEKLKGSPEDNEQKQLFVEQHKHYLDEIIEQISEFSKRVILADANLDKVLSAYNKHRDKPIREQAENIIHLFTLTNLGAPAAFKYFDTTIDRKRYTSTKEVLDATLIHQSITGLYETRIDLSQLGGDGGGSSGGMDPLQLLQPLEAEIKGTKLKAHWNSGATITCVPQAFLEEEVPIKNIWIKTIHGEKEQPVYYLTFKIQGRKVEAEVISSPYDYILVSPSDIPWLMKKPLQLTTLVPLQEYEERLLKQTMLTGSYKEKLQSLFLKYDALWQHWENQVGHRRIKPHHIATGTVNPRPQKQYPINPKAKASIQTVINDLLKQGVLIQQNSIMNTPVYPVPKPDGKWRMVLDYREVNKTIPLIAAQNQHSAGILSSIFRGKYKTTLDLSNGFWAHSITPESYWLTAFTWLGQQYCWTRLPQGFLNSPALFNADVVDLLKEVPNVQVYVDDIYISHDDPREHLEQLEKVFSLLLNAGYVVSLKKSEIAQHEVEFLGFNITKEGRGLTETFKQKLLNITPPRDLKQLQSILGLLNFARNFIPNFSELVKPLYNIIATAPGKYITWTTDNSQQLQNIISMLNSAENLEERNPEVRLIMKVNTSPSAGYIRFYNEFAKRPIMYLNYVYTKAEVKFTNTEKLLTTIHKGLIKALDLGMGQEILVYSPIVSMTKIQKTPLPERKALPIRWITWMSYLEDPRIQFHYDKTLPELQQVPTVTDDIIAKIKHPSEFSMVFYTDGSAIKHPNVNKSHNAGMGIAQVQFKPEFTVINTWSIPLGDHTAQLAEVAAVEFACKKALKIDGPVLIVTDSFYVAESVNKELPYWQSNGFFNNKKKPLKHVSKWKSIADCIQLKPDIIIIHEKGHQPTASTFHTEGNNLADKLATQGSYVVNAGKRTADGSEFEKRTADGSEFESPKKKAKVE

SEQ ID NO: 6296 - protein, 2079 aa, synthetic construct
MPAAKRVKLDGGDKKYSIGLDIGTNSVGWAVITDEYKVPSKKFKVLGNTDRHSIKKNLIGALLFDSGETAEATRLKRTARRRYTRRKNRICYLQEIFSNEMAKVDDSFFHRLEESFLVEEDKKHERHPIFGNIVDEVAYHEKYPTIYHLRKKLVDSTDKADLRLIYLALAHMIKFRGHFLIEGDLNPDNSDVDKLFIQLVQTYNQLFEENPINASGVDAKAILSARLSKSRRLENLIAQLPGEKKNGLFGNLIALSLGLTPNFKSNFDLAEDAKLQLSKDTYDDDLDNLLAQIGDQYADLFLAAKNLSDAILLSDILRVNTEITKAPLSASMIKRYDEHHQDLTLLKALVRQQLPEKYKEIFFDQSKNGYAGYIDGGASQEEFYKFIKPILEKMDGTEELLVKLNREDLLRKQRTFDNGSIPHQIHLGELHAILRRQEDFYPFLKDNREKIEKILTFRIPYYVGPLARGNSRFAWMTRKSEETITPWNFEEVVDKGASAQSFIERMTNFDKNLPNEKVLPKHSLLYEYFTVYNELTKVKYVTEGMRKPAFLSGEQKKAIVDLLFKTNRKVTVKQLKEDYFKKIECFDSVEISGVEDRFNASLGTYHDLLKIIKDKDFLDNEENEDILEDIVLTLTLFEDREMIEERLKTYAHLFDDKVMKQLKRRRYTGWGRLSRKLINGIRDKQSGKTILDFLKSDGFANRNFMQLIHDDSLTFKEDIQKAQVSGQGDSLHEHIANLAGSPAIKKGILQTVKVVDELVKVMGRHKPENIVIEMARENQTTQKGQKNSRERMKRIEEGIKELGSQILKEHPVENTQLQNEKLYLYYLQNGRDMYVDQELDINRLSDYDVDHIVPQSFLKDDSIDNKVLTRSDKARGKSDNVPSEEVVKKMKNYWRQLLNAKLITQRKFDNLTKAERGGLSELDKAGFIKRQLVETRQITKHVAQILDSRMNTKYDENDKLIREVKVITLKSKLVSDFRKDFQFYKVREINNYHHAHDAYLNAVVGTALIKKYPKLESEFVYGDYKVYDVRKMIAKSEQEIGKATAKYFFYSNIMNFFKTEITLANGEIRKRPLIETNGETGEIVWDKGRDFATVRKVLSMPQVNIVKKTEVQTGGFSKESILPKRNSDKLIARKKDWDPKKYGGFDSPTVAYSVLVVAKVEKGKSKKLKSVKELLGITIMERSSFEKNPIDFLEAKGYKEVKKDLIIKLPKYSLFELENGRKRMLASAGELQKGNELALPSKYVNFLYLASHYEKLKGSPEDNEQKQLFVEQHKHYLDEIIEQISEFSKRVILADANLDKVLSAYNKHRDKPIREQAENIIHLFTLTNLGAPAAFKYFDTTIDRKRYTSTKEVLDATLIHQSITGLYETRIDLSQLGGDGGGSSGGVPWLTQQPLQLTILVPLQEYQDRILNKTALPEEQKQQLKALFTKYDNLWQHWENQVGHRKIRPHNIATGDYPPRPQKQYPINPKAKPSIQIVIDDLLKQGVLTPQNSTMNTPVYPVPKPDGRWRMVLDYREVNKTIPLTAAQNQHSAGILATIVRQKYKTTLDLANGFWAHPITPDSYWLTAFTWQGKQYCWTRLPQGFLNSPALFTADAVDLLKEVPNVQVYVDDIYLSHDNPHEHIQQLEKVFQILLQAGYVVSLKKSEIGQRTVEFLGFNITKEGRGLTDTFKTKLLNVTPPKDLKQLQSILGLLNFARNFIPNFAELVQTLYNLIASSKGKYIEWTEDNTKQLNKVIEALNTASNLEERLPDQRLVIKVNTSPSAGYVRYYNESGKKPIMYLNYVFSKAELKFSMLEKLLTTMHKALIKAMDLAMGQEILVYSPIVSMTKIQKTPLPERKALPIRWITWMTYLEDPRIQFHYDKTLPELKHIPDVYTSSIPPLKHPSQYEGVFCTDGSAIKSPDPTKSNNAGMGIVHAIYNPEYKILNQWSIPLGHHTAQMAEIAAVEFACKKALKVPGPVLVITDSFYVAESANKELPYWKSNGFVNNKKEPLKHISKWKSIAECLSIKPDITIQHEKGHQPINTSIHTEGNALADKLATQGSYVVNAGKRTADGSEFEKRTADGSEFESPKKKAKVE

SEQ ID NO: 6297 - protein, 2088 aa, synthetic construct
MPAAKRVKLDGGDKKYSIGLDIGTNSVGWAVITDEYKVPSKKFKVLGNTDRHSIKKNLIGALLFDSGETAEATRLKRTARRRYTRRKNRICYLQEIFSNEMAKVDDSFFHRLEESFLVEEDKKHERHPIFGNIVDEVAYHEKYPTIYHLRKKLVDSTDKADLRLIYLALAHMIKFRGHFLIEGDLNPDNSDVDKLFIQLVQTYNQLFEENPINASGVDAKAILSARLSKSRRLENLIAQLPGEKKNGLFGNLIALSLGLTPNFKSNFDLAEDAKLQLSKDTYDDDLDNLLAQIGDQYADLFLAAKNLSDAILLSDILRVNTEITKAPLSASMIKRYDEHHQDLTLLKALVRQQLPEKYKEIFFDQSKNGYAGYIDGGASQEEFYKFIKPILEKMDGTEELLVKLNREDLLRKQRTFDNGSIPHQIHLGELHAILRRQEDFYPFLKDNREKIEKILTFRIPYYVGPLARGNSRFAWMTRKSEETITPWNFEEVVDKGASAQSFIERMTNFDKNLPNEKVLPKHSLLYEYFTVYNELTKVKYVTEGMRKPAFLSGEQKKAIVDLLFKTNRKVTVKQLKEDYFKKIECFDSVEISGVEDRFNASLGTYHDLLKIIKDKDFLDNEENEDILEDIVLTLTLFEDREMIEERLKTYAHLFDDKVMKQLKRRRYTGWGRLSRKLINGIRDKQSGKTILDFLKSDGFANRNFMQLIHDDSLTFKEDIQKAQVSGQGDSLHEHIANLAGSPAIKKGILQTVKVVDELVKVMGRHKPENIVIEMARENQTTQKGQKNSRERMKRIEEGIKELGSQILKEHPVENTQLQNEKLYLYYLQNGRDMYVDQELDINRLSDYDVDHIVPQSFLKDDSIDNKVLTRSDKARGKSDNVPSEEVVKKMKNYWRQLLNAKLITQRKFDNLTKAERGGLSELDKAGFIKRQLVETRQITKHVAQILDSRMNTKYDENDKLIREVKVITLKSKLVSDFRKDFQFYKVREINNYHHAHDAYLNAVVGTALIKKYPKLESEFVYGDYKVYDVRKMIAKSEQEIGKATAKYFFYSNIMNFFKTEITLANGEIRKRPLIETNGETGEIVWDKGRDFATVRKVLSMPQVNIVKKTEVQTGGFSKESILPKRNSDKLIARKKDWDPKKYGGFDSPTVAYSVLVVAKVEKGKSKKLKSVKELLGITIMERSSFEKNPIDFLEAKGYKEVKKDLIIKLPKYSLFELENGRKRMLASAGELQKGNELALPSKYVNFLYLASHYEKLKGSPEDNEQKQLFVEQHKHYLDEIIEQISEFSKRVILADANLDKVLSAYNKHRDKPIREQAENIIHLFTLTNLGAPAAFKYFDTTIDRKRYTSTKEVLDATLIHQSITGLYETRIDLSQLGGDGGGSSGGTLNIEDEYRLHETSKEPDVPLGSTWLSDFPQAWAETGGMGLAVRQAPLIIPLKATSTPVSIKQYPMSQEARLGIKPHIQRLLDQGILVPCQSPWNTPLLPVKKPGTNDYRPVQDLREVNKRVEDIHPTVPNPYNLLSGLPPSHQWYTVLDLKDAFFCLRLHPTSQPLFAFEWRDPEMGISGQLTWTRLPQGFKNSPTLFNEALHRDLADFRIQHPDLILLQYVDDLLLAATSEQDCQRGTRALLQTLGNLGYRASAKKAQICQKQVKYLGYLLKEGQRWLTEARKETVMGQPTPKTPRQLREFLGTAGFCRLWIPGFAEMAAPLYPLTKPGTLFNWGPDQQKAYQEIKQALLTAPALGLPDLTKPFELFVDEKQGYAKGVLTQKLGPWRRPVAYLSKKLDPVAAGWPPCLRMVAAIAVLTKDAGKLTMGQPLVILAPHAVEALVKQPPDRWLSNARMTHYQAMLLDTDRVQFGPVVALNPATLLPLPEKEAPHDCLEILAETHGTRPDLTDQPIPDADYTWYTDGSSFLQEGQRRAGAAVTTETEVIWARALPAGTSAQRAELIALTQALKMAEGKKLNVYTDSRYAFATAHVHGEIYRRRGWLTSEGREIKNKNEILALLKALFLPKRLSIIHCPGHQKGNSAEARGNRMADQAAREAAMKAVLETSTLLAGKRTADGSEFEKRTADGSEFESPKKKAKVE

SEQ ID NO: 6298 - protein, 2089 aa, synthetic construct
MPAAKRVKLDGGDKKYSIGLDIGTNSVGWAVITDEYKVPSKKFKVLGNTDRHSIKKNLIGALLFDSGETAEATRLKRTARRRYTRRKNRICYLQEIFSNEMAKVDDSFFHRLEESFLVEEDKKHERHPIFGNIVDEVAYHEKYPTIYHLRKKLVDSTDKADLRLIYLALAHMIKFRGHFLIEGDLNPDNSDVDKLFIQLVQTYNQLFEENPINASGVDAKAILSARLSKSRRLENLIAQLPGEKKNGLFGNLIALSLGLTPNFKSNFDLAEDAKLQLSKDTYDDDLDNLLAQIGDQYADLFLAAKNLSDAILLSDILRVNTEITKAPLSASMIKRYDEHHQDLTLLKALVRQQLPEKYKEIFFDQSKNGYAGYIDGGASQEEFYKFIKPILEKMDGTEELLVKLNREDLLRKQRTFDNGSIPHQIHLGELHAILRRQEDFYPFLKDNREKIEKILTFRIPYYVGPLARGNSRFAWMTRKSEETITPWNFEEVVDKGASAQSFIERMTNFDKNLPNEKVLPKHSLLYEYFTVYNELTKVKYVTEGMRKPAFLSGEQKKAIVDLLFKTNRKVTVKQLKEDYFKKIECFDSVEISGVEDRFNASLGTYHDLLKIIKDKDFLDNEENEDILEDIVLTLTLFEDREMIEERLKTYAHLFDDKVMKQLKRRRYTGWGRLSRKLINGIRDKQSGKTILDFLKSDGFANRNFMQLIHDDSLTFKEDIQKAQVSGQGDSLHEHIANLAGSPAIKKGILQTVKVVDELVKVMGRHKPENIVIEMARENQTTQKGQKNSRERMKRIEEGIKELGSQILKEHPVENTQLQNEKLYLYYLQNGRDMYVDQELDINRLSDYDVDHIVPQSFLKDDSIDNKVLTRSDKARGKSDNVPSEEVVKKMKNYWRQLLNAKLITQRKFDNLTKAERGGLSELDKAGFIKRQLVETRQITKHVAQILDSRMNTKYDENDKLIREVKVITLKSKLVSDFRKDFQFYKVREINNYHHAHDAYLNAVVGTALIKKYPKLESEFVYGDYKVYDVRKMIAKSEQEIGKATAKYFFYSNIMNFFKTEITLANGEIRKRPLIETNGETGEIVWDKGRDFATVRKVLSMPQVNIVKKTEVQTGGFSKESILPKRNSDKLIARKKDWDPKKYGGFDSPTVAYSVLVVAKVEKGKSKKLKSVKELLGITIMERSSFEKNPIDFLEAKGYKEVKKDLIIKLPKYSLFELENGRKRMLASAGELQKGNELALPSKYVNFLYLASHYEKLKGSPEDNEQKQLFVEQHKHYLDEIIEQISEFSKRVILADANLDKVLSAYNKHRDKPIREQAENIIHLFTLTNLGAPAAFKYFDTTIDRKRYTSTKEVLDATLIHQSITGLYETRIDLSQLGGDGGGSSGSSGGVLNLEEEYRLHEKPVPSSIDPSWLQLFPTVWAERAGMGLANQVPPVVVELRSGASPVAVRQYPMSKEAREGIRPHIQKFLDLGVLVPCRSPWNTPLLPVKKPGTNDYRPVQDLREINKRVQDIHPTVPNPYNLLSSLPPSYTWYSVLDLKDAFFCLRLHPNSQPLFAFEWKDPEKGNTGQLTWTRLPQGFKNSPTLFDEALHRDLAPFRALNPQVVLLQYVDDLLVAAPTYEDCKKGTQKLLQELSKLGYRVSAKKAQLCQREVTYLGYLLKEGKRWLTPARKATVMKIPVPTTPRQVREFLGTAGFCRLWIPGFASLAAPLYPLTKESIPFIWTEEHQQAFDHIKKALLSAPALALPDLTKPFTLYIDERAGVARGVLTQTLGPWRRPVAYLSKKLDPVASGWPTCLKAVAAVALLLKDADKLTLGQNVTVIASHSLESIVRQPPDRWMTNARMTHYQSLLLNERVSFAPPAVLNPATLLPVESEATPVHRCSEILAEETGTRRDLEDQPLPGVPTWYTDGSSFITEGKRRAGAPIVDGKRTVWASSLPEGTSAQKAELVALTQALRLAEGKNINIYTDSRYAFATAHIHGAIYKQRGLLTSAGKDIKNKEEILALLEAIHLPRRVAIIHCPGHQRGSNPVATGNRRADEAAKQAALSTRVLAGTTKPAGKRTADGSEFEKRTADGSEFESPKKKAKVE

SEQ ID NO: 6299 - protein, 2213 aa, synthetic construct
MPAAKRVKLDGGDKKYSIGLDIGTNSVGWAVITDEYKVPSKKFKVLGNTDRHSIKKNLIGALLFDSGETAEATRLKRTARRRYTRRKNRICYLQEIFSNEMAKVDDSFFHRLEESFLVEEDKKHERHPIFGNIVDEVAYHEKYPTIYHLRKKLVDSTDKADLRLIYLALAHMIKFRGHFLIEGDLNPDNSDVDKLFIQLVQTYNQLFEENPINASGVDAKAILSARLSKSRRLENLIAQLPGEKKNGLFGNLIALSLGLTPNFKSNFDLAEDAKLQLSKDTYDDDLDNLLAQIGDQYADLFLAAKNLSDAILLSDILRVNTEITKAPLSASMIKRYDEHHQDLTLLKALVRQQLPEKYKEIFFDQSKNGYAGYIDGGASQEEFYKFIKPILEKMDGTEELLVKLNREDLLRKQRTFDNGSIPHQIHLGELHAILRRQEDFYPFLKDNREKIEKILTFRIPYYVGPLARGNSRFAWMTRKSEETITPWNFEEVVDKGASAQSFIERMTNFDKNLPNEKVLPKHSLLYEYFTVYNELTKVKYVTEGMRKPAFLSGEQKKAIVDLLFKTNRKVTVKQLKEDYFKKIECFDSVEISGVEDRFNASLGTYHDLLKIIKDKDFLDNEENEDILEDIVLTLTLFEDREMIEERLKTYAHLFDDKVMKQLKRRRYTGWGRLSRKLINGIRDKQSGKTILDFLKSDGFANRNFMQLIHDDSLTFKEDIQKAQVSGQGDSLHEHIANLAGSPAIKKGILQTVKVVDELVKVMGRHKPENIVIEMARENQTTQKGQKNSRERMKRIEEGIKELGSQILKEHPVENTQLQNEKLYLYYLQNGRDMYVDQELDINRLSDYDVDHIVPQSFLKDDSIDNKVLTRSDKARGKSDNVPSEEVVKKMKNYWRQLLNAKLITQRKFDNLTKAERGGLSELDKAGFIKRQLVETRQITKHVAQILDSRMNTKYDENDKLIREVKVITLKSKLVSDFRKDFQFYKVREINNYHHAHDAYLNAVVGTALIKKYPKLESEFVYGDYKVYDVRKMIAKSEQEIGKATAKYFFYSNIMNFFKTEITLANGEIRKRPLIETNGETGEIVWDKGRDFATVRKVLSMPQVNIVKKTEVQTGGFSKESILPKRNSDKLIARKKDWDPKKYGGFDSPTVAYSVLVVAKVEKGKSKKLKSVKELLGITIMERSSFEKNPIDFLEAKGYKEVKKDLIIKLPKYSLFELENGRKRMLASAGELQKGNELALPSKYVNFLYLASHYEKLKGSPEDNEQKQLFVEQHKHYLDEIIEQISEFSKRVILADANLDKVLSAYNKHRDKPIREQAENIIHLFTLTNLGAPAAFKYFDTTIDRKRYTSTKEVLDATLIHQSITGLYETRIDLSQLGGDGGGSSGSSGGTLGDQGSRGSDPLPEPRVTLTVEGIPTEFLVNTGAEHSVLTKPMGKMGSKRTVVAGATGSKVYPWTTKRLLKIGQKQVTHSFLVIPECPAPLLGRDLLTKLKAQIQFSTEGPQVTWEDRPAMCLVLNLEEEYRLHEKPVPPSIDPSWLQLFPMVWAEKAGMGLANQVPPVVVELKSDASPVAVRQYPMSKEAREGIRPHIQRFLDLGILVPCQSPWNTPLLPVKKPGTNDYRPVQDLREVNKRVQDIHPTVPNPYNLLSSLPPSHTWYSVLDLKDAFFCLKLHPNSQPLFAFEWRDPEKGNTGQLTWTRLPQGFKNSPTLFNEALHRDLASFRALNPQVVMLQYVDDLLVAAPTYRDCKEGTRRLLQELSKLGYRVSAKKAQLCREEVTYLGYLLKGGKRWLTPARKATVMKIPTPTTPRQVREFLGTAGFCRLWIPGFASLAAPLYPLTRPKVPFTWTEAHQEAFGRIKEALLSAPALALPDLTKPFALYVDEKEGVARGVLTQTLGPWRRPVAYLSKKLDPVASGWPTCLKAIAAVALLLKDADKLTLGQNVLVIAPHNLESIVRQPPDRWMTNARMTHYQSLLLNERVSFAPPAILNPATLLPVESDDTPIHICSEILAEETGTRPDLRDQPLPGVPAWYTDGSSFIMDGRRQAGAAIVDNKRTVWASNLPEGTSAQKAELIALTQALRLAEGKSINIYTDSRYAFATAHVHGAIYKQRGWLTSAGKDIKNKEEILALLEAIHLPKRVAIIHCPGHQRGTDPVATGNRKADEAAKQAAQSTRILTETTKNAGKRTADGSEFEKRTADGSEFESPKKKAKVE

SEQ ID NO: 6300 - protein, 2091 aa, synthetic construct
MPAAKRVKLDGGDKKYSIGLDIGTNSVGWAVITDEYKVPSKKFKVLGNTDRHSIKKNLIGALLFDSGETAEATRLKRTARRRYTRRKNRICYLQEIFSNEMAKVDDSFFHRLEESFLVEEDKKHERHPIFGNIVDEVAYHEKYPTIYHLRKKLVDSTDKADLRLIYLALAHMIKFRGHFLIEGDLNPDNSDVDKLFIQLVQTYNQLFEENPINASGVDAKAILSARLSKSRRLENLIAQLPGEKKNGLFGNLIALSLGLTPNFKSNFDLAEDAKLQLSKDTYDDDLDNLLAQIGDQYADLFLAAKNLSDAILLSDILRVNTEITKAPLSASMIKRYDEHHQDLTLLKALVRQQLPEKYKEIFFDQSKNGYAGYIDGGASQEEFYKFIKPILEKMDGTEELLVKLNREDLLRKQRTFDNGSIPHQIHLGELHAILRRQEDFYPFLKDNREKIEKILTFRIPYYVGPLARGNSRFAWMTRKSEETITPWNFEEVVDKGASAQSFIERMTNFDKNLPNEKVLPKHSLLYEYFTVYNELTKVKYVTEGMRKPAFLSGEQKKAIVDLLFKTNRKVTVKQLKEDYFKKIECFDSVEISGVEDRFNASLGTYHDLLKIIKDKDFLDNEENEDILEDIVLTLTLFEDREMIEERLKTYAHLFDDKVMKQLKRRRYTGWGRLSRKLINGIRDKQSGKTILDFLKSDGFANRNFMQLIHDDSLTFKEDIQKAQVSGQGDSLHEHIANLAGSPAIKKGILQTVKVVDELVKVMGRHKPENIVIEMARENQTTQKGQKNSRERMKRIEEGIKELGSQILKEHPVENTQLQNEKLYLYYLQNGRDMYVDQELDINRLSDYDVDHIVPQSFLKDDSIDNKVLTRSDKARGKSDNVPSEEVVKKMKNYWRQLLNAKLITQRKFDNLTKAERGGLSELDKAGFIKRQLVETRQITKHVAQILDSRMNTKYDENDKLIREVKVITLKSKLVSDFRKDFQFYKVREINNYHHAHDAYLNAVVGTALIKKYPKLESEFVYGDYKVYDVRKMIAKSEQEIGKATAKYFFYSNIMNFFKTEITLANGEIRKRPLIETNGETGEIVWDKGRDFATVRKVLSMPQVNIVKKTEVQTGGFSKESILPKRNSDKLIARKKDWDPKKYGGFDSPTVAYSVLVVAKVEKGKSKKLKSVKELLGITIMERSSFEKNPIDFLEAKGYKEVKKDLIIKLPKYSLFELENGRKRMLASAGELQKGNELALPSKYVNFLYLASHYEKLKGSPEDNEQKQLFVEQHKHYLDEIIEQISEFSKRVILADANLDKVLSAYNKHRDKPIREQAENIIHLFTLTNLGAPAAFKYFDTTIDRKRYTSTKEVLDATLIHQSITGLYETRIDLSQLGGDGGGSSGSSGGTLGIEDEYRLHETSTEPDVSLGSTWLSDFPQAWAETGGMGLAVRQAPLIIPLKATSTPVSIQQYPMSHEARLGIKPHIQRLLDQGILVPCQSPWNTPLLPVKKPGTNDYRPVQDLREVNKRVEDIHPTVPNPYNLLSGLPPSHQWYTVLDLKDAFFCLRLHPTSQPLFAFEWRDPGMGISGQLTWTRLPQGFKNSPTLFNEALHRDLADFRIQHPDLILLQYVDDILLAATSELDCQQGTRALLQTLGDLGYRASAKKAQICQKQVKYLGYLLREGQRWLTEARKETVMGQPVPKTPRQLREFLGTAGFCRLWIPGFAEMAAPLYPLTKPGTLFSWGPDQQKAYQEIKQALLTAPALGLPDLTKPFELFVDEKQGYAKGVLTQKLGPWRRPVAYLSKKLDPVAAGWPPCLRMVAAIAVLTKDAGKLTMGQPLVILAPHAVEALVKQPPDRWLSNARMTHYQAMLLDTDRVQFGPVVALNPATLLPLPEEGAPHDCLEILAETHGTRPDLTDQPIPDADHTWYTDGSSFLQEGQRKAGAAVTTETEVIWAGALPAGTSAQRAELIALTQALKMAEGKRLNVYTDSRYAFATAHIHGEIYRRRGWLTSEGREIKNKSEILALLKALFLPKRLSIIHCLGHQKGDSAEARGNRLADQAAREAAIKTPPDTSTLLAGKRTADGSEFEKRTADGSEFESPKKKAKVE

SEQ ID NO: 6301 - protein, 2091 aa, synthetic construct
MPAAKRVKLDGGDKKYSIGLDIGTNSVGWAVITDEYKVPSKKFKVLGNTDRHSIKKNLIGALLFDSGETAEATRLKRTARRRYTRRKNRICYLQEIFSNEMAKVDDSFFHRLEESFLVEEDKKHERHPIFGNIVDEVAYHEKYPTIYHLRKKLVDSTDKADLRLIYLALAHMIKFRGHFLIEGDLNPDNSDVDKLFIQLVQTYNQLFEENPINASGVDAKAILSARLSKSRRLENLIAQLPGEKKNGLFGNLIALSLGLTPNFKSNFDLAEDAKLQLSKDTYDDDLDNLLAQIGDQYADLFLAAKNLSDAILLSDILRVNTEITKAPLSASMIKRYDEHHQDLTLLKALVRQQLPEKYKEIFFDQSKNGYAGYIDGGASQEEFYKFIKPILEKMDGTEELLVKLNREDLLRKQRTFDNGSIPHQIHLGELHAILRRQEDFYPFLKDNREKIEKILTFRIPYYVGPLARGNSRFAWMTRKSEETITPWNFEEVVDKGASAQSFIERMTNFDKNLPNEKVLPKHSLLYEYFTVYNELTKVKYVTEGMRKPAFLSGEQKKAIVDLLFKTNRKVTVKQLKEDYFKKIECFDSVEISGVEDRFNASLGTYHDLLKIIKDKDFLDNEENEDILEDIVLTLTLFEDREMIEERLKTYAHLFDDKVMKQLKRRRYTGWGRLSRKLINGIRDKQSGKTILDFLKSDGFANRNFMQLIHDDSLTFKEDIQKAQVSGQGDSLHEHIANLAGSPAIKKGILQTVKVVDELVKVMGRHKPENIVIEMARENQTTQKGQKNSRERMKRIEEGIKELGSQILKEHPVENTQLQNEKLYLYYLQNGRDMYVDQELDINRLSDYDVDHIVPQSFLKDDSIDNKVLTRSDKARGKSDNVPSEEVVKKMKNYWRQLLNAKLITQRKFDNLTKAERGGLSELDKAGFIKRQLVETRQITKHVAQILDSRMNTKYDENDKLIREVKVITLKSKLVSDFRKDFQFYKVREINNYHHAHDAYLNAVVGTALIKKYPKLESEFVYGDYKVYDVRKMIAKSEQEIGKATAKYFFYSNIMNFFKTEITLANGEIRKRPLIETNGETGEIVWDKGRDFATVRKVLSMPQVNIVKKTEVQTGGFSKESILPKRNSDKLIARKKDWDPKKYGGFDSPTVAYSVLVVAKVEKGKSKKLKSVKELLGITIMERSSFEKNPIDFLEAKGYKEVKKDLIIKLPKYSLFELENGRKRMLASAGELQKGNELALPSKYVNFLYLASHYEKLKGSPEDNEQKQLFVEQHKHYLDEIIEQISEFSKRVILADANLDKVLSAYNKHRDKPIREQAENIIHLFTLTNLGAPAAFKYFDTTIDRKRYTSTKEVLDATLIHQSITGLYETRIDLSQLGGDGGGSSGSSGGTLNIEDEHRLHETSKEPDVSLGSTWLSDFPQAWAETGGMGLAVRQAPLIIPLKATSTPVSIKQYPMSQEARLGIKPHIQRLLDQGILVPCQSPWNTPLLPVKKPGTNDYRPVQDLREVNKRVEDIHPTVPNPYNLLSGLPPSHQWYTVLDLKDAFFCLRLHPTSQPLFAFEWRDPEMGISGQLTWTRLPQGFKNSPTLFDEALHRDLADFRIQHPDLILLQYVDDLLLAATSELDCQQGTRALLQTLGNLGYRASAKKAQICQKQVKYLGYLLKEGQRWLTEARKETVMGQPTPKTPRQLREFLGTAGFCRLWIPGFAEMAAPLYPLTKTGTLFNWGPDQQKAYQEIKQALLTAPALGLPDLTKPFELFVDEKQGYAKGVLTQKLGPWRRPVAYLSKKLDPVAAGWPPCLRMVAAIAVLTKDAGKLTMGQPLVILAPHAVEALVKQPPDRWLSNARMTHYQALLLDTDRVQFGPVVALNPATLLPLPEEGLQHNCLDILAEAHGTRPDLTDQPLPDADHTWYTDGSSLLQEGQRKAGAAVTTETEVIWAKALPAGTSAQRAELIALTQALKMAEGKKLNVYTDSRYAFATAHIHGEIYRRRGLLTSEGKEIKNKDEILALLKALFLPKRLSIIHCPGHQKGHSAEARGNRMADQAARKAAITETPDTSTLLAGKRTADGSEFEKRTADGSEFESPKKKAKVE

SEQ ID NO: 6302 - protein, 2089 aa, synthetic construct
MPAAKRVKLDGGDKKYSIGLDIGTNSVGWAVITDEYKVPSKKFKVLGNTDRHSIKKNLIGALLFDSGETAEATRLKRTARRRYTRRKNRICYLQEIFSNEMAKVDDSFFHRLEESFLVEEDKKHERHPIFGNIVDEVAYHEKYPTIYHLRKKLVDSTDKADLRLIYLALAHMIKFRGHFLIEGDLNPDNSDVDKLFIQLVQTYNQLFEENPINASGVDAKAILSARLSKSRRLENLIAQLPGEKKNGLFGNLIALSLGLTPNFKSNFDLAEDAKLQLSKDTYDDDLDNLLAQIGDQYADLFLAAKNLSDAILLSDILRVNTEITKAPLSASMIKRYDEHHQDLTLLKALVRQQLPEKYKEIFFDQSKNGYAGYIDGGASQEEFYKFIKPILEKMDGTEELLVKLNREDLLRKQRTFDNGSIPHQIHLGELHAILRRQEDFYPFLKDNREKIEKILTFRIPYYVGPLARGNSRFAWMTRKSEETITPWNFEEVVDKGASAQSFIERMTNFDKNLPNEKVLPKHSLLYEYFTVYNELTKVKYVTEGMRKPAFLSGEQKKAIVDLLFKTNRKVTVKQLKEDYFKKIECFDSVEISGVEDRFNASLGTYHDLLKIIKDKDFLDNEENEDILEDIVLTLTLFEDREMIEERLKTYAHLFDDKVMKQLKRRRYTGWGRLSRKLINGIRDKQSGKTILDFLKSDGFANRNFMQLIHDDSLTFKEDIQKAQVSGQGDSLHEHIANLAGSPAIKKGILQTVKVVDELVKVMGRHKPENIVIEMARENQTTQKGQKNSRERMKRIEEGIKELGSQILKEHPVENTQLQNEKLYLYYLQNGRDMYVDQELDINRLSDYDVDHIVPQSFLKDDSIDNKVLTRSDKARGKSDNVPSEEVVKKMKNYWRQLLNAKLITQRKFDNLTKAERGGLSELDKAGFIKRQLVETRQITKHVAQILDSRMNTKYDENDKLIREVKVITLKSKLVSDFRKDFQFYKVREINNYHHAHDAYLNAVVGTALIKKYPKLESEFVYGDYKVYDVRKMIAKSEQEIGKATAKYFFYSNIMNFFKTEITLANGEIRKRPLIETNGETGEIVWDKGRDFATVRKVLSMPQVNIVKKTEVQTGGFSKESILPKRNSDKLIARKKDWDPKKYGGFDSPTVAYSVLVVAKVEKGKSKKLKSVKELLGITIMERSSFEKNPIDFLEAKGYKEVKKDLIIKLPKYSLFELENGRKRMLASAGELQKGNELALPSKYVNFLYLASHYEKLKGSPEDNEQKQLFVEQHKHYLDEIIEQISEFSKRVILADANLDKVLSAYNKHRDKPIREQAENIIHLFTLTNLGAPAAFKYFDTTIDRKRYTSTKEVLDATLIHQSITGLYETRIDLSQLGGDGGGSSGSSGGVLNLEEEYRLHEKPVPSSIDPSWLQLFPTVWAERAGMGLANQVPPVVVELRSGASPVAVRQYPMSKEAREGIRPHIQRFLDLGVLVPCQSPWNTPLLPVKKPGTNDYRPVQDLREINKRVQDIHPTVPNPYNLLSSLPPSHTWYSVLDLKDAFFCLKLHPNSQPLFAFEWRDPEKGNTGQLTWTRLPQGFKNSPTLFNEALHRDLAPFRALNPQVVLLQYVDDLLVAAPTYRDCKEGTQKLLQELSKLGYRVSAKKAQLCQKEVTYLGYLLKEGKRWLTPARKATVMKIPPPTTPRQVREFLGTAGFCRLWIPGFASLAAPLYPLTKPSIPFIWTEEHQKAFDRIKEALLSAPALALPDLTKPFTLYVDERAGVARGVLTQTLGPWRRPVAYLSKKLDPVASGWPTCLKAVAAVALLLKDADKLTLGQNVTVIASHSLESIVRQPPDRWMTNARMTHYQSLLLNERVSFAPPAVLNPATLLPVESEATPVHRCSEILAEETGTRRDLKDQPLPGVPAWYTDGSSFIAEGKRRAGAAIVDGKRTVWASSLPEGTSAQKAELVALTQALRLAEGKDINIYTDSRYAFATAHIHGAIYKQRGWLTSAGKDIKNKEEILALLEAIHLPKRVAIIHCPGHQKGNDPVATGNRRADEAAKQAALSTRVLAETTKPAGKRTADGSEFEKRTADGSEFESPKKKAKVE

SEQ ID NO: 6303 - protein, 2091 aa, synthetic construct
MPAAKRVKLDGGDKKYSIGLDIGTNSVGWAVITDEYKVPSKKFKVLGNTDRHSIKKNLIGALLFDSGETAEATRLKRTARRRYTRRKNRICYLQEIFSNEMAKVDDSFFHRLEESFLVEEDKKHERHPIFGNIVDEVAYHEKYPTIYHLRKKLVDSTDKADLRLIYLALAHMIKFRGHFLIEGDLNPDNSDVDKLFIQLVQTYNQLFEENPINASGVDAKAILSARLSKSRRLENLIAQLPGEKKNGLFGNLIALSLGLTPNFKSNFDLAEDAKLQLSKDTYDDDLDNLLAQIGDQYADLFLAAKNLSDAILLSDILRVNTEITKAPLSASMIKRYDEHHQDLTLLKALVRQQLPEKYKEIFFDQSKNGYAGYIDGGASQEEFYKFIKPILEKMDGTEELLVKLNREDLLRKQRTFDNGSIPHQIHLGELHAILRRQEDFYPFLKDNREKIEKILTFRIPYYVGPLARGNSRFAWMTRKSEETITPWNFEEVVDKGASAQSFIERMTNFDKNLPNEKVLPKHSLLYEYFTVYNELTKVKYVTEGMRKPAFLSGEQKKAIVDLLFKTNRKVTVKQLKEDYFKKIECFDSVEISGVEDRFNASLGTYHDLLKIIKDKDFLDNEENEDILEDIVLTLTLFEDREMIEERLKTYAHLFDDKVMKQLKRRRYTGWGRLSRKLINGIRDKQSGKTILDFLKSDGFANRNFMQLIHDDSLTFKEDIQKAQVSGQGDSLHEHIANLAGSPAIKKGILQTVKVVDELVKVMGRHKPENIVIEMARENQTTQKGQKNSRERMKRIEEGIKELGSQILKEHPVENTQLQNEKLYLYYLQNGRDMYVDQELDINRLSDYDVDHIVPQSFLKDDSIDNKVLTRSDKARGKSDNVPSEEVVKKMKNYWRQLLNAKLITQRKFDNLTKAERGGLSELDKAGFIKRQLVETRQITKHVAQILDSRMNTKYDENDKLIREVKVITLKSKLVSDFRKDFQFYKVREINNYHHAHDAYLNAVVGTALIKKYPKLESEFVYGDYKVYDVRKMIAKSEQEIGKATAKYFFYSNIMNFFKTEITLANGEIRKRPLIETNGETGEIVWDKGRDFATVRKVLSMPQVNIVKKTEVQTGGFSKESILPKRNSDKLIARKKDWDPKKYGGFDSPTVAYSVLVVAKVEKGKSKKLKSVKELLGITIMERSSFEKNPIDFLEAKGYKEVKKDLIIKLPKYSLFELENGRKRMLASAGELQKGNELALPSKYVNFLYLASHYEKLKGSPEDNEQKQLFVEQHKHYLDEIIEQISEFSKRVILADANLDKVLSAYNKHRDKPIREQAENIIHLFTLTNLGAPAAFKYFDTTIDRKRYTSTKEVLDATLIHQSITGLYETRIDLSQLGGDGGGSSGSSGGTLNIEDEYRLHETSKEPDVPLGSTWLSDFPQAWAETGGMGLAVRQAPLIIPLKATSTPVSIKQYPMSQEARLGIKPHIQRLLDQGILVPCQSPWNTPLLPVKKPGTNDYRPVQDLREVNKRVEDIHPTVPNPYNLLSGLPPSHQWYTVLDLKDAFFCLRLHPTSQPLFAFEWRDPEMGISGQLTWTRLPQGFKNSPTLFNEALHRDLADFRIQHPDLILLQYVDDLLLAATSEQDCQRGTRALLQTLGNLGYRASAKKAQICQKQVKYLGYLLKEGQRWLTEARKETVMGQPTPKTPRQLREFLGTAGFCRLWIPGFAEMAAPLYPLTKPGTLFNWGPDQQKAYQEIKQALLTAPALGLPDLTKPFELFVDEKQGYAKGVLTQKLGPWRRPVAYLSKKLDPVAAGWPPCLRMVAAIAVLTKDAGKLTMGQPLVILAPHAVEALVKQPPDRWLSNARMTHYQAMLLDTDRVQFGPVVALNPATLLPLPEKEAPHDCLEILAETHGTRPDLTDQPIPDADYTWYTDGSSFLQEGQRRAGAAVTTETEVIWARALPAGTSAQRAELIALTQALKMAEGKKLNVYTDSRYAFATAHVHGEIYRRRGWLTSEGREIKNKNEILALLKALFLPKRLSIIHCPGHQKGNSAEARGNRMADQAAREAAMKAVLETSTLLAGKRTADGSEFEKRTADGSEFESPKKKAKVE

SEQ ID NO: 6304 - protein, 2096 aa, synthetic construct
MPAAKRVKLDGGDKKYSIGLDIGTNSVGWAVITDEYKVPSKKFKVLGNTDRHSIKKNLIGALLFDSGETAEATRLKRTARRRYTRRKNRICYLQEIFSNEMAKVDDSFFHRLEESFLVEEDKKHERHPIFGNIVDEVAYHEKYPTIYHLRKKLVDSTDKADLRLIYLALAHMIKFRGHFLIEGDLNPDNSDVDKLFIQLVQTYNQLFEENPINASGVDAKAILSARLSKSRRLENLIAQLPGEKKNGLFGNLIALSLGLTPNFKSNFDLAEDAKLQLSKDTYDDDLDNLLAQIGDQYADLFLAAKNLSDAILLSDILRVNTEITKAPLSASMIKRYDEHHQDLTLLKALVRQQLPEKYKEIFFDQSKNGYAGYIDGGASQEEFYKFIKPILEKMDGTEELLVKLNREDLLRKQRTFDNGSIPHQIHLGELHAILRRQEDFYPFLKDNREKIEKILTFRIPYYVGPLARGNSRFAWMTRKSEETITPWNFEEVVDKGASAQSFIERMTNFDKNLPNEKVLPKHSLLYEYFTVYNELTKVKYVTEGMRKPAFLSGEQKKAIVDLLFKTNRKVTVKQLKEDYFKKIECFDSVEISGVEDRFNASLGTYHDLLKIIKDKDFLDNEENEDILEDIVLTLTLFEDREMIEERLKTYAHLFDDKVMKQLKRRRYTGWGRLSRKLINGIRDKQSGKTILDFLKSDGFANRNFMQLIHDDSLTFKEDIQKAQVSGQGDSLHEHIANLAGSPAIKKGILQTVKVVDELVKVMGRHKPENIVIEMARENQTTQKGQKNSRERMKRIEEGIKELGSQILKEHPVENTQLQNEKLYLYYLQNGRDMYVDQELDINRLSDYDVDHIVPQSFLKDDSIDNKVLTRSDKARGKSDNVPSEEVVKKMKNYWRQLLNAKLITQRKFDNLTKAERGGLSELDKAGFIKRQLVETRQITKHVAQILDSRMNTKYDENDKLIREVKVITLKSKLVSDFRKDFQFYKVREINNYHHAHDAYLNAVVGTALIKKYPKLESEFVYGDYKVYDVRKMIAKSEQEIGKATAKYFFYSNIMNFFKTEITLANGEIRKRPLIETNGETGEIVWDKGRDFATVRKVLSMPQVNIVKKTEVQTGGFSKESILPKRNSDKLIARKKDWDPKKYGGFDSPTVAYSVLVVAKVEKGKSKKLKSVKELLGITIMERSSFEKNPIDFLEAKGYKEVKKDLIIKLPKYSLFELENGRKRMLASAGELQKGNELALPSKYVNFLYLASHYEKLKGSPEDNEQKQLFVEQHKHYLDEIIEQISEFSKRVILADANLDKVLSAYNKHRDKPIREQAENIIHLFTLTNLGAPAAFKYFDTTIDRKRYTSTKEVLDATLIHQSITGLYETRIDLSQLGGDGGGSSGSSGSSGGTAPLEEEYRLFLEAPIQNVTLLEQWKREIPKVWAEINPPGLASTQAPIHVQLLSTALPVRVRQYPITLEAKRSLRETIRKFRAAGILRPVHSPWNTPLLPVRKSGTSEYRMVQDLREVNKRVETIHPTVPNPYTLLSLLPPDRIWYSVLDLKDAFFCIPLAPESQLIFAFEWADAEEGESGQLTWTRLPQGFKNSPTLFNEALNRDLQGFRLDHPSVSLLQYVDDLLIAADTQAACLSATRDLLMTLAELGYRVSGKKAQLCQEEVTYLGFKIHKGSRSLSNSRTQAILQIPVPKTKRQVREFLGTIGYCRLWIPGFAELAQPLYAATRPGNDPLVWGEKEEEAFQSLKLALTQPPALALPSLDKPFQLFVEETSGAAKGVLTQALGPWKRPVAYLSKRLDPVAAGWPRCLRAIAAAALLTREASKLTFGQDIEITSSHNLESLLRSPPDKWLTNARITQYQVLLLDPPRVRFKQTAALNPATLLPETDDTLPIHHCLDTLDSLTSTRPDLTDQPLAQAEATLFTDGSSYIRDGKRYAGAAVVTLDSVIWAEPLPIGTSAQKAELIALTKALEWSKDKSVNIYTDSRYAFATLHVHGMIYRERGWLTAGGKAIKNAPEILALLTAVWLPKRVAVMHCKGHQKDDAPTSTGNRRADEVAREVAIRPLSTQATISAGKRTADGSEFEKRTADGSEFESPKKKAKVE

SEQ ID NO: 6305 - protein, 2096 aa, synthetic construct
MPAAKRVKLDGGDKKYSIGLDIGTNSVGWAVITDEYKVPSKKFKVLGNTDRHSIKKNLIGALLFDSGETAEATRLKRTARRRYTRRKNRICYLQEIFSNEMAKVDDSFFHRLEESFLVEEDKKHERHPIFGNIVDEVAYHEKYPTIYHLRKKLVDSTDKADLRLIYLALAHMIKFRGHFLIEGDLNPDNSDVDKLFIQLVQTYNQLFEENPINASGVDAKAILSARLSKSRRLENLIAQLPGEKKNGLFGNLIALSLGLTPNFKSNFDLAEDAKLQLSKDTYDDDLDNLLAQIGDQYADLFLAAKNLSDAILLSDILRVNTEITKAPLSASMIKRYDEHHQDLTLLKALVRQQLPEKYKEIFFDQSKNGYAGYIDGGASQEEFYKFIKPILEKMDGTEELLVKLNREDLLRKQRTFDNGSIPHQIHLGELHAILRRQEDFYPFLKDNREKIEKILTFRIPYYVGPLARGNSRFAWMTRKSEETITPWNFEEVVDKGASAQSFIERMTNFDKNLPNEKVLPKHSLLYEYFTVYNELTKVKYVTEGMRKPAFLSGEQKKAIVDLLFKTNRKVTVKQLKEDYFKKIECFDSVEISGVEDRFNASLGTYHDLLKIIKDKDFLDNEENEDILEDIVLTLTLFEDREMIEERLKTYAHLFDDKVMKQLKRRRYTGWGRLSRKLINGIRDKQSGKTILDFLKSDGFANRNFMQLIHDDSLTFKEDIQKAQVSGQGDSLHEHIANLAGSPAIKKGILQTVKVVDELVKVMGRHKPENIVIEMARENQTTQKGQKNSRERMKRIEEGIKELGSQILKEHPVENTQLQNEKLYLYYLQNGRDMYVDQELDINRLSDYDVDHIVPQSFLKDDSIDNKVLTRSDKARGKSDNVPSEEVVKKMKNYWRQLLNAKLITQRKFDNLTKAERGGLSELDKAGFIKRQLVETRQITKHVAQILDSRMNTKYDENDKLIREVKVITLKSKLVSDFRKDFQFYKVREINNYHHAHDAYLNAVVGTALIKKYPKLESEFVYGDYKVYDVRKMIAKSEQEIGKATAKYFFYSNIMNFFKTEITLANGEIRKRPLIETNGETGEIVWDKGRDFATVRKVLSMPQVNIVKKTEVQTGGFSKESILPKRNSDKLIARKKDWDPKKYGGFDSPTVAYSVLVVAKVEKGKSKKLKSVKELLGITIMERSSFEKNPIDFLEAKGYKEVKKDLIIKLPKYSLFELENGRKRMLASAGELQKGNELALPSKYVNFLYLASHYEKLKGSPEDNEQKQLFVEQHKHYLDEIIEQISEFSKRVILADANLDKVLSAYNKHRDKPIREQAENIIHLFTLTNLGAPAAFKYFDTTIDRKRYTSTKEVLDATLIHQSITGLYETRIDLSQLGGDGGGSSGSSGSSGGTAPLEEEYRLFLEAPIQNVTLLEQWKREIPKVWAEINPPGLASTQAPIHVQLLSTALPVRVRQYPITLEAKRSLRETIRKFRAAGILRPVHSPWNTPLLPVRKSGTSEYRMVQDLREVNKRVETIHPTVPNPYTLLSLLPPDRIWYSVLDLKDAFFCIPLAPESQLIFAFEWADAEEGESGQLTWTRLPQGFKNSPTLFNEALNRDLQGFRLDHPSVSLLQYVDDLLIAADTQAACLSATRDLLMTLAELGYRVSGKKAQLCQEEVTYLGFKIHKGSRSLSNSRTQAILQIPVPKTKRQVREFLGKIGYCRLFIPGFAELAQPLYAATRPGNDPLVWGEKEEEAFQSLKLALTQPPALALPSLDKPFQLFVEETSGAAKGVLTQALGPWKRPVAYLSKRLDPVAAGWPRCLRAIAAAALLTREASKLTFGQDIEITSSHNLESLLRSPPDKWLTNARITQYQVLLLDPPRVRFKQTAALNPATLLPETDDTLPIHHCLDTLDSLTSTRPDLTDQPLAQAEATLFTDGSSYIRDGKRYAGAAVVTLDSVIWAEPLPIGTSAQKAELIALTKALEWSKDKSVNIYTDSRYAFATLHVHGMIYRERGWLTAGGKAIKNAPEILALLTAVWLPKRVAVMHCKGHQKDDAPTSTGNRRADEVAREVAIRPLSTQATISAGKRTADGSEFEKRTADGSEFESPKKKAKVE

SEQ ID NO: 6306 - protein, 2085 aa, synthetic construct
MPAAKRVKLDGGDKKYSIGLDIGTNSVGWAVITDEYKVPSKKFKVLGNTDRHSIKKNLIGALLFDSGETAEATRLKRTARRRYTRRKNRICYLQEIFSNEMAKVDDSFFHRLEESFLVEEDKKHERHPIFGNIVDEVAYHEKYPTIYHLRKKLVDSTDKADLRLIYLALAHMIKFRGHFLIEGDLNPDNSDVDKLFIQLVQTYNQLFEENPINASGVDAKAILSARLSKSRRLENLIAQLPGEKKNGLFGNLIALSLGLTPNFKSNFDLAEDAKLQLSKDTYDDDLDNLLAQIGDQYADLFLAAKNLSDAILLSDILRVNTEITKAPLSASMIKRYDEHHQDLTLLKALVRQQLPEKYKEIFFDQSKNGYAGYIDGGASQEEFYKFIKPILEKMDGTEELLVKLNREDLLRKQRTFDNGSIPHQIHLGELHAILRRQEDFYPFLKDNREKIEKILTFRIPYYVGPLARGNSRFAWMTRKSEETITPWNFEEVVDKGASAQSFIERMTNFDKNLPNEKVLPKHSLLYEYFTVYNELTKVKYVTEGMRKPAFLSGEQKKAIVDLLFKTNRKVTVKQLKEDYFKKIECFDSVEISGVEDRFNASLGTYHDLLKIIKDKDFLDNEENEDILEDIVLTLTLFEDREMIEERLKTYAHLFDDKVMKQLKRRRYTGWGRLSRKLINGIRDKQSGKTILDFLKSDGFANRNFMQLIHDDSLTFKEDIQKAQVSGQGDSLHEHIANLAGSPAIKKGILQTVKVVDELVKVMGRHKPENIVIEMARENQTTQKGQKNSRERMKRIEEGIKELGSQILKEHPVENTQLQNEKLYLYYLQNGRDMYVDQELDINRLSDYDVDHIVPQSFLKDDSIDNKVLTRSDKARGKSDNVPSEEVVKKMKNYWRQLLNAKLITQRKFDNLTKAERGGLSELDKAGFIKRQLVETRQITKHVAQILDSRMNTKYDENDKLIREVKVITLKSKLVSDFRKDFQFYKVREINNYHHAHDAYLNAVVGTALIKKYPKLESEFVYGDYKVYDVRKMIAKSEQEIGKATAKYFFYSNIMNFFKTEITLANGEIRKRPLIETNGETGEIVWDKGRDFATVRKVLSMPQVNIVKKTEVQTGGFSKESILPKRNSDKLIARKKDWDPKKYGGFDSPTVAYSVLVVAKVEKGKSKKLKSVKELLGITIMERSSFEKNPIDFLEAKGYKEVKKDLIIKLPKYSLFELENGRKRMLASAGELQKGNELALPSKYVNFLYLASHYEKLKGSPEDNEQKQLFVEQHKHYLDEIIEQISEFSKRVILADANLDKVLSAYNKHRDKPIREQAENIIHLFTLTNLGAPAAFKYFDTTIDRKRYTSTKEVLDATLIHQSITGLYETRIDLSQLGGDGGGSSGSSGSSGGVPWILKKPLELTIKLDLEEQQGTLLNNSILSKKGKEELKQLFEKYSALWQSWENQVGHRRIRPHKIATGTVKPTPQKQYHINPKAKPDIQIVINDLLKQGVLIQKESTMNTPVYPVPKPNGRWRMVLDYRAVNKVTPLIAVQNQHSYGILGSLFKGRYKTTIDLSNGFWAHPIVPEDYWITAFTWQGKQYCWTVLPQGFLNSPGLFTGDVVDLLQGIPNVEVYVDDVYISHDSEKEHLEYLDILFNRLKEAGYIISLKKSNIANSIVDFLGFQITNEGRGLTDTFKEKLENITAPTTLKQLQSILGLLNFARNFIPDFTELIAPLYALIPKSTKNYVPWQIEHSTTLETLITKLNGAEYLQGRKGDKTLIMKVNASYTTGYIRYYNEGEKKPISYVSIVFSKTELKFTELEKLLTTVHKGLLKALDLSMGQNIHVYSPIVSMQNIQKTPQTAKKALASRWLSWLSYLEDPRIRFFYDPQMPALKDLPAVDTGKDNKKHPSNFQHIFYTDGSAITSPTKEGHLNAGMGIVYFINKDGNLQKQQEWSISLGNHTAQFAEIAAFEFALKKCLPLGGNILVVTDSNYVAKAYNEELDVWASNGFVNNRKKPLKHISKWKSVADLKRLRPDVVVTHEPGHQKLDSSPHAYGNNLADQLATQASFKVHAGKRTADGSEFEKRTADGSEFESPKKKAKVE

SEQ ID NO: 6307 - protein, 2125 aa, synthetic construct
MPAAKRVKLDGGDKKYSIGLDIGTNSVGWAVITDEYKVPSKKFKVLGNTDRHSIKKNLIGALLFDSGETAEATRLKRTARRRYTRRKNRICYLQEIFSNEMAKVDDSFFHRLEESFLVEEDKKHERHPIFGNIVDEVAYHEKYPTIYHLRKKLVDSTDKADLRLIYLALAHMIKFRGHFLIEGDLNPDNSDVDKLFIQLVQTYNQLFEENPINASGVDAKAILSARLSKSRRLENLIAQLPGEKKNGLFGNLIALSLGLTPNFKSNFDLAEDAKLQLSKDTYDDDLDNLLAQIGDQYADLFLAAKNLSDAILLSDILRVNTEITKAPLSASMIKRYDEHHQDLTLLKALVRQQLPEKYKEIFFDQSKNGYAGYIDGGASQEEFYKFIKPILEKMDGTEELLVKLNREDLLRKQRTFDNGSIPHQIHLGELHAILRRQEDFYPFLKDNREKIEKILTFRIPYYVGPLARGNSRFAWMTRKSEETITPWNFEEVVDKGASAQSFIERMTNFDKNLPNEKVLPKHSLLYEYFTVYNELTKVKYVTEGMRKPAFLSGEQKKAIVDLLFKTNRKVTVKQLKEDYFKKIECFDSVEISGVEDRFNASLGTYHDLLKIIKDKDFLDNEENEDILEDIVLTLTLFEDREMIEERLKTYAHLFDDKVMKQLKRRRYTGWGRLSRKLINGIRDKQSGKTILDFLKSDGFANRNFMQLIHDDSLTFKEDIQKAQVSGQGDSLHEHIANLAGSPAIKKGILQTVKVVDELVKVMGRHKPENIVIEMARENQTTQKGQKNSRERMKRIEEGIKELGSQILKEHPVENTQLQNEKLYLYYLQNGRDMYVDQELDINRLSDYDVDHIVPQSFLKDDSIDNKVLTRSDKARGKSDNVPSEEVVKKMKNYWRQLLNAKLITQRKFDNLTKAERGGLSELDKAGFIKRQLVETRQITKHVAQILDSRMNTKYDENDKLIREVKVITLKSKLVSDFRKDFQFYKVREINNYHHAHDAYLNAVVGTALIKKYPKLESEFVYGDYKVYDVRKMIAKSEQEIGKATAKYFFYSNIMNFFKTEITLANGEIRKRPLIETNGETGEIVWDKGRDFATVRKVLSMPQVNIVKKTEVQTGGFSKESILPKRNSDKLIARKKDWDPKKYGGFDSPTVAYSVLVVAKVEKGKSKKLKSVKELLGITIMERSSFEKNPIDFLEAKGYKEVKKDLIIKLPKYSLFELENGRKRMLASAGELQKGNELALPSKYVNFLYLASHYEKLKGSPEDNEQKQLFVEQHKHYLDEIIEQISEFSKRVILADANLDKVLSAYNKHRDKPIREQAENIIHLFTLTNLGAPAAFKYFDTTIDRKRYTSTKEVLDATLIHQSITGLYETRIDLSQLGGDGGGSSGSSGSSGGLLGRDLLTKLKAQIQFSTEGPQVTWEDRPAMCLVLNLEEEYRLHEKPVPPSIDPSWLQLFPMVWAEKAGMGLANQVPPVVVELKSDASPVAVRQYPMSKEAREGIRPHIQRFLDLGILVPCQSPWNTPLLPVKKPGTNDYRPVQDLREVNKRVQDIHPTVPNPYNLLSSLPPSHTWYSVLDLKDAFFCLKLHPNSQPLFAFEWRDPEKGNTGQLTWTRLPQGFKNSPTLFNEALHRDLASFRALNPQVVMLQYVDDLLVAAPTYRDCKEGTRRLLQELSKLGYRVSAKKAQLCREEVTYLGYLLKGGKRWLTPARKATVMKIPTPTTPRQVREFLGTAGFCRLWIPGFASLAAPLYPLTRPKVPFTWTEAHQEAFGRIKEALLSAPALALPDLTKPFALYVDEKEGVARGVLTQTLGPWRRPVAYLSKKLDPVASGWPTCLKAIAAVALLLKDADKLTLGQNVLVIAPHNLESIVRQPPDRWMTNARMTHYQSLLLNERVSFAPPAILNPATLLPVESDDTPIHICSEILAEETGTRPDLRDQPLPGVPAWYTDGSSFIMDGRRQAGAAIVDNKRTVWASNLPEGTSAQKAELIALTQALRLAEGKSINIYTDSRYAFATAHVHGAIYKQRGWLTSAGKDIKNKEEILALLEAIHLPKRVAIIHCPGHQRGTDPVATGNRKADEAAKQAAQSTRILTETTKNAGKRTADGSEFEKRTADGSEFESPKKKAKVE

SEQ ID NO: 6308 - protein, 2094 aa, synthetic construct
MPAAKRVKLDGGDKKYSIGLDIGTNSVGWAVITDEYKVPSKKFKVLGNTDRHSIKKNLIGALLFDSGETAEATRLKRTARRRYTRRKNRICYLQEIFSNEMAKVDDSFFHRLEESFLVEEDKKHERHPIFGNIVDEVAYHEKYPTIYHLRKKLVDSTDKADLRLIYLALAHMIKFRGHFLIEGDLNPDNSDVDKLFIQLVQTYNQLFEENPINASGVDAKAILSARLSKSRRLENLIAQLPGEKKNGLFGNLIALSLGLTPNFKSNFDLAEDAKLQLSKDTYDDDLDNLLAQIGDQYADLFLAAKNLSDAILLSDILRVNTEITKAPLSASMIKRYDEHHQDLTLLKALVRQQLPEKYKEIFFDQSKNGYAGYIDGGASQEEFYKFIKPILEKMDGTEELLVKLNREDLLRKQRTFDNGSIPHQIHLGELHAILRRQEDFYPFLKDNREKIEKILTFRIPYYVGPLARGNSRFAWMTRKSEETITPWNFEEVVDKGASAQSFIERMTNFDKNLPNEKVLPKHSLLYEYFTVYNELTKVKYVTEGMRKPAFLSGEQKKAIVDLLFKTNRKVTVKQLKEDYFKKIECFDSVEISGVEDRFNASLGTYHDLLKIIKDKDFLDNEENEDILEDIVLTLTLFEDREMIEERLKTYAHLFDDKVMKQLKRRRYTGWGRLSRKLINGIRDKQSGKTILDFLKSDGFANRNFMQLIHDDSLTFKEDIQKAQVSGQGDSLHEHIANLAGSPAIKKGILQTVKVVDELVKVMGRHKPENIVIEMARENQTTQKGQKNSRERMKRIEEGIKELGSQILKEHPVENTQLQNEKLYLYYLQNGRDMYVDQELDINRLSDYDVDHIVPQSFLKDDSIDNKVLTRSDKARGKSDNVPSEEVVKKMKNYWRQLLNAKLITQRKFDNLTKAERGGLSELDKAGFIKRQLVETRQITKHVAQILDSRMNTKYDENDKLIREVKVITLKSKLVSDFRKDFQFYKVREINNYHHAHDAYLNAVVGTALIKKYPKLESEFVYGDYKVYDVRKMIAKSEQEIGKATAKYFFYSNIMNFFKTEITLANGEIRKRPLIETNGETGEIVWDKGRDFATVRKVLSMPQVNIVKKTEVQTGGFSKESILPKRNSDKLIARKKDWDPKKYGGFDSPTVAYSVLVVAKVEKGKSKKLKSVKELLGITIMERSSFEKNPIDFLEAKGYKEVKKDLIIKLPKYSLFELENGRKRMLASAGELQKGNELALPSKYVNFLYLASHYEKLKGSPEDNEQKQLFVEQHKHYLDEIIEQISEFSKRVILADANLDKVLSAYNKHRDKPIREQAENIIHLFTLTNLGAPAAFKYFDTTIDRKRYTSTKEVLDATLIHQSITGLYETRIDLSQLGGDGGGSSGSSGSSGGTLNLEDEYRLYETSAEPEVSPGSTWLSDFPQAWAETGGMGLAVRQAPLIIPLKATSTPVSIKQYPMSQEAKLGIKPHIQRLLDQGILVPCQSPWNTPLLPVKKPGTNDYRPVQDLREVNKRVEDIHPTVPNPYNLLSGLPPSHRWYTVLDLKDAFFCLRLHPTSQPLFAFEWRDPGMGISGQLTWTRLPQGFKNSPTLFNEALHRDLADFRIQHPDLILLQYVDDILLAATSELDCQQGTRALLLTLGNLGYRASAKKAQLCQKQVKYLGYLLKEGQRWLTEARKETVMGQPTPKTPRQLREFLGTAGFCRLWIPGFAEMAAPLYPLTKPGTLFNWGPDQQKAYQEIKQALLTAPALGLPDLTKPFELFVDEKQGYAKGVLTQKLGPWRRPVAYLSKKLDPVAAGWPPCLRMVAAIAVLRKDAGKLTMGQPLVILAPHAVEALVKQPPDRWLSNARMTHYQAMLLDTDRVQFGPVVALNPATLLPLPEEGAPHDCLEILAETHGTRPDLTDQPIPDADHTWYTDGSSFLQEGQRKAGAAVTTETEVIWARALPAGTSAQRAELIALTQALKMAEGKRLNVYTDSRYAFATAHIHGEIYRRRGWLTSEGREIKNKSEILALLKALFLPKRLSIIHCLGHQKGDSAEARGNRLADQAAREAAIKTPPDTSTLLAGKRTADGSEFEKRTADGSEFESPKKKAKVE

SEQ ID NO: 6309 - protein, 2094 aa, synthetic construct
MPAAKRVKLDGGDKKYSIGLDIGTNSVGWAVITDEYKVPSKKFKVLGNTDRHSIKKNLIGALLFDSGETAEATRLKRTARRRYTRRKNRICYLQEIFSNEMAKVDDSFFHRLEESFLVEEDKKHERHPIFGNIVDEVAYHEKYPTIYHLRKKLVDSTDKADLRLIYLALAHMIKFRGHFLIEGDLNPDNSDVDKLFIQLVQTYNQLFEENPINASGVDAKAILSARLSKSRRLENLIAQLPGEKKNGLFGNLIALSLGLTPNFKSNFDLAEDAKLQLSKDTYDDDLDNLLAQIGDQYADLFLAAKNLSDAILLSDILRVNTEITKAPLSASMIKRYDEHHQDLTLLKALVRQQLPEKYKEIFFDQSKNGYAGYIDGGASQEEFYKFIKPILEKMDGTEELLVKLNREDLLRKQRTFDNGSIPHQIHLGELHAILRRQEDFYPFLKDNREKIEKILTFRIPYYVGPLARGNSRFAWMTRKSEETITPWNFEEVVDKGASAQSFIERMTNFDKNLPNEKVLPKHSLLYEYFTVYNELTKVKYVTEGMRKPAFLSGEQKKAIVDLLFKTNRKVTVKQLKEDYFKKIECFDSVEISGVEDRFNASLGTYHDLLKIIKDKDFLDNEENEDILEDIVLTLTLFEDREMIEERLKTYAHLFDDKVMKQLKRRRYTGWGRLSRKLINGIRDKQSGKTILDFLKSDGFANRNFMQLIHDDSLTFKEDIQKAQVSGQGDSLHEHIANLAGSPAIKKGILQTVKVVDELVKVMGRHKPENIVIEMARENQTTQKGQKNSRERMKRIEEGIKELGSQILKEHPVENTQLQNEKLYLYYLQNGRDMYVDQELDINRLSDYDVDHIVPQSFLKDDSIDNKVLTRSDKARGKSDNVPSEEVVKKMKNYWRQLLNAKLITQRKFDNLTKAERGGLSELDKAGFIKRQLVETRQITKHVAQILDSRMNTKYDENDKLIREVKVITLKSKLVSDFRKDFQFYKVREINNYHHAHDAYLNAVVGTALIKKYPKLESEFVYGDYKVYDVRKMIAKSEQEIGKATAKYFFYSNIMNFFKTEITLANGEIRKRPLIETNGETGEIVWDKGRDFATVRKVLSMPQVNIVKKTEVQTGGFSKESILPKRNSDKLIARKKDWDPKKYGGFDSPTVAYSVLVVAKVEKGKSKKLKSVKELLGITIMERSSFEKNPIDFLEAKGYKEVKKDLIIKLPKYSLFELENGRKRMLASAGELQKGNELALPSKYVNFLYLASHYEKLKGSPEDNEQKQLFVEQHKHYLDEIIEQISEFSKRVILADANLDKVLSAYNKHRDKPIREQAENIIHLFTLTNLGAPAAFKYFDTTIDRKRYTSTKEVLDATLIHQSITGLYETRIDLSQLGGDGGGSSGSSGSSGGTLGIEDEYRLHETSTEPDVSLGSTWLSDFPQAWAETGGMGLAVRQAPLIIPLKATSTPVSIQQYPMSHEARLGIKPHIQRLLDQGILVPCQSPWNTPLLPVKKPGTNDYRPVQDLREVNKRVEDIHPTVPNPYNLLSGLPPSHQWYTVLDLKDAFFCLRLHPTSQPLFAFEWRDPGMGISGQLTWTRLPQGFKNSPTLFDEALHRDLADFRIQHPDLILLQYVDDILLAATSELDCQQGTRALLQTLGDLGYRASAKKAQICQKQVKYLGYLLREGQRWLTEARKETVMGQPVPKTPRQLREFLGTAGFCRLWIPGFAEMAAPLYPLTKTGTLFSWGPDQQKAYQEIKQALLTAPALGLPDLTKPFELFVDEKQGYAKGVLTQKLGPWRRPVAYLSKKLDPVAAGWPPCLRMVAAIAVLTKDAGKLTMGQPLVILAPHAVEALVKQPPDRWLSNARMTHYQAMLLDTDRVQFGPVVALNPATLLPLPEEGAPHDCLEILAETHGTRPDLTDQPIPDADHTWYTDGSSFLQEGQRKAGAAVTTETEVIWAGALPAGTSAQRAELIALTQALKMAEGKRLNVYTDSRYAFATAHIHGEIYRRRGLLTSEGREIKNKSEILALLKALFLPKRLSIIHCLGHQKGDSAEARGNRLADQAAREAAIKTPPDTSTLLAGKRTADGSEFEKRTADGSEFESPKKKAKVE

SEQ ID NO: 6310 - protein, 2094 aa, synthetic construct
MPAAKRVKLDGGDKKYSIGLDIGTNSVGWAVITDEYKVPSKKFKVLGNTDRHSIKKNLIGALLFDSGETAEATRLKRTARRRYTRRKNRICYLQEIFSNEMAKVDDSFFHRLEESFLVEEDKKHERHPIFGNIVDEVAYHEKYPTIYHLRKKLVDSTDKADLRLIYLALAHMIKFRGHFLIEGDLNPDNSDVDKLFIQLVQTYNQLFEENPINASGVDAKAILSARLSKSRRLENLIAQLPGEKKNGLFGNLIALSLGLTPNFKSNFDLAEDAKLQLSKDTYDDDLDNLLAQIGDQYADLFLAAKNLSDAILLSDILRVNTEITKAPLSASMIKRYDEHHQDLTLLKALVRQQLPEKYKEIFFDQSKNGYAGYIDGGASQEEFYKFIKPILEKMDGTEELLVKLNREDLLRKQRTFDNGSIPHQIHLGELHAILRRQEDFYPFLKDNREKIEKILTFRIPYYVGPLARGNSRFAWMTRKSEETITPWNFEEVVDKGASAQSFIERMTNFDKNLPNEKVLPKHSLLYEYFTVYNELTKVKYVTEGMRKPAFLSGEQKKAIVDLLFKTNRKVTVKQLKEDYFKKIECFDSVEISGVEDRFNASLGTYHDLLKIIKDKDFLDNEENEDILEDIVLTLTLFEDREMIEERLKTYAHLFDDKVMKQLKRRRYTGWGRLSRKLINGIRDKQSGKTILDFLKSDGFANRNFMQLIHDDSLTFKEDIQKAQVSGQGDSLHEHIANLAGSPAIKKGILQTVKVVDELVKVMGRHKPENIVIEMARENQTTQKGQKNSRERMKRIEEGIKELGSQILKEHPVENTQLQNEKLYLYYLQNGRDMYVDQELDINRLSDYDVDHIVPQSFLKDDSIDNKVLTRSDKARGKSDNVPSEEVVKKMKNYWRQLLNAKLITQRKFDNLTKAERGGLSELDKAGFIKRQLVETRQITKHVAQILDSRMNTKYDENDKLIREVKVITLKSKLVSDFRKDFQFYKVREINNYHHAHDAYLNAVVGTALIKKYPKLESEFVYGDYKVYDVRKMIAKSEQEIGKATAKYFFYSNIMNFFKTEITLANGEIRKRPLIETNGETGEIVWDKGRDFATVRKVLSMPQVNIVKKTEVQTGGFSKESILPKRNSDKLIARKKDWDPKKYGGFDSPTVAYSVLVVAKVEKGKSKKLKSVKELLGITIMERSSFEKNPIDFLEAKGYKEVKKDLIIKLPKYSLFELENGRKRMLASAGELQKGNELALPSKYVNFLYLASHYEKLKGSPEDNEQKQLFVEQHKHYLDEIIEQISEFSKRVILADANLDKVLSAYNKHRDKPIREQAENIIHLFTLTNLGAPAAFKYFDTTIDRKRYTSTKEVLDATLIHQSITGLYETRIDLSQLGGDGGGSSGSSGSSGGTLNIEDEYRLHETSKEPDVSLGSTWLSDFPQAWAETGGMGLAVRQAPLIIPLKATSTPVSIKQYPMSQEARLGIKPHIQRLLDQGILVPCQSPWNTPLLPVKKPGTNDYRPVQDLREVNKRVEDIHPTVPNPYNLLSGLPPSHQWYTVLDLKDAFFCLRLHPTSQPLFAFEWRDPEMGISGQLTWTRLPQGFKNSPTLFNEALHRDLAGFRIQHPDLILLQYVDDLLLAATSELDCQQGTRALLQTLGDLGYRASAKKAQICQKQVKYLGYLLKEGQRWLTEARKETVMGQPIPKTPRQLREFLGTAGFCRLWIPGFAEMAAPLYPLTKPGTLFNWGPDQQKAFQEIKQALLTAPALGLPDLTKPFELFVDEKQGYAKGVLTQKLGPWRRPVAYLSKKLDPVAAGWPPCLRMVAAIAVLTKDAGKLTMGQPLVILAPHAVEALVKQPPDRWLSNARMTHYQALLLDTDRVQFGPVVALNPATLLPLPEEGLQHDCLDILAEAHGTRSDLMDQPLPDADHTWYTDGSSFLQEGQRKAGAAVTTETEVIWARALPAGTSAQRAELIALTQALKMAEGKKLNVYTDSRYAFATAHIHGEIYRRRGWLTSEGKEIKNKDEILALLKALFLPKRLSIIHCPGHQKGNSAEARGNRMADQAAREVATRETPETSTLLAGKRTADGSEFEKRTADGSEFESPKKKAKVE

SEQ ID NO: 6311 - protein, 2094 aa, synthetic construct; identical to SEQ ID NO: 4505

SEQ ID NO: 6312 - protein, 2094 aa, synthetic construct; identical to SEQ ID NO: 4505

SEQ ID NO: 6313 - protein, 2088 aa, synthetic construct
MPAAKRVKLDGGDKKYSIGLDIGTNSVGWAVITDEYKVPSKKFKVLGNTDRHSIKKNLIGALLFDSGETAEATRLKRTARRRYTRRKNRICYLQEIFSNEMAKVDDSFFHRLEESFLVEEDKKHERHPIFGNIVDEVAYHEKYPTIYHLRKKLVDSTDKADLRLIYLALAHMIKFRGHFLIEGDLNPDNSDVDKLFIQLVQTYNQLFEENPINASGVDAKAILSARLSKSRRLENLIAQLPGEKKNGLFGNLIALSLGLTPNFKSNFDLAEDAKLQLSKDTYDDDLDNLLAQIGDQYADLFLAAKNLSDAILLSDILRVNTEITKAPLSASMIKRYDEHHQDLTLLKALVRQQLPEKYKEIFFDQSKNGYAGYIDGGASQEEFYKFIKPILEKMDGTEELLVKLNREDLLRKQRTFDNGSIPHQIHLGELHAILRRQEDFYPFLKDNREKIEKILTFRIPYYVGPLARGNSRFAWMTRKSEETITPWNFEEVVDKGASAQSFIERMTNFDKNLPNEKVLPKHSLLYEYFTVYNELTKVKYVTEGMRKPAFLSGEQKKAIVDLLFKTNRKVTVKQLKEDYFKKIECFDSVEISGVEDRFNASLGTYHDLLKIIKDKDFLDNEENEDILEDIVLTLTLFEDREMIEERLKTYAHLFDDKVMKQLKRRRYTGWGRLSRKLINGIRDKQSGKTILDFLKSDGFANRNFMQLIHDDSLTFKEDIQKAQVSGQGDSLHEHIANLAGSPAIKKGILQTVKVVDELVKVMGRHKPENIVIEMARENQTTQKGQKNSRERMKRIEEGIKELGSQILKEHPVENTQLQNEKLYLYYLQNGRDMYVDQELDINRLSDYDVDHIVPQSFLKDDSIDNKVLTRSDKARGKSDNVPSEEVVKKMKNYWRQLLNAKLITQRKFDNLTKAERGGLSELDKAGFIKRQLVETRQITKHVAQILDSRMNTKYDENDKLIREVKVITLKSKLVSDFRKDFQFYKVREINNYHHAHDAYLNAVVGTALIKKYPKLESEFVYGDYKVYDVRKMIAKSEQEIGKATAKYFFYSNIMNFFKTEITLANGEIRKRPLIETNGETGEIVWDKGRDFATVRKVLSMPQVNIVKKTEVQTGGFSKESILPKRNSDKLIARKKDWDPKKYGGFDSPTVAYSVLVVAKVEKGKSKKLKSVKELLGITIMERSSFEKNPIDFLEAKGYKEVKKDLIIKLPKYSLFELENGRKRMLASAGELQKGNELALPSKYVNFLYLASHYEKLKGSPEDNEQKQLFVEQHKHYLDEIIEQISEFSKRVILADANLDKVLSAYNKHRDKPIREQAENIIHLFTLTNLGAPAAFKYFDTTIDRKRYTSTKEVLDATLIHQSITGLYETRIDLSQLGGDGGGSSGSSGSSGGTLQLDDEYRLYSPLVKPDQNIQFWLEQFPQAWAETAGMGLAKQVPPQVIQLKASATPVSVRQYPLSKEAQEGIRPHVQRLIQQGILVPVQSPWNTPLLPVRKPGTNDYRPVQDLREVNKRVQDIHPTVPNPYNLLCALPPQRSWYTVLDLKDAFFCLRLHPTSQPLFAFEWRDPGTGRTGQLTWTRLPQGFKNSPTIFDEALHRDLANFRIQHPQVTLLQYVDDLLLAGATKQDCLEGTKALLLELSDLGYRASAKKAQICRREVTYLGYSLRDGQRWLTEARKKTVVQIPAPTTAKQVREFLGTAGFCRLWIPGFATLAAPLYPLTKEKGEFSWAPEHQKAFDAIKKALLSAPALALPDVTKPFTLYVDERKGVARGVLTQTLGPWRRPVAYLSKKLDPVASGWPVCLKAIAAVAILVKDADKLTLGQNITVIAPHALENIVRQPPDRWMTNARMTHYQSLLLTERVTFAPPAALNPATLLPEETDEPVTHDCHQLLIEETGVRKDLTDIPLTGEVLTWFTDGSSYVVEGKRMAGAAVVDGTRTIWASSLPEGTSAQKAELMALTQALRLAEGKSINIYTDSRYAFATAHVHGAIYKQRGLLTSAGREIKNKEEILSLLEALHLPKRLAIIHCPGHQKAKDPISRGNQMADRVAKQAAQGVNLLAGKRTADGSEFEKRTADGSEFESPKKKAKVE

SEQ ID NO: 6314 - protein, 2088 aa, synthetic construct; identical to SEQ ID NO: 6313

SEQ ID NO: 6315 - protein, 2099 aa, synthetic construct
MPAAKRVKLDGGDKKYSIGLDIGTNSVGWAVITDEYKVPSKKFKVLGNTDRHSIKKNLIGALLFDSGETAEATRLKRTARRRYTRRKNRICYLQEIFSNEMAKVDDSFFHRLEESFLVEEDKKHERHPIFGNIVDEVAYHEKYPTIYHLRKKLVDSTDKADLRLIYLALAHMIKFRGHFLIEGDLNPDNSDVDKLFIQLVQTYNQLFEENPINASGVDAKAILSARLSKSRRLENLIAQLPGEKKNGLFGNLIALSLGLTPNFKSNFDLAEDAKLQLSKDTYDDDLDNLLAQIGDQYADLFLAAKNLSDAILLSDILRVNTEITKAPLSASMIKRYDEHHQDLTLLKALVRQQLPEKYKEIFFDQSKNGYAGYIDGGASQEEFYKFIKPILEKMDGTEELLVKLNREDLLRKQRTFDNGSIPHQIHLGELHAILRRQEDFYPFLKDNREKIEKILTFRIPYYVGPLARGNSRFAWMTRKSEETITPWNFEEVVDKGASAQSFIERMTNFDKNLPNEKVLPKHSLLYEYFTVYNELTKVKYVTEGMRKPAFLSGEQKKAIVDLLFKTNRKVTVKQLKEDYFKKIECFDSVEISGVEDRFNASLGTYHDLLKIIKDKDFLDNEENEDILEDIVLTLTLFEDREMIEERLKTYAHLFDDKVMKQLKRRRYTGWGRLSRKLINGIRDKQSGKTILDFLKSDGFANRNFMQLIHDDSLTFKEDIQKAQVSGQGDSLHEHIANLAGSPAIKKGILQTVKVVDELVKVMGRHKPENIVIEMARENQTTQKGQKNSRERMKRIEEGIKELGSQILKEHPVENTQLQNEKLYLYYLQNGRDMYVDQELDINRLSDYDVDHIVPQSFLKDDSIDNKVLTRSDKARGKSDNVPSEEVVKKMKNYWRQLLNAKLITQRKFDNLTKAERGGLSELDKAGFIKRQLVETRQITKHVAQILDSRMNTKYDENDKLIREVKVITLKSKLVSDFRKDFQFYKVREINNYHHAHDAYLNAVVGTALIKKYPKLESEFVYGDYKVYDVRKMIAKSEQEIGKATAKYFFYSNIMNFFKTEITLANGEIRKRPLIETNGETGEIVWDKGRDFATVRKVLSMPQVNIVKKTEVQTGGFSKESILPKRNSDKLIARKKDWDPKKYGGFDSPTVAYSVLVVAKVEKGKSKKLKSVKELLGITIMERSSFEKNPIDFLEAKGYKEVKKDLIIKLPKYSLFELENGRKRMLASAGELQKGNELALPSKYVNFLYLASHYEKLKGSPEDNEQKQLFVEQHKHYLDEIIEQISEFSKRVILADANLDKVLSAYNKHRDKPIREQAENIIHLFTLTNLGAPAAFKYFDTTIDRKRYTSTKEVLDATLIHQSITGLYETRIDLSQLGGDGGGSSGSSGSSGSSGGTAPLEEEYRLFLEAPIQNVTLLEQWKREIPKVWAEINPPGLASTQAPIHVQLLSTALPVRVRQYPITLEAKRSLRETIRKFRAAGILRPVHSPWNTPLLPVRKSGTSEYRMVQDLREVNKRVETIHPTVPNPYTLLSLLPPDRIWYSVLDLKDAFFCIPLAPESQLIFAFEWADAEEGESGQLTWTRLPQGFKNSPTLFDEALNRDLQGFRLDHPSVSLLQYVDDLLIAADTQAACLSATRDLLMTLAELGYRVSGKKAQLCQEEVTYLGFKIHKGSRSLSNSRTQAILQIPVPKTKRQVREFLGTIGYCRLWIPGFAELAQPLYAATRGGNDPLVWGEKEEEAFQSLKLALTQPPALALPSLDKPFQLFVEETSGAAKGVLTQALGPWKRPVAYLSKRLDPVAAGWPRCLRAIAAAALLTREASKLTFGQDIEITSSHNLESLLRSPPDKWLTNARITQYQVLLLDPPRVRFKQTAALNPATLLPETDDTLPIHHCLDTLDSLTSTRPDLTDQPLAQAEATLFTDGSSYIRDGKRYAGAAVVTLDSVIWAEPLPIGTSAQKAELIALTKALEWSKDKSVNIYTDSRYAFATLHVHGMIYRERGLLTAGGKAIKNAPEILALLTAVWLPKRVAVMHCKGHQKDDAPTSTGNRRADEVAREVAIRPLSTQATISAGKRTADGSEFEKRTADGSEFESPKKKAKVE

SEQ ID NO: 6316 - protein, 2099 aa, synthetic construct
MPAAKRVKLDGGDKKYSIGLDIGTNSVGWAVITDEYKVPSKKFKVLGNTDRHSIKKNLIGALLFDSGETAEATRLKRTARRRYTRRKNRICYLQEIFSNEMAKVDDSFFHRLEESFLVEEDKKHERHPIFGNIVDEVAYHEKYPTIYHLRKKLVDSTDKADLRLIYLALAHMIKFRGHFLIEGDLNPDNSDVDKLFIQLVQTYNQLFEENPINASGVDAKAILSARLSKSRRLENLIAQLPGEKKNGLFGNLIALSLGLTPNFKSNFDLAEDAKLQLSKDTYDDDLDNLLAQIGDQYADLFLAAKNLSDAILLSDILRVNTEITKAPLSASMIKRYDEHHQDLTLLKALVRQQLPEKYKEIFFDQSKNGYAGYIDGGASQEEFYKFIKPILEKMDGTEELLVKLNREDLLRKQRTFDNGSIPHQIHLGELHAILRRQEDFYPFLKDNREKIEKILTFRIPYYVGPLARGNSRFAWMTRKSEETITPWNFEEVVDKGASAQSFIERMTNFDKNLPNEKVLPKHSLLYEYFTVYNELTKVKYVTEGMRKPAFLSGEQKKAIVDLLFKTNRKVTVKQLKEDYFKKIECFDSVEISGVEDRFNASLGTYHDLLKIIKDKDFLDNEENEDILEDIVLTLTLFEDREMIEERLKTYAHLFDDKVMKQLKRRRYTGWGRLSRKLINGIRDKQSGKTILDFLKSDGFANRNFMQLIHDDSLTFKEDIQKAQVSGQGDSLHEHIANLAGSPAIKKGILQTVKVVDELVKVMGRHKPENIVIEMARENQTTQKGQKNSRERMKRIEEGIKELGSQILKEHPVENTQLQNEKLYLYYLQNGRDMYVDQELDINRLSDYDVDHIVPQSFLKDDSIDNKVLTRSDKARGKSDNVPSEEVVKKMKNYWRQLLNAKLITQRKFDNLTKAERGGLSELDKAGFIKRQLVETRQITKHVAQILDSRMNTKYDENDKLIREVKVITLKSKLVSDFRKDFQFYKVREINNYHHAHDAYLNAVVGTALIKKYPKLESEFVYGDYKVYDVRKMIAKSEQEIGKATAKYFFYSNIMNFFKTEITLANGEIRKRPLIETNGETGEIVWDKGRDFATVRKVLSMPQVNIVKKTEVQTGGFSKESILPKRNSDKLIARKKDWDPKKYGGFDSPTVAYSVLVVAKVEKGKSKKLKSVKELLGITIMERSSFEKNPIDFLEAKGYKEVKKDLIIKLPKYSLFELENGRKRMLASAGELQKGNELALPSKYVNFLYLASHYEKLKGSPEDNEQKQLFVEQHKHYLDEIIEQISEFSKRVILADANLDKVLSAYNKHRDKPIREQAENIIHLFTLTNLGAPAAFKYFDTTIDRKRYTSTKEVLDATLIHQSITGLYETRIDLSQLGGDGGGSSGSSGSSGSSGGTAPLEEEYRLFLEAPIQNVTLLEQWKREIPKVWAEINPPGLASTQAPIHVQLLSTALPVRVRQYPITLEAKRSLRETIRKFRAAGILRPVHSPWNTPLLPVRKSGTSEYRMVQDLREVNKRVETIHPTVPNPYTLLSLLPPDRIWYSVLDLKDAFFCIPLAPESQLIFAFEWADAEEGESGQLTWTRLPQGFKNSPTLFNEALNRDLQGFRLDHPSVSLLQYVDDLLIAADTQAACLSATRDLLMTLAELGYRVSGKKAQLCQEEVTYLGFKIHKGSRSLSNSRTQAILQIPVPKTKRQVREFLGTIGYCRLWIPGFAELAQPLYAATRPGNDPLVWGEKEEEAFQSLKLALTQPPALALPSLDKPFQLFVEETSGAAKGVLTQALGPWKRPVAYLSKRLDPVAAGWPRCLRAIAAAALLTREASKLTFGQDIEITSSHNLESLLRSPPDKWLTNARITQYQVLLLDPPRVRFKQTAALNPATLLPETDDTLPIHHCLDTLDSLTSTRPDLTDQPLAQAEATLFTDGSSYIRDGKRYAGAAVVTLDSVIWAEPLPIGTSAQKAELIALTKALEWSKDKSVNIYTDSRYAFATLHVHGMIYRERGWLTAGGKAIKNAPEILALLTAVWLPKRVAVMHCKGHQKDDAPTSTGNRRADEVAREVAIRPLSTQATISAGKRTADGSEFEKRTADGSEFESPKKKAKVE

SEQ ID NO: 6317 - protein, 2103 aa, synthetic construct
MPAAKRVKLDGGDKKYSIGLDIGTNSVGWAVITDEYKVPSKKFKVLGNTDRHSIKKNLIGALLFDSGETAEATRLKRTARRRYTRRKNRICYLQEIFSNEMAKVDDSFFHRLEESFLVEEDKKHERHPIFGNIVDEVAYHEKYPTIYHLRKKLVDSTDKADLRLIYLALAHMIKFRGHFLIEGDLNPDNSDVDKLFIQLVQTYNQLFEENPINASGVDAKAILSARLSKSRRLENLIAQLPGEKKNGLFGNLIALSLGLTPNFKSNFDLAEDAKLQLSKDTYDDDLDNLLAQIGDQYADLFLAAKNLSDAILLSDILRVNTEITKAPLSASMIKRYDEHHQDLTLLKALVRQQLPEKYKEIFFDQSKNGYAGYIDGGASQEEFYKFIKPILEKMDGTEELLVKLNREDLLRKQRTFDNGSIPHQIHLGELHAILRRQEDFYPFLKDNREKIEKILTFRIPYYVGPLARGNSRFAWMTRKSEETITPWNFEEVVDKGASAQSFIERMTNFDKNLPNEKVLPKHSLLYEYFTVYNELTKVKYVTEGMRKPAFLSGEQKKAIVDLLFKTNRKVTVKQLKEDYFKKIECFDSVEISGVEDRFNASLGTYHDLLKIIKDKDFLDNEENEDILEDIVLTLTLFEDREMIEERLKTYAHLFDDKVMKQLKRRRYTGWGRLSRKLINGIRDKQSGKTILDFLKSDGFANRNFMQLIHDDSLTFKEDIQKAQVSGQGDSLHEHIANLAGSPAIKKGILQTVKVVDELVKVMGRHKPENIVIEMARENQTTQKGQKNSRERMKRIEEGIKELGSQILKEHPVENTQLQNEKLYLYYLQNGRDMYVDQELDINRLSDYDVDHIVPQSFLKDDSIDNKVLTRSDKARGKSDNVPSEEVVKKMKNYWRQLLNAKLITQRKFDNLTKAERGGLSELDKAGFIKRQLVETRQITKHVAQILDSRMNTKYDENDKLIREVKVITLKSKLVSDFRKDFQFYKVREINNYHHAHDAYLNAVVGTALIKKYPKLESEFVYGDYKVYDVRKMIAKSEQEIGKATAKYFFYSNIMNFFKTEITLANGEIRKRPLIETNGETGEIVWDKGRDFATVRKVLSMPQVNIVKKTEVQTGGFSKESILPKRNSDKLIARKKDWDPKKYGGFDSPTVAYSVLVVAKVEKGKSKKLKSVKELLGITIMERSSFEKNPIDFLEAKGYKEVKKDLIIKLPKYSLFELENGRKRMLASAGELQKGNELALPSKYVNFLYLASHYEKLKGSPEDNEQKQLFVEQHKHYLDEIIEQISEFSKRVILADANLDKVLSAYNKHRDKPIREQAENIIHLFTLTNLGAPAAFKYFDTTIDRKRYTSTKEVLDATLIHQSITGLYETRIDLSQLGGDGGGSSGSSGSSGSSGGTVSLQDEHRLFDIPVTTSLPDVWLQDFPQAWAETGGLGRAKCQAPIIIDLKPTAVPVSIKQYPMSLEAHMGIRQHIIKFLELGVLRPCRSPWNTPLLPVKKPGTQDYRPVQDLREINKRTVDIHPTVPNPYNLLSTLKPDYSWYTVLDLKDAFFCLPLAPQSQELFAFEWKDPERGISGQLTWTRLPQGFKNSPTLFNEALHRDLTDFRTQHPEVTLLQYVDDLLLAAPTKKACTQGTRHLLQELGEKGYRASAKKAQICQTKVTYLGYILSEGKRWLTPGRIETVARIPPPRNPREVREFLGTAGFCRLWIPGFAELAAPLYALTKPSTPFTWQTEHQLAFEALKKALLSAPALGLPDTSKPFTLFLDERQGIAKGVLTQKLGPWKRPVAYLSKKLDPVAAGWPPCLRIMAATAMLVKDSAKLTLGQPLTVITPHTLEAIVRQPPDRWITNARLTHYQALLLDTDRVQFGPPVTLNPATLLPVPENQPSPHDCRQVLAETHGTREDLKDQELPDADHTWYTDGSSYLDSGTRRAGAAVVDGHNTIWAQSLPPGTSAQKAELIALTKALELSKGKKANIYTDSRYAFATAHTHGSIYERRGWLTSEGKEIKNKAEIIALLKALFLPQEVAIIHCPGHQKGQDPVAVGNRQADRVARQAAMAEVLTLATEPDNTSHITAGKRTADGSEFEKRTADGSEFESPKKKAKVE

SEQ ID NO: 6318 - protein, 2096 aa, synthetic construct
MPAAKRVKLDGGDKKYSIGLDIGTNSVGWAVITDEYKVPSKKFKVLGNTDRHSIKKNLIGALLFDSGETAEATRLKRTARRRYTRRKNRICYLQEIFSNEMAKVDDSFFHRLEESFLVEEDKKHERHPIFGNIVDEVAYHEKYPTIYHLRKKLVDSTDKADLRLIYLALAHMIKFRGHFLIEGDLNPDNSDVDKLFIQLVQTYNQLFEENPINASGVDAKAILSARLSKSRRLENLIAQLPGEKKNGLFGNLIALSLGLTPNFKSNFDLAEDAKLQLSKDTYDDDLDNLLAQIGDQYADLFLAAKNLSDAILLSDILRVNTEITKAPLSASMIKRYDEHHQDLTLLKALVRQQLPEKYKEIFFDQSKNGYAGYIDGGASQEEFYKFIKPILEKMDGTEELLVKLNREDLLRKQRTFDNGSIPHQIHLGELHAILRRQEDFYPFLKDNREKIEKILTFRIPYYVGPLARGNSRFAWMTRKSEETITPWNFEEVVDKGASAQSFIERMTNFDKNLPNEKVLPKHSLLYEYFTVYNELTKVKYVTEGMRKPAFLSGEQKKAIVDLLFKTNRKVTVKQLKEDYFKKIECFDSVEISGVEDRFNASLGTYHDLLKIIKDKDFLDNEENEDILEDIVLTLTLFEDREMIEERLKTYAHLFDDKVMKQLKRRRYTGWGRLSRKLINGIRDKQSGKTILDFLKSDGFANRNFMQLIHDDSLTFKEDIQKAQVSGQGDSLHEHIANLAGSPAIKKGILQTVKVVDELVKVMGRHKPENIVIEMARENQTTQKGQKNSRERMKRIEEGIKELGSQILKEHPVENTQLQNEKLYLYYLQNGRDMYVDQELDINRLSDYDVDHIVPQSFLKDDSIDNKVLTRSDKARGKSDNVPSEEVVKKMKNYWRQLLNAKLITQRKFDNLTKAERGGLSELDKAGFIKRQLVETRQITKHVAQILDSRMNTKYDENDKLIREVKVITLKSKLVSDFRKDFQFYKVREINNYHHAHDAYLNAVVGTALIKKYPKLESEFVYGDYKVYDVRKMIAKSEQEIGKATAKYFFYSNIMNFFKTEITLANGEIRKRPLIETNGETGEIVWDKGRDFATVRKVLSMPQVNIVKKTEVQTGGFSKESILPKRNSDKLIARKKDWDPKKYGGFDSPTVAYSVLVVAKVEKGKSKKLKSVKELLGITIMERSSFEKNPIDFLEAKGYKEVKKDLIIKLPKYSLFELENGRKRMLASAGELQKGNELALPSKYVNFLYLASHYEKLKGSPEDNEQKQLFVEQHKHYLDEIIEQISEFSKRVILADANLDKVLSAYNKHRDKPIREQAENIIHLFTLTNLGAPAAFKYFDTTIDRKRYTSTKEVLDATLIHQSITGLYETRIDLSQLGGDGGGSSGSSGSSGSSGGTLQLEEEYRLFEPESTQKQEMDIWLKNFPQAWAETGGMGTAHCQAPVLIQLKATATPISIRQYPMPHEAYQGIKPHIRRMLDQGILKPCQSPWNTPLLPVKKPGTEDYRPVQDLREVNKRVEDIHPTVPNPYNLLSTLPPSHPWYTVLDLKDAFFCLRLHSESQLLFAFEWRDPEIGLSGQLTWTRLPQGFKNSPTLFNEALHSDLADFRVRYPALVLLQYVDDLLLAAATRTECLEGTKALLETLGNKGYRASAKKAQICLQEVTYLGYSLKDGQRWLTKARKEAILSIPVPKNSRQVREFLGTAGYCRLWIPGFAELAAPLYPLTRPGTLFQWGTEQQLAFEDIKKALLSSPALGLPDITKPFELFIDENSGFAKGVLVQKLGPWKRPVAYLSKKLDTVASGWPPCLRMVAAIAILVKDAGKLTLGQPLTILTSHPVEALVRQPPNKWLSNARMTHYQAMLLDAERVHFGPTVSLNPATLLPLPSGGNHHDCLQILAETHGTRPDLTDQPLPDADLTWYTDGSSFIRNGEREAGAAVTTESEVIWAAPLPPGTSAQRAELIALTQALKMAEGKKLTVYTDSRYAFATTHVHGEIYRRRGWLTSEGKEIKNKNEILALLEALFLPKRLSIIHCPGHQKGDSPQAKGNRLADDTAKKAATETHSSLTVLPAGKRTADGSEFEKRTADGSEFESPKKKAKVE

SEQ ID NO: 6319 - protein, 2219 aa, synthetic construct
MPAAKRVKLDGGDKKYSIGLDIGTNSVGWAVITDEYKVPSKKFKVLGNTDRHSIKKNLIGALLFDSGETAEATRLKRTARRRYTRRKNRICYLQEIFSNEMAKVDDSFFHRLEESFLVEEDKKHERHPIFGNIVDEVAYHEKYPTIYHLRKKLVDSTDKADLRLIYLALAHMIKFRGHFLIEGDLNPDNSDVDKLFIQLVQTYNQLFEENPINASGVDAKAILSARLSKSRRLENLIAQLPGEKKNGLFGNLIALSLGLTPNFKSNFDLAEDAKLQLSKDTYDDDLDNLLAQIGDQYADLFLAAKNLSDAILLSDILRVNTEITKAPLSASMIKRYDEHHQDLTLLKALVRQQLPEKYKEIFFDQSKNGYAGYIDGGASQEEFYKFIKPILEKMDGTEELLVKLNREDLLRKQRTFDNGSIPHQIHLGELHAILRRQEDFYPFLKDNREKIEKILTFRIPYYVGPLARGNSRFAWMTRKSEETITPWNFEEVVDKGASAQSFIERMTNFDKNLPNEKVLPKHSLLYEYFTVYNELTKVKYVTEGMRKPAFLSGEQKKAIVDLLFKTNRKVTVKQLKEDYFKKIECFDSVEISGVEDRFNASLGTYHDLLKIIKDKDFLDNEENEDILEDIVLTLTLFEDREMIEERLKTYAHLFDDKVMKQLKRRRYTGWGRLSRKLINGIRDKQSGKTILDFLKSDGFANRNFMQLIHDDSLTFKEDIQKAQVSGQGDSLHEHIANLAGSPAIKKGILQTVKVVDELVKVMGRHKPENIVIEMARENQTTQKGQKNSRERMKRIEEGIKELGSQILKEHPVENTQLQNEKLYLYYLQNGRDMYVDQELDINRLSDYDVDHIVPQSFLKDDSIDNKVLTRSDKARGKSDNVPSEEVVKKMKNYWRQLLNAKLITQRKFDNLTKAERGGLSELDKAGFIKRQLVETRQITKHVAQILDSRMNTKYDENDKLIREVKVITLKSKLVSDFRKDFQFYKVREINNYHHAHDAYLNAVVGTALIKKYPKLESEFVYGDYKVYDVRKMIAKSEQEIGKATAKYFFYSNIMNFFKTEITLANGEIRKRPLIETNGETGEIVWDKGRDFATVRKVLSMPQVNIVKKTEVQTGGFSKESILPKRNSDKLIARKKDWDPKKYGGFDSPTVAYSVLVVAKVEKGKSKKLKSVKELLGITIMERSSFEKNPIDFLEAKGYKEVKKDLIIKLPKYSLFELENGRKRMLASAGELQKGNELALPSKYVNFLYLASHYEKLKGSPEDNEQKQLFVEQHKHYLDEIIEQISEFSKRVILADANLDKVLSAYNKHRDKPIREQAENIIHLFTLTNLGAPAAFKYFDTTIDRKRYTSTKEVLDATLIHQSITGLYETRIDLSQLGGDGGGSSGSSGSSGSSGGTLGDQGSRGSDPLPEPRVTLTVEGIPTEFLVNTGAEHSVLTKPMGKMGSKRTVVAGATGSKVYPWTTKRLLKIGQKQVTHSFLVIPECPAPLLGRDLLTKLKAQIQFSTEGPQVTWEDRPAMCLVLNLEEEYRLHEKPVPPSIDPSWLQLFPMVWAEKAGMGLANQVPPVVVELKSDASPVAVRQYPMSKEAREGIRPHIQRFLDLGILVPCQSPWNTPLLPVKKPGTNDYRPVQDLREVNKRVQDIHPTVPNPYNLLSSLPPSHTWYSVLDLKDAFFCLKLHPNSQPLFAFEWRDPEKGNTGQLTWTRLPQGFKNSPTLFDEALHRDLASFRALNPQVVMLQYVDDLLVAAPTYRDCKEGTRRLLQELSKLGYRVSAKKAQLCREEVTYLGYLLKGGKRWLTPARKATVMKIPTPTTPRQVREFLGTAGFCRLWIPGFASLAAPLYPLTREKVPFTWTEAHQEAFGRIKEALLSAPALALPDLTKPFALYVDEKEGVARGVLTQTLGPWRRPVAYLSKKLDPVASGWPTCLKAIAAVALLLKDADKLTLGQNVLVIAPHNLESIVRQPPDRWMTNARMTHYQSLLLNERVSFAPPAILNPATLLPVESDDTPIHICSEILAEETGTRPDLRDQPLPGVPAWYTDGSSFIMDGRRQAGAAIVDNKRTVWASNLPEGTSAQKAELIALTQALRLAEGKSINIYTDSRYAFATAHVHGAIYKQRGLLTSAGKDIKNKEEILALLEAIHLPKRVAIIHCPGHQRGTDPVATGNRKADEAAKQAAQSTRILTETTKNAGKRTADGSEFEKRTADGSEFESPKKKAKVE

SEQ ID NO: 6320 - protein, 2128 aa, synthetic construct
MPAAKRVKLDGGDKKYSIGLDIGTNSVGWAVITDEYKVPSKKFKVLGNTDRHSIKKNLIGALLFDSGETAEATRLKRTARRRYTRRKNRICYLQEIFSNEMAKVDDSFFHRLEESFLVEEDKKHERHPIFGNIVDEVAYHEKYPTIYHLRKKLVDSTDKADLRLIYLALAHMIKFRGHFLIEGDLNPDNSDVDKLFIQLVQTYNQLFEENPINASGVDAKAILSARLSKSRRLENLIAQLPGEKKNGLFGNLIALSLGLTPNFKSNFDLAEDAKLQLSKDTYDDDLDNLLAQIGDQYADLFLAAKNLSDAILLSDILRVNTEITKAPLSASMIKRYDEHHQDLTLLKALVRQQLPEKYKEIFFDQSKNGYAGYIDGGASQEEFYKFIKPILEKMDGTEELLVKLNREDLLRKQRTFDNGSIPHQIHLGELHAILRRQEDFYPFLKDNREKIEKILTFRIPYYVGPLARGNSRFAWMTRKSEETITPWNFEEVVDKGASAQSFIERMTNFDKNLPNEKVLPKHSLLYEYFTVYNELTKVKYVTEGMRKPAFLSGEQKKAIVDLLFKTNRKVTVKQLKEDYFKKIECFDSVEISGVEDRFNASLGTYHDLLKIIKDKDFLDNEENEDILEDIVLTLTLFEDREMIEERLKTYAHLFDDKVMKQLKRRRYTGWGRLSRKLINGIRDKQSGKTILDFLKSDGFANRNFMQLIHDDSLTFKEDIQKAQVSGQGDSLHEHIANLAGSPAIKKGILQTVKVVDELVKVMGRHKPENIVIEMARENQTTQKGQKNSRERMKRIEEGIKELGSQILKEHPVENTQLQNEKLYLYYLQNGRDMYVDQELDINRLSDYDVDHIVPQSFLKDDSIDNKVLTRSDKARGKSDNVPSEEVVKKMKNYWRQLLNAKLITQRKFDNLTKAERGGLSELDKAGFIKRQLVETRQITKHVAQILDSRMNTKYDENDKLIREVKVITLKSKLVSDFRKDFQFYKVREINNYHHAHDAYLNAVVGTALIKKYPKLESEFVYGDYKVYDVRKMIAKSEQEIGKATAKYFFYSNIMNFFKTEITLANGEIRKRPLIETNGETGEIVWDKGRDFATVRKVLSMPQVNIVKKTEVQTGGFSKESILPKRNSDKLIARKKDWDPKKYGGFDSPTVAYSVLVVAKVEKGKSKKLKSVKELLGITIMERSSFEKNPIDFLEAKGYKEVKKDLIIKLPKYSLFELENGRKRMLASAGELQKGNELALPSKYVNFLYLASHYEKLKGSPEDNEQKQLFVEQHKHYLDEIIEQISEFSKRVILADANLDKVLSAYNKHRDKPIREQAENIIHLFTLTNLGAPAAFKYFDTTIDRKRYTSTKEVLDATLIHQSITGLYETRIDLSQLGGDGGGSSGSSGSSGSSGGLLGRDLLTKLKAQIQFSTEGPQVTWEDRPAMCLVLNLEEEYRLHEKPVPPSIDPSWLQLFPMVWAEKAGMGLANQVPPVVVELKSDASPVAVRQYPMSKEAREGIRPHIQRFLDLGILVPCQSPWNTPLLPVKKPGTNDYRPVQDLREVNKRVQDIHPTVPNPYNLLSSLPPSHTWYSVLDLKDAFFCLKLHPNSQPLFAFEWRDPEKGNTGQLTWTRLPQGFKNSPTLFNEALHRDLASFRALNPQVVMLQYVDDLLVAAPTYRDCKEGTRRLLQELSKLGYRVSAKKAQLCREEVTYLGYLLKGGKRWLTPARKATVMKIPTPTTPRQVREFLGTAGFCRLWIPGFASLAAPLYPLTRPKVPFTWTEAHQEAFGRIKEALLSAPALALPDLTKPFALYVDEKEGVARGVLTQTLGPWRRPVAYLSKKLDPVASGWPTCLKAIAAVALLLKDADKLTLGQNVLVIAPHNLESIVRQPPDRWMTNARMTHYQSLLLNERVSFAPPAILNPATLLPVESDDTPIHICSEILAEETGTRPDLRDQPLPGVPAWYTDGSSFIMDGRRQAGAAIVDNKRTVWASNLPEGTSAQKAELIALTQALRLAEGKSINIYTDSRYAFATAHVHGAIYKQRGWLTSAGKDIKNKEEILALLEAIHLPKRVAIIHCPGHQRGTDPVATGNRKADEAAKQAAQSTRILTETTKNAGKRTADGSEFEKRTADGSEFESPKKKAKVE

SEQ ID NO: 6321 - protein, 2219 aa, synthetic construct
MPAAKRVKLDGGDKKYSIGLDIGTNSVGWAVITDEYKVPSKKFKVLGNTDRHSIKKNLIGALLFDSGETAEATRLKRTARRRYTRRKNRICYLQEIFSNEMAKVDDSFFHRLEESFLVEEDKKHERHPIFGNIVDEVAYHEKYPTIYHLRKKLVDSTDKADLRLIYLALAHMIKFRGHFLIEGDLNPDNSDVDKLFIQLVQTYNQLFEENPINASGVDAKAILSARLSKSRRLENLIAQLPGEKKNGLFGNLIALSLGLTPNFKSNFDLAEDAKLQLSKDTYDDDLDNLLAQIGDQYADLFLAAKNLSDAILLSDILRVNTEITKAPLSASMIKRYDEHHQDLTLLKALVRQQLPEKYKEIFFDQSKNGYAGYIDGGASQEEFYKFIKPILEKMDGTEELLVKLNREDLLRKQRTFDNGSIPHQIHLGELHAILRRQEDFYPFLKDNREKIEKILTFRIPYYVGPLARGNSRFAWMTRKSEETITPWNFEEVVDKGASAQSFIERMTNFDKNLPNEKVLPKHSLLYEYFTVYNELTKVKYVTEGMRKPAFLSGEQKKAIVDLLFKTNRKVTVKQLKEDYFKKIECFDSVEISGVEDRFNASLGTYHDLLKIIKDKDFLDNEENEDILEDIVLTLTLFEDREMIEERLKTYAHLFDDKVMKQLKRRRYTGWGRLSRKLINGIRDKQSGKTILDFLKSDGFANRNFMQLIHDDSLTFKEDIQKAQVSGQGDSLHEHIANLAGSPAIKKGILQTVKVVDELVKVMGRHKPENIVIEMARENQTTQKGQKNSRERMKRIEEGIKELGSQILKEHPVENTQLQNEKLYLYYLQNGRDMYVDQELDINRLSDYDVDHIVPQSFLKDDSIDNKVLTRSDKARGKSDNVPSEEVVKKMKNYWRQLLNAKLITQRKFDNLTKAERGGLSELDKAGFIKRQLVETRQITKHVAQILDSRMNTKYDENDKLIREVKVITLKSKLVSDFRKDFQFYKVREINNYHHAHDAYLNAVVGTALIKKYPKLESEFVYGDYKVYDVRKMIAKSEQEIGKATAKYFFYSNIMNFFKTEITLANGEIRKRPLIETNGETGEIVWDKGRDFATVRKVLSMPQVNIVKKTEVQTGGFSKESILPKRNSDKLIARKKDWDPKKYGGFDSPTVAYSVLVVAKVEKGKSKKLKSVKELLGITIMERSSFEKNPIDFLEAKGYKEVKKDLIIKLPKYSLFELENGRKRMLASAGELQKGNELALPSKYVNFLYLASHYEKLKGSPEDNEQKQLFVEQHKHYLDEIIEQISEFSKRVILADANLDKVLSAYNKHRDKPIREQAENIIHLFTLTNLGAPAAFKYFDTTIDRKRYTSTKEVLDATLIHQSITGLYETRIDLSQLGGDGGGSSGSSGSSGSSGGTLGDQGSRGSDPLPEPRVTLTVEGIPTEFLVNTGAEHSVLTKPMGKMGSKRTVVAGATGSKVYPWTTKRLLKIGQKQVTHSFLVIPECPAPLLGRDLLTKLKAQIQFSTEGPQVTWEDRPAMCLVLNLEEEYRLHEKPVPPSIDPSWLQLFPMVWAEKAGMGLANQVPPVVVELKSDASPVAVRQYPMSKEAREGIRPHIQRFLDLGILVPCQSPWNTPLLPVKKPGTNDYRPVQDLREVNKRVQDIHPTVPNPYNLLSSLPPSHTWYSVLDLKDAFFCLKLHPNSQPLFAFEWRDPEKGNTGQLTWTRLPQGFKNSPTLFNEALHRDLASFRALNPQVVMLQYVDDLLVAAPTYRDCKEGTRRLLQELSKLGYRVSAKKAQLCREEVTYLGYLLKGGKRWLTPARKATVMKIPTPTTPRQVREFLGKAGFCRLFIPGFASLAAPLYPLTRPKVPFTWTEAHQEAFGRIKEALLSAPALALPDLTKPFALYVDEKEGVARGVLTQTLGPWRRPVAYLSKKLDPVASGWPTCLKAIAAVALLLKDADKLTLGQNVLVIAPHNLESIVRQPPDRWMTNARMTHYQSLLLNERVSFAPPAILNPATLLPVESDDTPIHICSEILAEETGTRPDLRDQPLPGVPAWYTDGSSFIMDGRRQAGAAIVDNKRTVWASNLPEGTSAQKAELIALTQALRLAEGKSINIYTDSRYAFATAHVHGAIYKQRGWLTSAGKDIKNKEEILALLEAIHLPKRVAIIHCPGHQRGTDPVATGNRKADEAAKQAAQSTRILTETTKNAGKRTADGSEFEKRTADGSEFESPKKKAKVE

SEQ ID NO: 6322 - protein, 2097 aa, synthetic construct
MPAAKRVKLDGGDKKYSIGLDIGTNSVGWAVITDEYKVPSKKFKVLGNTDRHSIKKNLIGALLFDSGETAEATRLKRTARRRYTRRKNRICYLQEIFSNEMAKVDDSFFHRLEESFLVEEDKKHERHPIFGNIVDEVAYHEKYPTIYHLRKKLVDSTDKADLRLIYLALAHMIKFRGHFLIEGDLNPDNSDVDKLFIQLVQTYNQLFEENPINASGVDAKAILSARLSKSRRLENLIAQLPGEKKNGLFGNLIALSLGLTPNFKSNFDLAEDAKLQLSKDTYDDDLDNLLAQIGDQYADLFLAAKNLSDAILLSDILRVNTEITKAPLSASMIKRYDEHHQDLTLLKALVRQQLPEKYKEIFFDQSKNGYAGYIDGGASQEEFYKFIKPILEKMDGTEELLVKLNREDLLRKQRTFDNGSIPHQIHLGELHAILRRQEDFYPFLKDNREKIEKILTFRIPYYVGPLARGNSRFAWMTRKSEETITPWNFEEVVDKGASAQSFIERMTNFDKNLPNEKVLPKHSLLYEYFTVYNELTKVKYVTEGMRKPAFLSGEQKKAIVDLLFKTNRKVTVKQLKEDYFKKIECFDSVEISGVEDRFNASLGTYHDLLKIIKDKDFLDNEENEDILEDIVLTLTLFEDREMIEERLKTYAHLFDDKVMKQLKRRRYTGWGRLSRKLINGIRDKQSGKTILDFLKSDGFANRNFMQLIHDDSLTFKEDIQKAQVSGQGDSLHEHIANLAGSPAIKKGILQTVKVVDELVKVMGRHKPENIVIEMARENQTTQKGQKNSRERMKRIEEGIKELGSQILKEHPVENTQLQNEKLYLYYLQNGRDMYVDQELDINRLSDYDVDHIVPQSFLKDDSIDNKVLTRSDKARGKSDNVPSEEVVKKMKNYWRQLLNAKLITQRKFDNLTKAERGGLSELDKAGFIKRQLVETRQITKHVAQILDSRMNTKYDENDKLIREVKVITLKSKLVSDFRKDFQFYKVREINNYHHAHDAYLNAVVGTALIKKYPKLESEFVYGDYKVYDVRKMIAKSEQEIGKATAKYFFYSNIMNFFKTEITLANGEIRKRPLIETNGETGEIVWDKGRDFATVRKVLSMPQVNIVKKTEVQTGGFSKESILPKRNSDKLIARKKDWDPKKYGGFDSPTVAYSVLVVAKVEKGKSKKLKSVKELLGITIMERSSFEKNPIDFLEAKGYKEVKKDLIIKLPKYSLFELENGRKRMLASAGELQKGNELALPSKYVNFLYLASHYEKLKGSPEDNEQKQLFVEQHKHYLDEIIEQISEFSKRVILADANLDKVLSAYNKHRDKPIREQAENIIHLFTLTNLGAPAAFKYFDTTIDRKRYTSTKEVLDATLIHQSITGLYETRIDLSQLGGDGGGSSGSSGSSGSSGGLGIEDEYRLHETSTEPDVSLGSTWLSDFPQAWAETGGMGLAVRQAPLIIPLKATSTPVSIQQYPMSHEARLGIKPHIQRLLDQGILVPCQSPWNTPLLPVKKPGTNDYRPVQDLREVNKRVEDIHPTVPNPYNLLSGLPPSHQWYTVLDLKDAFFCLRLHPTSQPLFAFEWRDPGMGISGQLTWTRLPQGFKNSPTLFNEALHRDLADFRIQHPDLILLQYVDDILLAATSELDCQQGTRALLQTLGDLGYRASAKKAQICQKQVKYLGYLLREGQRWLTEARKETVMGQPVPKTPRQLREFLGKAGFCRLFIPGFAEMAAPLYPLTKPGTLFSWGPDQQKAYQEIKQALLTAPALGLPDLTKPFELFVDEKQGYAKGVLTQKLGPWRRPVAYLSKKLDPVAAGWPPCLRMVAAIAVLTKDAGKLTMGQPLVILAPHAVEALVKQPPDRWLSNARMTHYQAMLLDTDRVQFGPVVALNPATLLPLPEEGAPHDCLEILAETHGTRPDLTDQPIPDADHTWYTDGSSFLQEGQRKAGAAVTTETEVIWAGALPAGTSAQRAELIALTQALKMAEGKRLNVYTDSRYAFATAHIHGEIYRRRGWLTSEGREIKNKSEILALLKALFLPKRLSIIHCLGHQKGDSAEARGNRLADQAAREAAIKTPPDTSTLLIAGKRTADGSEFEKRTADGSEFESPKKKAKVE

SEQ ID NO: 6323 - protein, 2097 aa, synthetic construct
MPAAKRVKLDGGDKKYSIGLDIGTNSVGWAVITDEYKVPSKKFKVLGNTDRHSIKKNLIGALLFDSGETAEATRLKRTARRRYTRRKNRICYLQEIFSNEMAKVDDSFFHRLEESFLVEEDKKHERHPIFGNIVDEVAYHEKYPTIYHLRKKLVDSTDKADLRLIYLALAHMIKFRGHFLIEGDLNPDNSDVDKLFIQLVQTYNQLFEENPINASGVDAKAILSARLSKSRRLENLIAQLPGEKKNGLFGNLIALSLGLTPNFKSNFDLAEDAKLQLSKDTYDDDLDNLLAQIGDQYADLFLAAKNLSDAILLSDILRVNTEITKAPLSASMIKRYDEHHQDLTLLKALVRQQLPEKYKEIFFDQSKNGYAGYIDGGASQEEFYKFIKPILEKMDGTEELLVKLNREDLLRKQRTFDNGSIPHQIHLGELHAILRRQEDFYPFLKDNREKIEKILTFRIPYYVGPLARGNSRFAWMTRKSEETITPWNFEEVVDKGASAQSFIERMTNFDKNLPNEKVLPKHSLLYEYFTVYNELTKVKYVTEGMRKPAFLSGEQKKAIVDLLFKTNRKVTVKQLKEDYFKKIECFDSVEISGVEDRFNASLGTYHDLLKIIKDKDFLDNEENEDILEDIVLTLTLFEDREMIEERLKTYAHLFDDKVMKQLKRRRYTGWGRLSRKLINGIRDKQSGKTILDFLKSDGFANRNFMQLIHDDSLTFKEDIQKAQVSGQGDSLHEHIANLAGSPAIKKGILQTVKVVDELVKVMGRHKPENIVIEMARENQTTQKGQKNSRERMKRIEEGIKELGSQILKEHPVENTQLQNEKLYLYYLQNGRDMYVDQELDINRLSDYDVDHIVPQSFLKDDSIDNKVLTRSDKARGKSDNVPSEEVVKKMKNYWRQLLNAKLITQRKFDNLTKAERGGLSELDKAGFIKRQLVETRQITKHVAQILDSRMNTKYDENDKLIREVKVITLKSKLVSDFRKDFQFYKVREINNYHHAHDAYLNAVVGTALIKKYPKLESEFVYGDYKVYDVRKMIAKSEQEIGKATAKYFFYSNIMNFFKTEITLANGEIRKRPLIETNGETGEIVWDKGRDFATVRKVLSMPQVNIVKKTEVQTGGFSKESILPKRNSDKLIARKKDWDPKKYGGFDSPTVAYSVLVVAKVEKGKSKKLKSVKELLGITIMERSSFEKNPIDFLEAKGYKEVKKDLIIKLPKYSLFELENGRKRMLASAGELQKGNELALPSKYVNFLYLASHYEKLKGSPEDNEQKQLFVEQHKHYLDEIIEQISEFSKRVILADANLDKVLSAYNKHRDKPIREQAENIIHLFTLTNLGAPAAFKYFDTTIDRKRYTSTKEVLDATLIHQSITGLYETRIDLSQLGGDGGGSSGSSGSSGSSGGTLGIEDEYRLHETSTEPDVSLGSTWLSDFPQAWAETGGMGLAVRQAPLIIPLKATSTPVSIQQYPMSHEARLGIKPHIQRLLDQGILVPCQSPWNTPLLPVKKPGTNDYRPVQDLREVNKRVEDIHPTVPNPYNLLSGLPPSHQWYTVLDLKDAFFCLRLHPTSQPLFAFEWRDPGMGISGQLTWTRLPQGFKNSPTLFNEALHRDLADFRIQHPDLILLQYVDDILLAATSELDCQQGTRALLQTLGDLGYRASAKKAQICQKQVKYLGYLLREGQRWLTEARKETVMGQPVPKTPRQLREFLGTAGFCRLWIPGFAEMAAPLYPLTKPGTLFSWGPDQQKAYQEIKQALLTAPALGLPDLTKPFELFVDEKQGYAKGVLTQKLGPWRRPVAYLSKKLDPVAAGWPPCLRMVAAIAVLTKDAGKLTMGQPLVILAPHAVEALVKQPPDRWLSNARMTHYQAMLLDTDRVQFGPVVALNPATLLPLPEEGAPHDCLEILAETHGTRPDLTDQPIPDADHTWYTDGSSFLQEGQRKAGAAVTTETEVIWAGALPAGTSAQRAELIALTQALKMAEGKRLNVYTDSRYAFATAHIHGEIYRRRGWLTSEGREIKNKSEILALLKALFLPKRLSIIHCLGHQKGDSAEARGNRLADQAAREAAIKTPPDTSTLLAGKRTADGSEFEKRTADGSEFESPKKKAKVE

SEQ ID NO: 6324 - protein, 2097 aa, synthetic construct
MPAAKRVKLDGGDKKYSIGLDIGTNSVGWAVITDEYKVPSKKFKVLGNTDRHSIKKNLIGALLFDSGETAEATRLKRTARRRYTRRKNRICYLQEIFSNEMAKVDDSFFHRLEESFLVEEDKKHERHPIFGNIVDEVAYHEKYPTIYHLRKKLVDSTDKADLRLIYLALAHMIKFRGHFLIEGDLNPDNSDVDKLFIQLVQTYNQLFEENPINASGVDAKAILSARLSKSRRLENLIAQLPGEKKNGLFGNLIALSLGLTPNFKSNFDLAEDAKLQLSKDTYDDDLDNLLAQIGDQYADLFLAAKNLSDAILLSDILRVNTEITKAPLSASMIKRYDEHHQDLTLLKALVRQQLPEKYKEIFFDQSKNGYAGYIDGGASQEEFYKFIKPILEKMDGTEELLVKLNREDLLRKQRTFDNGSIPHQIHLGELHAILRRQEDFYPFLKDNREKIEKILTFRIPYYVGPLARGNSRFAWMTRKSEETITPWNFEEVVDKGASAQSFIERMTNFDKNLPNEKVLPKHSLLYEYFTVYNELTKVKYVTEGMRKPAFLSGEQKKAIVDLLFKTNRKVTVKQLKEDYFKKIECFDSVEISGVEDRFNASLGTYHDLLKIIKDKDFLDNEENEDILEDIVLTLTLFEDREMIEERLKTYAHLFDDKVMKQLKRRRYTGWGRLSRKLINGIRDKQSGKTILDFLKSDGFANRNFMQLIHDDSLTFKEDIQKAQVSGQGDSLHEHIANLAGSPAIKKGILQTVKVVDELVKVMGRHKPENIVIEMARENQTTQKGQKNSRERMKRIEEGIKELGSQILKEHPVENTQLQNEKLYLYYLQNGRDMYVDQELDINRLSDYDVDHIVPQSFLKDDSIDNKVLTRSDKARGKSDNVPSEEVVKKMKNYWRQLLNAKLITQRKFDNLTKAERGGLSELDKAGFIKRQLVETRQITKHVAQILDSRMNTKYDENDKLIREVKVITLKSKLVSDFRKDFQFYKVREINNYHHAHDAYLNAVVGTALIKKYPKLESEFVYGDYKVYDVRKMIAKSEQEIGKATAKYFFYSNIMNFFKTEITLANGEIRKRPLIETNGETGEIVWDKGRDFATVRKVLSMPQVNIVKKTEVQTGGFSKESILPKRNSDKLIARKKDWDPKKYGGFDSPTVAYSVLVVAKVEKGKSKKLKSVKELLGITIMERSSFEKNPIDFLEAKGYKEVKKDLIIKLPKYSLFELENGRKRMLASAGELQKGNELALPSKYVNFLYLASHYEKLKGSPEDNEQKQLFVEQHKHYLDEIIEQISEFSKRVILADANLDKVLSAYNKHRDKPIREQAENIIHLFTLTNLGAPAAFKYFDTTIDRKRYTSTKEVLDATLIHQSITGLYETRIDLSQLGGDGGGSSGSSGSSGSSGGTLNIEDEYRLHETSKGPDVPLGSTWLSDFPQAWAETGGMGLAVRQAPLIIPLKATSTPVSIKQYPMSQEARLGIKPHIQRLLDQGILVPCQSPWNTPLLPVKKPGTNDYRPVQDLREVNKRVEDIHPTVPNPYNLLSGLPPSHQWYTVLDLKDAFFCLRLHPTSQSLFAFEWRDPEMGISGQLTWTRLPQGFKNSPTLFNEALHRDLADFRIQHPDLILLQYVDDLLLAATSELDCQQGTRALLQTLGDLGYRASAKKAQICQKQVKYLGYLLKEGQRWLTEARKETVMGQPTPKTPRQLREFLGTAGFCRLWIPGFAEMAAPLYPLTKPGTLFEWGPDQQKAYQEIKQALLTAPALGLPDLTKPFELFVDEKQGYAKGVLTQKLGPWRRPVAYLSKKLDPVAAGWPPCLRMVAAIAVLTKDAGKLTMGQPLVILAPHAVEALVKQPPDRWLSNARMTHYQALLLDTDRVQFGPIVALNPATLLPLPEEGLQHDCLDILAEAHGTRPDLTDQPLPDADHTWYTDGSSFLQEGQRKAGAAVTTETEVVWAKALPAGTSAQRAELIALTQALKMAEGKKLNVYTDSRYAFATAHIHGEIYRRRGWLTSEGKEIKNKDEILALLKALFLPKRLSIIHCPGHQKGNRAEARGNRMADQAAREVATRETPETSTLLAGKRTADGSEFEKRTADGSEFESPKKKAKVE

SEQ ID NO: 6325 - protein, 2088 aa, synthetic construct
MPAAKRVKLDGGDKKYSIGLDIGTNSVGWAVITDEYKVPSKKFKVLGNTDRHSIKKNLIGALLFDSGETAEATRLKRTARRRYTRRKNRICYLQEIFSNEMAKVDDSFFHRLEESFLVEEDKKHERHPIFGNIVDEVAYHEKYPTIYHLRKKLVDSTDKADLRLIYLALAHMIKFRGHFLIEGDLNPDNSDVDKLFIQLVQTYNQLFEENPINASGVDAKAILSARLSKSRRLENLIAQLPGEKKNGLFGNLIALSLGLTPNFKSNFDLAEDAKLQLSKDTYDDDLDNLLAQIGDQYADLFLAAKNLSDAILLSDILRVNTEITKAPLSASMIKRYDEHHQDLTLLKALVRQQLPEKYKEIFFDQSKNGYAGYIDGGASQEEFYKFIKPILEKMDGTEELLVKLNREDLLRKQRTFDNGSIPHQIHLGELHAILRRQEDFYPFLKDNREKIEKILTFRIPYYVGPLARGNSRFAWMTRKSEETITPWNFEEVVDKGASAQSFIERMTNFDKNLPNEKVLPKHSLLYEYFTVYNELTKVKYVTEGMRKPAFLSGEQKKAIVDLLFKTNRKVTVKQLKEDYFKKIECFDSVEISGVEDRFNASLGTYHDLLKIIKDKDFLDNEENEDILEDIVLTLTLFEDREMIEERLKTYAHLFDDKVMKQLKRRRYTGWGRLSRKLINGIRDKQSGKTILDFLKSDGFANRNFMQLIHDDSLTFKEDIQKAQVSGQGDSLHEHIANLAGSPAIKKGILQTVKVVDELVKVMGRHKPENIVIEMARENQTTQKGQKNSRERMKRIEEGIKELGSQILKEHPVENTQLQNEKLYLYYLQNGRDMYVDQELDINRLSDYDVDHIVPQSFLKDDSIDNKVLTRSDKARGKSDNVPSEEVVKKMKNYWRQLLNAKLITQRKFDNLTKAERGGLSELDKAGFIKRQLVETRQITKHVAQILDSRMNTKYDENDKLIREVKVITLKSKLVSDFRKDFQFYKVREINNYHHAHDAYLNAVVGTALIKKYPKLESEFVYGDYKVYDVRKMIAKSEQEIGKATAKYFFYSNIMNFFKTEITLANGEIRKRPLIETNGETGEIVWDKGRDFATVRKVLSMPQVNIVKKTEVQTGGFSKESILPKRNSDKLIARKKDWDPKKYGGFDSPTVAYSVLVVAKVEKGKSKKLKSVKELLGITIMERSSFEKNPIDFLEAKGYKEVKKDLIIKLPKYSLFELENGRKRMLASAGELQKGNELALPSKYVNFLYLASHYEKLKGSPEDNEQKQLFVEQHKHYLDEIIEQISEFSKRVILADANLDKVLSAYNKHRDKPIREQAENIIHLFTLTNLGAPAAFKYFDTTIDRKRYTSTKEVLDATLIHQSITGLYETRIDLSQLGGDGGGSSGSSGSSGSSGGIPWLMKKPLQLTTLVPLQEYEERLLKQTMLTGSYKEKLQSLFLKYDALWQHWENQVGHRRIKPHHIATGTVNPRPQKQYPINPKAKASIQTVINDLLKQGVLIQQNSIMNTPVYPVPKPDGKWRMVLDYREVNKTIPLIAAQNQHSAGILSSIFRGKYKTTLDLSNGFWAHSITPESYWLTAFTWLGQQYCWTRLPQGFLNSPALFNADVVDLLKEVPNVQVYVDDIYISHDDPREHLEQLEKVFSLLLNAGYVVSLKKSEIAQHEVEFLGFNITKEGRGLTETFKQKLLNITPPRDLKQLQSILGLLNFARNFIPNFSELVKPLYNIIATAPGKYITWTTDNSQQLQNIISMLNSAENLEERNPEVRLIMKVNTSPSAGYIRFYNEFAKRPIMYLNYVYTKAEVKFTNTEKLLTTIHKGLIKALDLGMGQEILVYSPIVSMTKIQKTPLPERKALPIRWITWMSYLEDPRIQFHYDKTLPELQQVPTVTDDIIAKIKHPSEFSMVFYTDGSAIKHPNVNKSHNAGMGIAQVQFKPEFTVINTWSIPLGDHTAQLAEVAAVEFACKKALKIDGPVLIVTDSFYVAESVNKELPYWQSNGFFNNKKKPLKHVSKWKSIADCIQLKPDIIIIHEKGHQPTASTFHTEGNNLADKLATQGSYVVNAGKRTADGSEFEKRTADGSEFESPKKKAKVE

SEQ ID NO: 6326 - protein, 2177 aa, synthetic construct
MPAAKRVKLDGGDKKYSIGLDIGTNSVGWAVITDEYKVPSKKFKVLGNTDRHSIKKNLIGALLFDSGETAEATRLKRTARRRYTRRKNRICYLQEIFSNEMAKVDDSFFHRLEESFLVEEDKKHERHPIFGNIVDEVAYHEKYPTIYHLRKKLVDSTDKADLRLIYLALAHMIKFRGHFLIEGDLNPDNSDVDKLFIQLVQTYNQLFEENPINASGVDAKAILSARLSKSRRLENLIAQLPGEKKNGLFGNLIALSLGLTPNFKSNFDLAEDAKLQLSKDTYDDDLDNLLAQIGDQYADLFLAAKNLSDAILLSDILRVNTEITKAPLSASMIKRYDEHHQDLTLLKALVRQQLPEKYKEIFFDQSKNGYAGYIDGGASQEEFYKFIKPILEKMDGTEELLVKLNREDLLRKQRTFDNGSIPHQIHLGELHAILRRQEDFYPFLKDNREKIEKILTFRIPYYVGPLARGNSRFAWMTRKSEETITPWNFEEVVDKGASAQSFIERMTNFDKNLPNEKVLPKHSLLYEYFTVYNELTKVKYVTEGMRKPAFLSGEQKKAIVDLLFKTNRKVTVKQLKEDYFKKIECFDSVEISGVEDRFNASLGTYHDLLKIIKDKDFLDNEENEDILEDIVLTLTLFEDREMIEERLKTYAHLFDDKVMKQLKRRRYTGWGRLSRKLINGIRDKQSGKTILDFLKSDGFANRNFMQLIHDDSLTFKEDIQKAQVSGQGDSLHEHIANLAGSPAIKKGILQTVKVVDELVKVMGRHKPENIVIEMARENQTTQKGQKNSRERMKRIEEGIKELGSQILKEHPVENTQLQNEKLYLYYLQNGRDMYVDQELDINRLSDYDVDHIVPQSFLKDDSIDNKVLTRSDKARGKSDNVPSEEVVKKMKNYWRQLLNAKLITQRKFDNLTKAERGGLSELDKAGFIKRQLVETRQITKHVAQILDSRMNTKYDENDKLIREVKVITLKSKLVSDFRKDFQFYKVREINNYHHAHDAYLNAVVGTALIKKYPKLESEFVYGDYKVYDVRKMIAKSEQEIGKATAKYFFYSNIMNFFKTEITLANGEIRKRPLIETNGETGEIVWDKGRDFATVRKVLSMPQVNIVKKTEVQTGGFSKESILPKRNSDKLIARKKDWDPKKYGGFDSPTVAYSVLVVAKVEKGKSKKLKSVKELLGITIMERSSFEKNPIDFLEAKGYKEVKKDLIIKLPKYSLFELENGRKRMLASAGELQKGNELALPSKYVNFLYLASHYEKLKGSPEDNEQKQLFVEQHKHYLDEIIEQISEFSKRVILADANLDKVLSAYNKHRDKPIREQAENIIHLFTLTNLGAPAAFKYFDTTIDRKRYTSTKEVLDATLIHQSITGLYETRIDLSQLGGDGGGSSGSSGSSGSSGGMDPLQLLQPLEAEIKGTKLKAHWNSGATITCVPQAFLEEEVPIKNIWIKTIHGEKEQPVYYLTFKIQGRKVEAEVISSPYDYILVSPSDIPWLMKKPLQLTTLVPLQEYEERLLKQTMLTGSYKEKLQSLFLKYDALWQHWENQVGHRRIKPHHIATGTVNPRPQKQYPINPKAKASIQTVINDLLKQGVLIQQNSIMNTPVYPVPKPDGKWRMVLDYREVNKTIPLIAAQNQHSAGILSSIFRGKYKTTLDLSNGFWAHSITPESYWLTAFTWLGQQYCWTRLPQGFLNSPALFNADVVDLLKEVPNVQVYVDDIYISHDDPREHLEQLEKVFSLLLNAGYVVSLKKSEIAQHEVEFLGFNITKEGRGLTETFKQKLLNITPPRDLKQLQSILGKLNFARNFIPNFSELVKPLYNIIATAPGKYITWTTDNSQQLQNIISMLNSAENLEERNPEVRLIMKVNTSPSAGYIRFYNEFAKRPIMYLNYVYTKAEVKFTNTEKLLTTIHKGLIKALDLGMGQEILVYSPIVSMTKIQKTPLPERKALPIRWITWMSYLEDPRIQFHYDKTLPELQQVPTVTDDIIAKIKHPSEFSMVFYTDGSAIKHPNVNKSHNAGMGIAQVQFKPEFTVINTWSIPLGDHTAQLAEVAAVEFACKKALKIDGPVLIVTDSFYVAESVNKELPYWQSNGFFNNKKKPLKHVSKWKSIADCIQLKPDIIIIHEKGHQPTASTFHTEGNNLADKLATQGSYVVNAGKRTADGSEFEKRTADGSEFESPKKKAKVE

SEQ ID NO: 6327 - protein, 2097 aa, synthetic construct
MPAAKRVKLDGGDKKYSIGLDIGTNSVGWAVITDEYKVPSKKFKVLGNTDRHSIKKNLIGALLFDSGETAEATRLKRTARRRYTRRKNRICYLQEIFSNEMAKVDDSFFHRLEESFLVEEDKKHERHPIFGNIVDEVAYHEKYPTIYHLRKKLVDSTDKADLRLIYLALAHMIKFRGHFLIEGDLNPDNSDVDKLFIQLVQTYNQLFEENPINASGVDAKAILSARLSKSRRLENLIAQLPGEKKNGLFGNLIALSLGLTPNFKSNFDLAEDAKLQLSKDTYDDDLDNLLAQIGDQYADLFLAAKNLSDAILLSDILRVNTEITKAPLSASMIKRYDEHHQDLTLLKALVRQQLPEKYKEIFFDQSKNGYAGYIDGGASQEEFYKFIKPILEKMDGTEELLVKLNREDLLRKQRTFDNGSIPHQIHLGELHAILRRQEDFYPFLKDNREKIEKILTFRIPYYVGPLARGNSRFAWMTRKSEETITPWNFEEVVDKGASAQSFIERMTNFDKNLPNEKVLPKHSLLYEYFTVYNELTKVKYVTEGMRKPAFLSGEQKKAIVDLLFKTNRKVTVKQLKEDYFKKIECFDSVEISGVEDRFNASLGTYHDLLKIIKDKDFLDNEENEDILEDIVLTLTLFEDREMIEERLKTYAHLFDDKVMKQLKRRRYTGWGRLSRKLINGIRDKQSGKTILDFLKSDGFANRNFMQLIHDDSLTFKEDIQKAQVSGQGDSLHEHIANLAGSPAIKKGILQTVKVVDELVKVMGRHKPENIVIEMARENQTTQKGQKNSRERMKRIEEGIKELGSQILKEHPVENTQLQNEKLYLYYLQNGRDMYVDQELDINRLSDYDVDHIVPQSFLKDDSIDNKVLTRSDKARGKSDNVPSEEVVKKMKNYWRQLLNAKLITQRKFDNLTKAERGGLSELDKAGFIKRQLVETRQITKHVAQILDSRMNTKYDENDKLIREVKVITLKSKLVSDFRKDFQFYKVREINNYHHAHDAYLNAVVGTALIKKYPKLESEFVYGDYKVYDVRKMIAKSEQEIGKATAKYFFYSNIMNFFKTEITLANGEIRKRPLIETNGETGEIVWDKGRDFATVRKVLSMPQVNIVKKTEVQTGGFSKESILPKRNSDKLIARKKDWDPKKYGGFDSPTVAYSVLVVAKVEKGKSKKLKSVKELLGITIMERSSFEKNPIDFLEAKGYKEVKKDLIIKLPKYSLFELENGRKRMLASAGELQKGNELALPSKYVNFLYLASHYEKLKGSPEDNEQKQLFVEQHKHYLDEIIEQISEFSKRVILADANLDKVLSAYNKHRDKPIREQAENIIHLFTLTNLGAPAAFKYFDTTIDRKRYTSTKEVLDATLIHQSITGLYETRIDLSQLGGDGGGSSGSSGSSGSSGGTLNIEDEYRLHETSKEPDVPLGSTWLSDFPQAWAETGGMGLAVRQAPLIIPLKATSTPVSIKQYPMSQEARLGIKPHIQRLLDQGILVPCQSPWNTPLLPVKKPGTNDYRPVQDLREVNKRVEDIHPTVPNPYNLLSGLPPSHQWYTVLDLKDAFFCLRLHPTSQPLFAFEWRDPEMGISGQLTWTRLPQGFKNSPTLFNEALHRDLADFRIQHPDLILLQYVDDLLLAATSEQDCQRGTRALLQTLGNLGYRASAKKAQICQKQVKYLGYLLKEGQRWLTEARKETVMGQPTPKTPRQLREFLGTAGFCRLWIPGFAEMAAPLYPLTKPGTLFNWGPDQQKAYQEIKQALLTAPALGLPDLTKPFELFVDEKQGYAKGVLTQKLGPWRRPVAYLSKKLDPVAAGWPPCLRMVAAIAVLTKDAGKLTMGQPLVILAPHAVEALVKQPPDRWLSNARMTHYQAMLLDTDRVQFGPVVALNPATLLPLPEKEAPHDCLEILAETHGTRPDLTDQPIPDADYTWYTDGSSFLQEGQRRAGAAVTTETEVIWARALPAGTSAQRAELIALTQALKMAEGKKLNVYTDSRYAFATAHVHGEIYRRRGWLTSEGREIKNKNEILALLKALFLPKRLSIIHCPGHQKGNSAEARGNRMADQAAREAAMKAVLETSTLLAGKRTADGSEFEKRTADGSEFESPKKKAKVE

SEQ ID NO: 6328 - protein, 2102 aa, synthetic construct
MPAAKRVKLDGGDKKYSIGLDIGTNSVGWAVITDEYKVPSKKFKVLGNTDRHSIKKNLIGALLFDSGETAEATRLKRTARRRYTRRKNRICYLQEIFSNEMAKVDDSFFHRLEESFLVEEDKKHERHPIFGNIVDEVAYHEKYPTIYHLRKKLVDSTDKADLRLIYLALAHMIKFRGHFLIEGDLNPDNSDVDKLFIQLVQTYNQLFEENPINASGVDAKAILSARLSKSRRLENLIAQLPGEKKNGLFGNLIALSLGLTPNFKSNFDLAEDAKLQLSKDTYDDDLDNLLAQIGDQYADLFLAAKNLSDAILLSDILRVNTEITKAPLSASMIKRYDEHHQDLTLLKALVRQQLPEKYKEIFFDQSKNGYAGYIDGGASQEEFYKFIKPILEKMDGTEELLVKLNREDLLRKQRTFDNGSIPHQIHLGELHAILRRQEDFYPFLKDNREKIEKILTFRIPYYVGPLARGNSRFAWMTRKSEETITPWNFEEVVDKGASAQSFIERMTNFDKNLPNEKVLPKHSLLYEYFTVYNELTKVKYVTEGMRKPAFLSGEQKKAIVDLLFKTNRKVTVKQLKEDYFKKIECFDSVEISGVEDRFNASLGTYHDLLKIIKDKDFLDNEENEDILEDIVLTLTLFEDREMIEERLKTYAHLFDDKVMKQLKRRRYTGWGRLSRKLINGIRDKQSGKTILDFLKSDGFANRNFMQLIHDDSLTFKEDIQKAQVSGQGDSLHEHIANLAGSPAIKKGILQTVKVVDELVKVMGRHKPENIVIEMARENQTTQKGQKNSRERMKRIEEGIKELGSQILKEHPVENTQLQNEKLYLYYLQNGRDMYVDQELDINRLSDYDVDHIVPQSFLKDDSIDNKVLTRSDKARGKSDNVPSEEVVKKMKNYWRQLLNAKLITQRKFDNLTKAERGGLSELDKAGFIKRQLVETRQITKHVAQILDSRMNTKYDENDKLIREVKVITLKSKLVSDFRKDFQFYKVREINNYHHAHDAYLNAVVGTALIKKYPKLESEFVYGDYKVYDVRKMIAKSEQEIGKATAKYFFYSNIMNFFKTEITLANGEIRKRPLIETNGETGEIVWDKGRDFATVRKVLSMPQVNIVKKTEVQTGGFSKESILPKRNSDKLIARKKDWDPKKYGGFDSPTVAYSVLVVAKVEKGKSKKLKSVKELLGITIMERSSFEKNPIDFLEAKGYKEVKKDLIIKLPKYSLFELENGRKRMLASAGELQKGNELALPSKYVNFLYLASHYEKLKGSPEDNEQKQLFVEQHKHYLDEIIEQISEFSKRVILADANLDKVLSAYNKHRDKPIREQAENIIHLFTLTNLGAPAAFKYFDTTIDRKRYTSTKEVLDATLIHQSITGLYETRIDLSQLGGDGGGSSGSSGSSGSSGSSGGTAPLEEEYRLFLEAPIQNVTLLEQWKREIPKVWAEINPPGLASTQAPIHVQLLSTALPVRVRQYPITLEAKRSLRETIRKFRAAGILRPVHSPWNTPLLPVRKSGTSEYRMVQDLREVNKRVETIHPTVPNPYTLLSLLPPDRIWYSVLDLKDAFFCIPLAPESQLIFAFEWADAEEGESGQLTWTRLPQGFKNSPTLFDEALNRDLQGFRLDHPSVSLLQYVDDLLIAADTQAACLSATRDLLMTLAELGYRVSGKKAQLCQEEVTYLGFKIHKGSRSLSNSRTQAILQIPVPKTKRQVREFLGTIGYCRLWIPGFAELAQPLYAATRGGNDPLVWGEKEEEAFQSLKLALTQPPALALPSLDKPFQLFVEETSGAAKGVLTQALGPWKRPVAYLSKRLDPVAAGWPRCLRAIAAAALLTREASKLTFGQDIEITSSHNLESLLRSPPDKWLTNARITQYQVLLLDPPRVRFKQTAALNPATLLPETDDTLPIHHCLDTLDSLTSTRPDLTDQPLAQAEATLFTDGSSYIRDGKRYAGAAVVTLDSVIWAEPLPIGTSAQKAELIALTKALEWSKDKSVNIYTDSRYAFATLHVHGMIYRERGLLTAGGKAIKNAPEILALLTAVWLPKRVAVMHCKGHQKDDAPTSTGNRRADEVAREVAIRPLSTQATISAGKRTADGSEFEKRTADGSEFESPKKKAKVE

SEQ ID NO: 6329 - protein, 2102 aa, synthetic construct
MPAAKRVKLDGGDKKYSIGLDIGTNSVGWAVITDEYKVPSKKFKVLGNTDRHSIKKNLIGALLFDSGETAEATRLKRTARRRYTRRKNRICYLQEIFSNEMAKVDDSFFHRLEESFLVEEDKKHERHPIFGNIVDEVAYHEKYPTIYHLRKKLVDSTDKADLRLIYLALAHMIKFRGHFLIEGDLNPDNSDVDKLFIQLVQTYNQLFEENPINASGVDAKAILSARLSKSRRLENLIAQLPGEKKNGLFGNLIALSLGLTPNFKSNFDLAEDAKLQLSKDTYDDDLDNLLAQIGDQYADLFLAAKNLSDAILLSDILRVNTEITKAPLSASMIKRYDEHHQDLTLLKALVRQQLPEKYKEIFFDQSKNGYAGYIDGGASQEEFYKFIKPILEKMDGTEELLVKLNREDLLRKQRTFDNGSIPHQIHLGELHAILRRQEDFYPFLKDNREKIEKILTFRIPYYVGPLARGNSRFAWMTRKSEETITPWNFEEVVDKGASAQSFIERMTNFDKNLPNEKVLPKHSLLYEYFTVYNELTKVKYVTEGMRKPAFLSGEQKKAIVDLLFKTNRKVTVKQLKEDYFKKIECFDSVEISGVEDRFNASLGTYHDLLKIIKDKDFLDNEENEDILEDIVLTLTLFEDREMIEERLKTYAHLFDDKVMKQLKRRRYTGWGRLSRKLINGIRDKQSGKTILDFLKSDGFANRNFMQLIHDDSLTFKEDIQKAQVSGQGDSLHEHIANLAGSPAIKKGILQTVKVVDELVKVMGRHKPENIVIEMARENQTTQKGQKNSRERMKRIEEGIKELGSQILKEHPVENTQLQNEKLYLYYLQNGRDMYVDQELDINRLSDYDVDHIVPQSFLKDDSIDNKVLTRSDKARGKSDNVPSEEVVKKMKNYWRQLLNAKLITQRKFDNLTKAERGGLSELDKAGFIKRQLVETRQITKHVAQILDSRMNTKYDENDKLIREVKVITLKSKLVSDFRKDFQFYKVREINNYHHAHDAYLNAVVGTALIKKYPKLESEFVYGDYKVYDVRKMIAKSEQEIGKATAKYFFYSNIMNFFKTEITLANGEIRKRPLIETNGETGEIVWDKGRDFATVRKVLSMPQVNIVKKTEVQTGGFSKESILPKRNSDKLIARKKDWDPKKYGGFDSPTVAYSVLVVAKVEKGKSKKLKSVKELLGITIMERSSFEKNPIDFLEAKGYKEVKKDLIIKLPKYSLFELENGRKRMLASAGELQKGNELALPSKYVNFLYLASHYEKLKGSPEDNEQKQLFVEQHKHYLDEIIEQISEFSKRVILADANLDKVLSAYNKHRDKPIREQAENIIHLFTLTNLGAPAAFKYFDTTIDRKRYTSTKEVLDATLIHQSITGLYETRIDLSQLGGDGGGSSGSSGSSGSSGSSGGTAPLEEEYRLFLEAPIQNVTLLEQWKREIPKVWAEINPPGLASTQAPIHVQLLSTALPVRVRQYPITLEAKRSLRETIRKFRAAGILRPVHSPWNTPLLPVRKSGTSEYRMVQDLREVNKRVETIHPTVPNPYTLLSLLPPDRIWYSVLDLKDAFFCIPLAPESQLIFAFEWADAEEGESGQLTWTRLPQGFKNSPTLFNEALNRDLQGFRLDHPSVSLLQYVDDLLIAADTQAACLSATRDLLMTLAELGYRVSGKKAQLCQEEVTYLGFKIHKGSRSLSNSRTQAILQIPVPKTKRQVREFLGKIGYCRLFIPGFAELAQPLYAATRPGNDPLVWGEKEEEAFQSLKLALTQPPALALPSLDKPFQLFVEETSGAAKGVLTQALGPWKRPVAYLSKRLDPVAAGWPRCLRAIAAAALLTREASKLTFGQDIEITSSHNLESLLRSPPDKWLTNARITQYQVLLLDPPRVRFKQTAALNPATLLPETDDTLPIHHCLDTLDSLTSTRPDLTDQPLAQAEATLFTDGSSYIRDGKRYAGAAVVTLDSVIWAEPLPIGTSAQKAELIALTKALEWSKDKSVNIYTDSRYAFATLHVHGMIYRERGWLTAGGKAIKNAPEILALLTAVWLPKRVAVMHCKGHQKDDAPTSTGNRRADEVAREVAIRPLSTQATISAGKRTADGSEFEKRTADGSEFESPKKKAKVE

SEQ ID NO: 6330 - protein, 2131 aa, synthetic construct
MPAAKRVKLDGGDKKYSIGLDIGTNSVGWAVITDEYKVPSKKFKVLGNTDRHSIKKNLIGALLFDSGETAEATRLKRTARRRYTRRKNRICYLQEIFSNEMAKVDDSFFHRLEESFLVEEDKKHERHPIFGNIVDEVAYHEKYPTIYHLRKKLVDSTDKADLRLIYLALAHMIKFRGHFLIEGDLNPDNSDVDKLFIQLVQTYNQLFEENPINASGVDAKAILSARLSKSRRLENLIAQLPGEKKNGLFGNLIALSLGLTPNFKSNFDLAEDAKLQLSKDTYDDDLDNLLAQIGDQYADLFLAAKNLSDAILLSDILRVNTEITKAPLSASMIKRYDEHHQDLTLLKALVRQQLPEKYKEIFFDQSKNGYAGYIDGGASQEEFYKFIKPILEKMDGTEELLVKLNREDLLRKQRTFDNGSIPHQIHLGELHAILRRQEDFYPFLKDNREKIEKILTFRIPYYVGPLARGNSRFAWMTRKSEETITPWNFEEVVDKGASAQSFIERMTNFDKNLPNEKVLPKHSLLYEYFTVYNELTKVKYVTEGMRKPAFLSGEQKKAIVDLLFKTNRKVTVKQLKEDYFKKIECFDSVEISGVEDRFNASLGTYHDLLKIIKDKDFLDNEENEDILEDIVLTLTLFEDREMIEERLKTYAHLFDDKVMKQLKRRRYTGWGRLSRKLINGIRDKQSGKTILDFLKSDGFANRNFMQLIHDDSLTFKEDIQKAQVSGQGDSLHEHIANLAGSPAIKKGILQTVKVVDELVKVMGRHKPENIVIEMARENQTTQKGQKNSRERMKRIEEGIKELGSQILKEHPVENTQLQNEKLYLYYLQNGRDMYVDQELDINRLSDYDVDHIVPQSFLKDDSIDNKVLTRSDKARGKSDNVPSEEVVKKMKNYWRQLLNAKLITQRKFDNLTKAERGGLSELDKAGFIKRQLVETRQITKHVAQILDSRMNTKYDENDKLIREVKVITLKSKLVSDFRKDFQFYKVREINNYHHAHDAYLNAVVGTALIKKYPKLESEFVYGDYKVYDVRKMIAKSEQEIGKATAKYFFYSNIMNFFKTEITLANGEIRKRPLIETNGETGEIVWDKGRDFATVRKVLSMPQVNIVKKTEVQTGGFSKESILPKRNSDKLIARKKDWDPKKYGGFDSPTVAYSVLVVAKVEKGKSKKLKSVKELLGITIMERSSFEKNPIDFLEAKGYKEVKKDLIIKLPKYSLFELENGRKRMLASAGELQKGNELALPSKYVNFLYLASHYEKLKGSPEDNEQKQLFVEQHKHYLDEIIEQISEFSKRVILADANLDKVLSAYNKHRDKPIREQAENIIHLFTLTNLGAPAAFKYFDTTIDRKRYTSTKEVLDATLIHQSITGLYETRIDLSQLGGDGGGSSGSSGSSGSSGSSGGLLGRDLLTKLKAQIQFSTEGPQVTWEDRPAMCLVLNLEEEYRLHEKPVPPSIDPSWLQLFPMVWAEKAGMGLANQVPPVVVELKSDASPVAVRQYPMSKEAREGIRPHIQRFLDLGILVPCQSPWNTPLLPVKKPGTNDYRPVQDLREVNKRVQDIHPTVPNPYNLLSSLPPSHTWYSVLDLKDAFFCLKLHPNSQPLFAFEWRDPEKGNTGQLTWTRLPQGFKNSPTLFDEALHRDLASFRALNPQVVMLQYVDDLLVAAPTYRDCKEGTRRLLQELSKLGYRVSAKKAQLCREEVTYLGYLLKGGKRWLTPARKATVMKIPTPTTPRQVREFLGTAGFCRLWIPGFASLAAPLYPLTREKVPFTWTEAHQEAFGRIKEALLSAPALALPDLTKPFALYVDEKEGVARGVLTQTLGPWRRPVAYLSKKLDPVASGWPTCLKAIAAVALLLKDADKLTLGQNVLVIAPHNLESIVRQPPDRWMTNARMTHYQSLLLNERVSFAPPAILNPATLLPVESDDTPIHICSEILAEETGTRPDLRDQPLPGVPAWYTDGSSFIMDGRRQAGAAIVDNKRTVWASNLPEGTSAQKAELIALTQALRLAEGKSINIYTDSRYAFATAHVHGAIYKQRGLLTSAGKDIKNKEEILALLEAIHLPKRVAIIHCPGHQRGTDPVATGNRKADEAAKQAAQSTRILTETTKNAGKRTADGSEFEKRTADGSEFESPKKKAKVE

SEQ ID NO: 6331 - protein, 2222 aa, synthetic construct
MPAAKRVKLDGGDKKYSIGLDIGTNSVGWAVITDEYKVPSKKFKVLGNTDRHSIKKNLIGALLFDSGETAEATRLKRTARRRYTRRKNRICYLQEIFSNEMAKVDDSFFHRLEESFLVEEDKKHERHPIFGNIVDEVAYHEKYPTIYHLRKKLVDSTDKADLRLIYLALAHMIKFRGHFLIEGDLNPDNSDVDKLFIQLVQTYNQLFEENPINASGVDAKAILSARLSKSRRLENLIAQLPGEKKNGLFGNLIALSLGLTPNFKSNFDLAEDAKLQLSKDTYDDDLDNLLAQIGDQYADLFLAAKNLSDAILLSDILRVNTEITKAPLSASMIKRYDEHHQDLTLLKALVRQQLPEKYKEIFFDQSKNGYAGYIDGGASQEEFYKFIKPILEKMDGTEELLVKLNREDLLRKQRTFDNGSIPHQIHLGELHAILRRQEDFYPFLKDNREKIEKILTFRIPYYVGPLARGNSRFAWMTRKSEETITPWNFEEVVDKGASAQSFIERMTNFDKNLPNEKVLPKHSLLYEYFTVYNELTKVKYVTEGMRKPAFLSGEQKKAIVDLLFKTNRKVTVKQLKEDYFKKIECFDSVEISGVEDRFNASLGTYHDLLKIIKDKDFLDNEENEDILEDIVLTLTLFEDREMIEERLKTYAHLFDDKVMKQLKRRRYTGWGRLSRKLINGIRDKQSGKTILDFLKSDGFANRNFMQLIHDDSLTFKEDIQKAQVSGQGDSLHEHIANLAGSPAIKKGILQTVKVVDELVKVMGRHKPENIVIEMARENQTTQKGQKNSRERMKRIEEGIKELGSQILKEHPVENTQLQNEKLYLYYLQNGRDMYVDQELDINRLSDYDVDHIVPQSFLKDDSIDNKVLTRSDKARGKSDNVPSEEVVKKMKNYWRQLLNAKLITQRKFDNLTKAERGGLSELDKAGFIKRQLVETRQITKHVAQILDSRMNTKYDENDKLIREVKVITLKSKLVSDFRKDFQFYKVREINNYHHAHDAYLNAVVGTALIKKYPKLESEFVYGDYKVYDVRKMIAKSEQEIGKATAKYFFYSNIMNFFKTEITLANGEIRKRPLIETNGETGEIVWDKGRDFATVRKVLSMPQVNIVKKTEVQTGGFSKESILPKRNSDKLIARKKDWDPKKYGGFDSPTVAYSVLVVAKVEKGKSKKLKSVKELLGITIMERSSFEKNPIDFLEAKGYKEVKKDLIIKLPKYSLFELENGRKRMLASAGELQKGNELALPSKYVNFLYLASHYEKLKGSPEDNEQKQLFVEQHKHYLDEIIEQISEFSKRVILADANLDKVLSAYNKHRDKPIREQAENIIHLFTLTNLGAPAAFKYFDTTIDRKRYTSTKEVLDATLIHQSITGLYETRIDLSQLGGDGGGSSGSSGSSGSSGSSGGTLGDQGSRGSDPLPEPRVTLTVEGIPTEFLVNTGAEHSVLTKPMGKMGSKRTVVAGATGSKVYPWTTKRLLKIGQKQVTHSFLVIPECPAPLLGRDLLTKLKAQIQFSTEGPQVTWEDRPAMCLVLNLEEEYRLHEKPVPPSIDPSWLQLFPMVWAEKAGMGLANQVPPVVVELKSDASPVAVRQYPMSKEAREGIRPHIQRFLDLGILVPCQSPWNTPLLPVKKPGTNDYRPVQDLREVNKRVQDIHPTVPNPYNLLSSLPPSHTWYSVLDLKDAFFCLKLHPNSQPLFAFEWRDPEKGNTGQLTWTRLPQGFKNSPTLFNEALHRDLASFRALNPQVVMLQYVDDLLVAAPTYRDCKEGTRRLLQELSKLGYRVSAKKAQLCREEVTYLGYLLKGGKRWLTPARKATVMKIPTPTTPRQVREFLGTAGFCRLWIPGFASLAAPLYPLTRPKVPFTWTEAHQEAFGRIKEALLSAPALALPDLTKPFALYVDEKEGVARGVLTQTLGPWRRPVAYLSKKLDPVASGWPTCLKAIAAVALLLKDADKLTLGQNVLVIAPHNLESIVRQPPDRWMTNARMTHYQSLLLNERVSFAPPAILNPATLLPVESDDTPIHICSEILAEETGTRPDLRDQPLPGVPAWYTDGSSFIMDGRRQAGAAIVDNKRTVWASNLPEGTSAQKAELIALTQALRLAEGKSINIYTDSRYAFATAHVHGAIYKQRGWLTSAGKDIKNKEEILALLEAIHLPKRVAIIHCPGHQRGTDPVATGNRKADEAAKQAAQSTRILTETTKNAGKRTADGSEFEKRTADGSEFESPKKKAKVE

SEQ ID NO: 6332 - protein, 2100 aa, synthetic construct
MPAAKRVKLDGGDKKYSIGLDIGTNSVGWAVITDEYKVPSKKFKVLGNTDRHSIKKNLIGALLFDSGETAEATRLKRTARRRYTRRKNRICYLQEIFSNEMAKVDDSFFHRLEESFLVEEDKKHERHPIFGNIVDEVAYHEKYPTIYHLRKKLVDSTDKADLRLIYLALAHMIKFRGHFLIEGDLNPDNSDVDKLFIQLVQTYNQLFEENPINASGVDAKAILSARLSKSRRLENLIAQLPGEKKNGLFGNLIALSLGLTPNFKSNFDLAEDAKLQLSKDTYDDDLDNLLAQIGDQYADLFLAAKNLSDAILLSDILRVNTEITKAPLSASMIKRYDEHHQDLTLLKALVRQQLPEKYKEIFFDQSKNGYAGYIDGGASQEEFYKFIKPILEKMDGTEELLVKLNREDLLRKQRTFDNGSIPHQIHLGELHAILRRQEDFYPFLKDNREKIEKILTFRIPYYVGPLARGNSRFAWMTRKSEETITPWNFEEVVDKGASAQSFIERMTNFDKNLPNEKVLPKHSLLYEYFTVYNELTKVKYVTEGMRKPAFLSGEQKKAIVDLLFKTNRKVTVKQLKEDYFKKIECFDSVEISGVEDRFNASLGTYHDLLKIIKDKDFLDNEENEDILEDIVLTLTLFEDREMIEERLKTYAHLFDDKVMKQLKRRRYTGWGRLSRKLINGIRDKQSGKTILDFLKSDGFANRNFMQLIHDDSLTFKEDIQKAQVSGQGDSLHEHIANLAGSPAIKKGILQTVKVVDELVKVMGRHKPENIVIEMARENQTTQKGQKNSRERMKRIEEGIKELGSQILKEHPVENTQLQNEKLYLYYLQNGRDMYVDQELDINRLSDYDVDHIVPQSFLKDDSIDNKVLTRSDKARGKSDNVPSEEVVKKMKNYWRQLLNAKLITQRKFDNLTKAERGGLSELDKAGFIKRQLVETRQITKHVAQILDSRMNTKYDENDKLIREVKVITLKSKLVSDFRKDFQFYKVREINNYHHAHDAYLNAVVGTALIKKYPKLESEFVYGDYKVYDVRKMIAKSEQEIGKATAKYFFYSNIMNFFKTEITLANGEIRKRPLIETNGETGEIVWDKGRDFATVRKVLSMPQVNIVKKTEVQTGGFSKESILPKRNSDKLIARKKDWDPKKYGGFDSPTVAYSVLVVAKVEKGKSKKLKSVKELLGITIMERSSFEKNPIDFLEAKGYKEVKKDLIIKLPKYSLFELENGRKRMLASAGELQKGNELALPSKYVNFLYLASHYEKLKGSPEDNEQKQLFVEQHKHYLDEIIEQISEFSKRVILADANLDKVLSAYNKHRDKPIREQAENIIHLFTLTNLGAPAAFKYFDTTIDRKRYTSTKEVLDATLIHQSITGLYETRIDLSQLGGDGGGSSGSSGSSGSSGSSGGTLNLEDEYRLYETSAEPEVSPGSTWLSDFPQAWAETGGMGLAVRQAPLIIPLKATSTPVSIKQYPMSQEAKLGIKPHIQRLLDQGILVPCQSPWNTPLLPVKKPGTNDYRPVQDLREVNKRVEDIHPTVPNPYNLLSGLPPSHRWYTVLDLKDAFFCLRLHPTSQPLFAFEWRDPGMGISGQLTWTRLPQGFKNSPTLFNEALHRDLADFRIQHPDLILLQYVDDILLAATSELDCQQGTRALLLTLGNLGYRASAKKAQLCQKQVKYLGYLLKEGQRWLTEARKETVMGQPTPKTPRQLREFLGTAGFCRLWIPGFAEMAAPLYPLTKPGTLFNWGPDQQKAYQEIKQALLTAPALGLPDLTKPFELFVDEKQGYAKGVLTQKLGPWRRPVAYLSKKLDPVAAGWPPCLRMVAAIAVLRKDAGKLTMGQPLVILAPHAVEALVKQPPDRWLSNARMTHYQAMLLDTDRVQFGPVVALNPATLLPLPEEGAPHDCLEILAETHGTRPDLTDQPIPDADHTWYTDGSSFLQEGQRKAGAAVTTETEVIWARALPAGTSAQRAELIALTQALKMAEGKRLNVYTDSRYAFATAHIHGEIYRRRGWLTSEGREIKNKSEILALLKALFLPKRLSIIHCLGHQKGDSAEARGNRLADQAAREAAIKTPPDTSTLLAGKRTADGSEFEKRTADGSEFESPKKKAKVE

SEQ ID NO: 6333 - protein, 2100 aa, synthetic construct
MPAAKRVKLDGGDKKYSIGLDIGTNSVGWAVITDEYKVPSKKFKVLGNTDRHSIKKNLIGALLFDSGETAEATRLKRTARRRYTRRKNRICYLQEIFSNEMAKVDDSFFHRLEESFLVEEDKKHERHPIFGNIVDEVAYHEKYPTIYHLRKKLVDSTDKADLRLIYLALAHMIKFRGHFLIEGDLNPDNSDVDKLFIQLVQTYNQLFEENPINASGVDAKAILSARLSKSRRLENLIAQLPGEKKNGLFGNLIALSLGLTPNFKSNFDLAEDAKLQLSKDTYDDDLDNLLAQIGDQYADLFLAAKNLSDAILLSDILRVNTEITKAPLSASMIKRYDEHHQDLTLLKALVRQQLPEKYKEIFFDQSKNGYAGYIDGGASQEEFYKFIKPILEKMDGTEELLVKLNREDLLRKQRTFDNGSIPHQIHLGELHAILRRQEDFYPFLKDNREKIEKILTFRIPYYVGPLARGNSRFAWMTRKSEETITPWNFEEVVDKGASAQSFIERMTNFDKNLPNEKVLPKHSLLYEYFTVYNELTKVKYVTEGMRKPAFLSGEQKKAIVDLLFKTNRKVTVKQLKEDYFKKIECFDSVEISGVEDRFNASLGTYHDLLKIIKDKDFLDNEENEDILEDIVLTLTLFEDREMIEERLKTYAHLFDDKVMKQLKRRRYTGWGRLSRKLINGIRDKQSGKTILDFLKSDGFANRNFMQLIHDDSLTFKEDIQKAQVSGQGDSLHEHIANLAGSPAIKKGILQTVKVVDELVKVMGRHKPENIVIEMARENQTTQKGQKNSRERMKRIEEGIKELGSQILKEHPVENTQLQNEKLYLYYLQNGRDMYVDQELDINRLSDYDVDHIVPQSFLKDDSIDNKVLTRSDKARGKSDNVPSEEVVKKMKNYWRQLLNAKLITQRKFDNLTKAERGGLSELDKAGFIKRQLVETRQITKHVAQILDSRMNTKYDENDKLIREVKVITLKSKLVSDFRKDFQFYKVREINNYHHAHDAYLNAVVGTALIKKYPKLESEFVYGDYKVYDVRKMIAKSEQEIGKATAKYFFYSNIMNFFKTEITLANGEIRKRPLIETNGETGEIVWDKGRDFATVRKVLSMPQVNIVKKTEVQTGGFSKESILPKRNSDKLIARKKDWDPKKYGGFDSPTVAYSVLVVAKVEKGKSKKLKSVKELLGITIMERSSFEKNPIDFLEAKGYKEVKKDLIIKLPKYSLFELENGRKRMLASAGELQKGNELALPSKYVNFLYLASHYEKLKGSPEDNEQKQLFVEQHKHYLDEIIEQISEFSKRVILADANLDKVLSAYNKHRDKPIREQAENIIHLFTLTNLGAPAAFKYFDTTIDRKRYTSTKEVLDATLIHQSITGLYETRIDLSQLGGDGGGSSGSSGSSGSSGSSGGTLGIEDEYRLHETSTEPDVSLGSTWLSDFPQAWAETGGMGLAVRQAPLIIPLKATSTPVSIQQYPMSHEARLGIKPHIQRLLDQGILVPCQSPWNTPLLPVKKPGTNDYRPVQDLREVNKRVEDIHPTVPNPYNLLSGLPPSHQWYTVLDLKDAFFCLRLHPTSQPLFAFEWRDPGMGISGQLTWTRLPQGFKNSPTLFNEALHRDLADFRIQHPDLILLQYVDDILLAATSELDCQQGTRALLQTLGDLGYRASAKKAQICQKQVKYLGYLLREGQRWLTEARKETVMGQPVPKTPRQLREFLGTAGFCRLWIPGFAEMAAPLYPLTKPGTLFSWGPDQQKAYQEIKQALLTAPALGLPDLTKPFELFVDEKQGYAKGVLTQKLGPWRRPVAYLSKKLDPVAAGWPPCLRMVAAIAVLTKDAGKLTMGQPLVILAPHAVEALVKQPPDRWLSNARMTHYQAMLLDTDRVQFGPVVALNPATLLPLPEEGAPHDCLEILAETHGTRPDLTDQPIPDADHTWYTDGSSFLQEGQRKAGAAVTTETEVIWAGALPAGTSAQRAELIALTQALKMAEGKRLNVYTDSRYAFATAHIHGEIYRRRGWLTSEGREIKNKSEILALLKALFLPKRLSIIHCLGHQKGDSAEARGNRLADQAAREAAIKTPPDTSTLLAGKRTADGSEFEKRTADGSEFESPKKKAKVE

SEQ ID NO: 6334 - protein, 2100 aa, synthetic construct
MPAAKRVKLDGGDKKYSIGLDIGTNSVGWAVITDEYKVPSKKFKVLGNTDRHSIKKNLIGALLFDSGETAEATRLKRTARRRYTRRKNRICYLQEIFSNEMAKVDDSFFHRLEESFLVEEDKKHERHPIFGNIVDEVAYHEKYPTIYHLRKKLVDSTDKADLRLIYLALAHMIKFRGHFLIEGDLNPDNSDVDKLFIQLVQTYNQLFEENPINASGVDAKAILSARLSKSRRLENLIAQLPGEKKNGLFGNLIALSLGLTPNFKSNFDLAEDAKLQLSKDTYDDDLDNLLAQIGDQYADLFLAAKNLSDAILLSDILRVNTEITKAPLSASMIKRYDEHHQDLTLLKALVRQQLPEKYKEIFFDQSKNGYAGYIDGGASQEEFYKFIKPILEKMDGTEELLVKLNREDLLRKQRTFDNGSIPHQIHLGELHAILRRQEDFYPFLKDNREKIEKILTFRIPYYVGPLARGNSRFAWMTRKSEETITPWNFEEVVDKGASAQSFIERMTNFDKNLPNEKVLPKHSLLYEYFTVYNELTKVKYVTEGMRKPAFLSGEQKKAIVDLLFKTNRKVTVKQLKEDYFKKIECFDSVEISGVEDRFNASLGTYHDLLKIIKDKDFLDNEENEDILEDIVLTLTLFEDREMIEERLKTYAHLFDDKVMKQLKRRRYTGWGRLSRKLINGIRDKQSGKTILDFLKSDGFANRNFMQLIHDDSLTFKEDIQKAQVSGQGDSLHEHIANLAGSPAIKKGILQTVKVVDELVKVMGRHKPENIVIEMARENQTTQKGQKNSRERMKRIEEGIKELGSQILKEHPVENTQLQNEKLYLYYLQNGRDMYVDQELDINRLSDYDVDHIVPQSFLKDDSIDNKVLTRSDKARGKSDNVPSEEVVKKMKNYWRQLLNAKLITQRKFDNLTKAERGGLSELDKAGFIKRQLVETRQITKHVAQILDSRMNTKYDENDKLIREVKVITLKSKLVSDFRKDFQFYKVREINNYHHAHDAYLNAVVGTALIKKYPKLESEFVYGDYKVYDVRKMIAKSEQEIGKATAKYFFYSNIMNFFKTEITLANGEIRKRPLIETNGETGEIVWDKGRDFATVRKVLSMPQVNIVKKTEVQTGGFSKESILPKRNSDKLIARKKDWDPKKYGGFDSPTVAYSVLVVAKVEKGKSKKLKSVKELLGITIMERSSFEKNPIDFLEAKGYKEVKKDLIIKLPKYSLFELENGRKRMLASAGELQKGNELALPSKYVNFLYLASHYEKLKGSPEDNEQKQLFVEQHKHYLDEIIEQISEFSKRVILADANLDKVLSAYNKHRDKPIREQAENIIHLFTLTNLGAPAAFKYFDTTIDRKRYTSTKEVLDATLIHQSITGLYETRIDLSQLGGDGGGSSGSSGSSGSSGSSGGTLNIEDEYRLHEISTEPDVSPGSTWLSDFPQAWAETGGMGLAVRQAPLIIPLKATSTPVSIKQYPMSQEAKLGIKPHIQRLLDQGILVPCQSPWNTPLLPVKKPGTNDYRPVQGLREVNKRVEDIHPTVPNPYNLLSGLPTSHRWYTVLDLKDAFFCLRLHPTSQPLFASEWRDPGMGISGQLTWTRLPQGFKNSPTLFDEALHRGLADFRIQHPDLILLQYVDDLLLAATSELDCQQGTRALLKTLGNLGYRASAKKAQICQKQVKYLGYLLREGQRWLTEARKETVMGQPTPKTPRQLREFLGTAGFCRLWIPRFAEMAAPLYPLTKTGTLFNWGPDQQKAYHEIKQALLTAPALGLPDLTKPFELFVDEKQGYAKGVLTQKLGPWRRPVAYLSKKLDPVAAGWPPCLRMVAAIAVLTKDAGKLTMGQPLVILAPHAVEALVKQPPDRWLSNARMTHYQAMLLDTDRVQFGPVVALNPATLLPLPEEGAPHDCLEILAETHGTEPDLTDQPIPDADHTWYTDGSSFLQEGQRKAGAAVTTETEVIWARALPAGTSAQRAELIALTQALKMAEGKRLNVYTDSRYAFATAHIHGEIYKRRGLLTSEGREIKNKSEILALLKALFLPKRLSIIHCLGHQKGDSAEARGNRLADQAAREAAIKTPPDTSTLLAGKRTADGSEFEKRTADGSEFESPKKKAKVE

SEQ ID NO: 6335 - protein, 2100 aa, synthetic construct
MPAAKRVKLDGGDKKYSIGLDIGTNSVGWAVITDEYKVPSKKFKVLGNTDRHSIKKNLIGALLFDSGETAEATRLKRTARRRYTRRKNRICYLQEIFSNEMAKVDDSFFHRLEESFLVEEDKKHERHPIFGNIVDEVAYHEKYPTIYHLRKKLVDSTDKADLRLIYLALAHMIKFRGHFLIEGDLNPDNSDVDKLFIQLVQTYNQLFEENPINASGVDAKAILSARLSKSRRLENLIAQLPGEKKNGLFGNLIALSLGLTPNFKSNFDLAEDAKLQLSKDTYDDDLDNLLAQIGDQYADLFLAAKNLSDAILLSDILRVNTEITKAPLSASMIKRYDEHHQDLTLLKALVRQQLPEKYKEIFFDQSKNGYAGYIDGGASQEEFYKFIKPILEKMDGTEELLVKLNREDLLRKQRTFDNGSIPHQIHLGELHAILRRQEDFYPFLKDNREKIEKILTFRIPYYVGPLARGNSRFAWMTRKSEETITPWNFEEVVDKGASAQSFIERMTNFDKNLPNEKVLPKHSLLYEYFTVYNELTKVKYVTEGMRKPAFLSGEQKKAIVDLLFKTNRKVTVKQLKEDYFKKIECFDSVEISGVEDRFNASLGTYHDLLKIIKDKDFLDNEENEDILEDIVLTLTLFEDREMIEERLKTYAHLFDDKVMKQLKRRRYTGWGRLSRKLINGIRDKQSGKTILDFLKSDGFANRNFMQLIHDDSLTFKEDIQKAQVSGQGDSLHEHIANLAGSPAIKKGILQTVKVVDELVKVMGRHKPENIVIEMARENQTTQKGQKNSRERMKRIEEGIKELGSQILKEHPVENTQLQNEKLYLYYLQNGRDMYVDQELDINRLSDYDVDHIVPQSFLKDDSIDNKVLTRSDKARGKSDNVPSEEVVKKMKNYWRQLLNAKLITQRKFDNLTKAERGGLSELDKAGFIKRQLVETRQITKHVAQILDSRMNTKYDENDKLIREVKVITLKSKLVSDFRKDFQFYKVREINNYHHAHDAYLNAVVGTALIKKYPKLESEFVYGDYKVYDVRKMIAKSEQEIGKATAKYFFYSNIMNFFKTEITLANGEIRKRPLIETNGETGEIVWDKGRDFATVRKVLSMPQVNIVKKTEVQTGGFSKESILPKRNSDKLIARKKDWDPKKYGGFDSPTVAYSVLVVAKVEKGKSKKLKSVKELLGITIMERSSFEKNPIDFLEAKGYKEVKKDLIIKLPKYSLFELENGRKRMLASAGELQKGNELALPSKYVNFLYLASHYEKLKGSPEDNEQKQLFVEQHKHYLDEIIEQISEFSKRVILADANLDKVLSAYNKHRDKPIREQAENIIHLFTLTNLGAPAAFKYFDTTIDRKRYTSTKEVLDATLIHQSITGLYETRIDLSQLGGDGGGSSGSSGSSGSSGSSGGTLNIEDEYRLHEISTEPDVSPGSTWLSDFPQAWAETGGMGLAVRQAPLIIPLKATSTPVSIKQYPMSQEAKLGIKPHIQRLLDQGILVPCQSPWNTPLLPVKKPGTNDYRPVQGLREVNKRVEDIHPTVPNPYNLLSGLPTSHRWYTVLDLKDAFFCLRLHPTSQPLFASEWRDPGMGISGQLTWTRLPQGFKNSPTLFNEALHRGLADFRIQHPDLILLQYVDDLLLAATSELDCQQGTRALLKTLGNLGYRASAKKAQICQKQVKYLGYLLREGQRWLTEARKETVMGQPTPKTPRQLREFLGTAGFCRLWIPRFAEMAAPLYPLTKPGTLFNWGPDQQKAYHEIKQALLTAPALGLPDLTKPFELFVDEKQGYAKGVLTQKLGPWRRPVAYLSKKLDPVAAGWPPCLRMVAAIAVLTKDAGKLTMGQPLVILAPHAVEALVKQPPDRWLSNARMTHYQAMLLDTDRVQFGPVVALNPATLLPLPEEGAPHDCLEILAETHGTEPDLTDQPIPDADHTWYTDGSSFLQEGQRKAGAAVTTETEVIWARALPAGTSAQRAELIALTQALKMAEGKRLNVYTDSRYAFATAHIHGEIYKRRGWLTSEGREIKNKSEILALLKALFLPKRLSIIHCLGHQKGDSAEARGNRLADQAAREAAIKTPPDTSTLLAGKRTADGSEFEKRTADGSEFESPKKKAKVE

SEQ ID NO: 6336 - protein, 2091 aa, synthetic construct
MPAAKRVKLDGGDKKYSIGLDIGTNSVGWAVITDEYKVPSKKFKVLGNTDRHSIKKNLIGALLFDSGETAEATRLKRTARRRYTRRKNRICYLQEIFSNEMAKVDDSFFHRLEESFLVEEDKKHERHPIFGNIVDEVAYHEKYPTIYHLRKKLVDSTDKADLRLIYLALAHMIKFRGHFLIEGDLNPDNSDVDKLFIQLVQTYNQLFEENPINASGVDAKAILSARLSKSRRLENLIAQLPGEKKNGLFGNLIALSLGLTPNFKSNFDLAEDAKLQLSKDTYDDDLDNLLAQIGDQYADLFLAAKNLSDAILLSDILRVNTEITKAPLSASMIKRYDEHHQDLTLLKALVRQQLPEKYKEIFFDQSKNGYAGYIDGGASQEEFYKFIKPILEKMDGTEELLVKLNREDLLRKQRTFDNGSIPHQIHLGELHAILRRQEDFYPFLKDNREKIEKILTFRIPYYVGPLARGNSRFAWMTRKSEETITPWNFEEVVDKGASAQSFIERMTNFDKNLPNEKVLPKHSLLYEYFTVYNELTKVKYVTEGMRKPAFLSGEQKKAIVDLLFKTNRKVTVKQLKEDYFKKIECFDSVEISGVEDRFNASLGTYHDLLKIIKDKDFLDNEENEDILEDIVLTLTLFEDREMIEERLKTYAHLFDDKVMKQLKRRRYTGWGRLSRKLINGIRDKQSGKTILDFLKSDGFANRNFMQLIHDDSLTFKEDIQKAQVSGQGDSLHEHIANLAGSPAIKKGILQTVKVVDELVKVMGRHKPENIVIEMARENQTTQKGQKNSRERMKRIEEGIKELGSQILKEHPVENTQLQNEKLYLYYLQNGRDMYVDQELDINRLSDYDVDHIVPQSFLKDDSIDNKVLTRSDKARGKSDNVPSEEVVKKMKNYWRQLLNAKLITQRKFDNLTKAERGGLSELDKAGFIKRQLVETRQITKHVAQILDSRMNTKYDENDKLIREVKVITLKSKLVSDFRKDFQFYKVREINNYHHAHDAYLNAVVGTALIKKYPKLESEFVYGDYKVYDVRKMIAKSEQEIGKATAKYFFYSNIMNFFKTEITLANGEIRKRPLIETNGETGEIVWDKGRDFATVRKVLSMPQVNIVKKTEVQTGGFSKESILPKRNSDKLIARKKDWDPKKYGGFDSPTVAYSVLVVAKVEKGKSKKLKSVKELLGITIMERSSFEKNPIDFLEAKGYKEVKKDLIIKLPKYSLFELENGRKRMLASAGELQKGNELALPSKYVNFLYLASHYEKLKGSPEDNEQKQLFVEQHKHYLDEIIEQISEFSKRVILADANLDKVLSAYNKHRDKPIREQAENIIHLFTLTNLGAPAAFKYFDTTIDRKRYTSTKEVLDATLIHQSITGLYETRIDLSQLGGDGGGSSGSSGSSGSSGSSGGIPWLMKKPLQLTTLVPLQEYEERLLKQTMLTGSYKEKLQSLFLKYDALWQHWENQVGHRRIKPHHIATGTVNPRPQKQYPINPKAKASIQTVINDLLKQGVLIQQNSIMNTPVYPVPKPDGKWRMVLDYREVNKTIPLIAAQNQHSAGILSSIFRGKYKTTLDLSNGFWAHSITPESYWLTAFTWLGQQYCWTRLPQGFLNSPALFNADVVDLLKEVPNVQVYVDDIYISHDDPREHLEQLEKVFSLLLNAGYVVSLKKSEIAQHEVEFLGFNITKEGRGLTETFKQKLLNITPPRDLKQLQSILGKLNFARNFIPNFSELVKPLYNIIATAPGKYITWTTDNSQQLQNIISMLNSAENLEERNPEVRLIMKVNTSPSAGYIRFYNEFAKRPIMYLNYVYTKAEVKFTNTEKLLTTIHKGLIKALDLGMGQEILVYSPIVSMTKIQKTPLPERKALPIRWITWMSYLEDPRIQFHYDKTLPELQQVPTVTDDIIAKIKHPSEFSMVFYTDGSAIKHPNVNKSHNAGMGIAQVQFKPEFTVINTWSIPLGDHTAQLAEVAAVEFACKKALKIDGPVLIVTDSFYVAESVNKELPYWQSNGFFNNKKKPLKHVSKWKSIADCIQLKPDIIIIHEKGHQPTASTFHTEGNNLADKLATQGSYVVNAGKRTADGSEFEKRTADGSEFESPKKKAKVE

SEQ ID NO: 6337 - protein, 2105 aa, synthetic construct
MPAAKRVKLDGGDKKYSIGLDIGTNSVGWAVITDEYKVPSKKFKVLGNTDRHSIKKNLIGALLFDSGETAEATRLKRTARRRYTRRKNRICYLQEIFSNEMAKVDDSFFHRLEESFLVEEDKKHERHPIFGNIVDEVAYHEKYPTIYHLRKKLVDSTDKADLRLIYLALAHMIKFRGHFLIEGDLNPDNSDVDKLFIQLVQTYNQLFEENPINASGVDAKAILSARLSKSRRLENLIAQLPGEKKNGLFGNLIALSLGLTPNFKSNFDLAEDAKLQLSKDTYDDDLDNLLAQIGDQYADLFLAAKNLSDAILLSDILRVNTEITKAPLSASMIKRYDEHHQDLTLLKALVRQQLPEKYKEIFFDQSKNGYAGYIDGGASQEEFYKFIKPILEKMDGTEELLVKLNREDLLRKQRTFDNGSIPHQIHLGELHAILRRQEDFYPFLKDNREKIEKILTFRIPYYVGPLARGNSRFAWMTRKSEETITPWNFEEVVDKGASAQSFIERMTNFDKNLPNEKVLPKHSLLYEYFTVYNELTKVKYVTEGMRKPAFLSGEQKKAIVDLLFKTNRKVTVKQLKEDYFKKIECFDSVEISGVEDRFNASLGTYHDLLKIIKDKDFLDNEENEDILEDIVLTLTLFEDREMIEERLKTYAHLFDDKVMKQLKRRRYTGWGRLSRKLINGIRDKQSGKTILDFLKSDGFANRNFMQLIHDDSLTFKEDIQKAQVSGQGDSLHEHIANLAGSPAIKKGILQTVKVVDELVKVMGRHKPENIVIEMARENQTTQKGQKNSRERMKRIEEGIKELGSQILKEHPVENTQLQNEKLYLYYLQNGRDMYVDQELDINRLSDYDVDHIVPQSFLKDDSIDNKVLTRSDKARGKSDNVPSEEVVKKMKNYWRQLLNAKLITQRKFDNLTKAERGGLSELDKAGFIKRQLVETRQITKHVAQILDSRMNTKYDENDKLIREVKVITLKSKLVSDFRKDFQFYKVREINNYHHAHDAYLNAVVGTALIKKYPKLESEFVYGDYKVYDVRKMIAKSEQEIGKATAKYFFYSNIMNFFKTEITLANGEIRKRPLIETNGETGEIVWDKGRDFATVRKVLSMPQVNIVKKTEVQTGGFSKESILPKRNSDKLIARKKDWDPKKYGGFDSPTVAYSVLVVAKVEKGKSKKLKSVKELLGITIMERSSFEKNPIDFLEAKGYKEVKKDLIIKLPKYSLFELENGRKRMLASAGELQKGNELALPSKYVNFLYLASHYEKLKGSPEDNEQKQLFVEQHKHYLDEIIEQISEFSKRVILADANLDKVLSAYNKHRDKPIREQAENIIHLFTLTNLGAPAAFKYFDTTIDRKRYTSTKEVLDATLIHQSITGLYETRIDLSQLGGDGGGSSGSSGSSGSSGSSGSSGGTAPLEEEYRLFLEAPIQNVTLLEQWKREIPKVWAEINPPGLASTQAPIHVQLLSTALPVRVRQYPITLEAKRSLRETIRKFRAAGILRPVHSPWNTPLLPVRKSGTSEYRMVQDLREVNKRVETIHPTVPNPYTLLSLLPPDRIWYSVLDLKDAFFCIPLAPESQLIFAFEWADAEEGESGQLTWTRLPQGFKNSPTLFDEALNRDLQGFRLDHPSVSLLQYVDDLLIAADTQAACLSATRDLLMTLAELGYRVSGKKAQLCQEEVTYLGFKIHKGSRSLSNSRTQAILQIPVPKTKRQVREFLGTIGYCRLWIPGFAELAQPLYAATRGGNDPLVWGEKEEEAFQSLKLALTQPPALALPSLDKPFQLFVEETSGAAKGVLTQALGPWKRPVAYLSKRLDPVAAGWPRCLRAIAAAALLTREASKLTFGQDIEITSSHNLESLLRSPPDKWLTNARITQYQVLLLDPPRVRFKQTAALNPATLLPETDDTLPIHHCLDTLDSLTSTRPDLTDQPLAQAEATLFTDGSSYIRDGKRYAGAAVVTLDSVIWAEPLPIGTSAQKAELIALTKALEWSKDKSVNIYTDSRYAFATLHVHGMIYRERGLLTAGGKAIKNAPEILALLTAVWLPKRVAVMHCKGHQKDDAPTSTGNRRADEVAREVAIRPLSTQATISAGKRTADGSEFEKRTADGSEFESPKKKAKVE

SEQ ID NO: 6338 - protein, 2180 aa, synthetic construct
MPAAKRVKLDGGDKKYSIGLDIGTNSVGWAVITDEYKVPSKKFKVLGNTDRHSIKKNLIGALLFDSGETAEATRLKRTARRRYTRRKNRICYLQEIFSNEMAKVDDSFFHRLEESFLVEEDKKHERHPIFGNIVDEVAYHEKYPTIYHLRKKLVDSTDKADLRLIYLALAHMIKFRGHFLIEGDLNPDNSDVDKLFIQLVQTYNQLFEENPINASGVDAKAILSARLSKSRRLENLIAQLPGEKKNGLFGNLIALSLGLTPNFKSNFDLAEDAKLQLSKDTYDDDLDNLLAQIGDQYADLFLAAKNLSDAILLSDILRVNTEITKAPLSASMIKRYDEHHQDLTLLKALVRQQLPEKYKEIFFDQSKNGYAGYIDGGASQEEFYKFIKPILEKMDGTEELLVKLNREDLLRKQRTFDNGSIPHQIHLGELHAILRRQEDFYPFLKDNREKIEKILTFRIPYYVGPLARGNSRFAWMTRKSEETITPWNFEEVVDKGASAQSFIERMTNFDKNLPNEKVLPKHSLLYEYFTVYNELTKVKYVTEGMRKPAFLSGEQKKAIVDLLFKTNRKVTVKQLKEDYFKKIECFDSVEISGVEDRFNASLGTYHDLLKIIKDKDFLDNEENEDILEDIVLTLTLFEDREMIEERLKTYAHLFDDKVMKQLKRRRYTGWGRLSRKLINGIRDKQSGKTILDFLKSDGFANRNFMQLIHDDSLTFKEDIQKAQVSGQGDSLHEHIANLAGSPAIKKGILQTVKVVDELVKVMGRHKPENIVIEMARENQTTQKGQKNSRERMKRIEEGIKELGSQILKEHPVENTQLQNEKLYLYYLQNGRDMYVDQELDINRLSDYDVDHIVPQSFLKDDSIDNKVLTRSDKARGKSDNVPSEEVVKKMKNYWRQLLNAKLITQRKFDNLTKAERGGLSELDKAGFIKRQLVETRQITKHVAQILDSRMNTKYDENDKLIREVKVITLKSKLVSDFRKDFQFYKVREINNYHHAHDAYLNAVVGTALIKKYPKLESEFVYGDYKVYDVRKMIAKSEQEIGKATAKYFFYSNIMNFFKTEITLANGEIRKRPLIETNGETGEIVWDKGRDFATVRKVLSMPQVNIVKKTEVQTGGFSKESILPKRNSDKLIARKKDWDPKKYGGFDSPTVAYSVLVVAKVEKGKSKKLKSVKELLGITIMERSSFEKNPIDFLEAKGYKEVKKDLIIKLPKYSLFELENGRKRMLASAGELQKGNELALPSKYVNFLYLASHYEKLKGSPEDNEQKQLFVEQHKHYLDEIIEQISEFSKRVILADANLDKVLSAYNKHRDKPIREQAENIIHLFTLTNLGAPAAFKYFDTTIDRKRYTSTKEVLDATLIHQSITGLYETRIDLSQLGGDGGGSSGSSGSSGSSGSSGSSGGMDLLKPLTVERKGVKIKGYWNSQADITCVPKDLLQGEEPVRQQNVTTIHGTQEGDVYYVNLKIDGRRINTEVIGTTLDYAIITPGDVPWILKKPLELTIKLDLEEQQGTLLNNSILSKKGKEELKQLFEKYSALWQSWENQVGHRRIRPHKIATGTVKPTPQKQYHINPKAKPDIQIVINDLLKQGVLIQKESTMNTPVYPVPKPNGRWRMVLDYRAVNKVTPLIAVQNQHSYGILGSLFKGRYKTTIDLSNGFWAHPIVPEDYWITAFTWQGKQYCWTVLPQGFLNSPGLFNGDVVDLLQGIPNVEVYVDDVYISHDSEKEHLEYLDILFNRLKEAGYIISLKKSNIANSIVDFLGFQITNEGRGLTDTFKEKLENITAPTTLKQLQSILGLLNFARNFIPDFTELIAPLYALIPKSPKNYVPWQIEHSTTLETLITKLNGAEYLQGRKGDKTLIMKVNASYTTGYIRYYNEGEKKPISYVSIVFSKTELKFTELEKLLTTVHKGLLKALDLSMGQNIHVYSPIVSMQNIQKTPQTAKKALASRWLSWLSYLEDPRIRFFYDPQMPALKDLPAVDTGKDNKKHPSNFQHIFYTDGSAITSPTKEGHLNAGMGIVYFINKDGNLQKQQEWSISLGNHTAQFAEIAAFEFALKKCLPLGGNILVVTDSNYVAKAYNEELDVWASNGFVNNRKKPLKHISKWKSVADLKRLRPDVVVTHEPGHQKLDSSPHAYGNNLADQLATQASFKVHAGKRTADGSEFEKRTADGSEFESPKKKAKVE

SEQ ID NO: 6339 - protein, 2102 aa, synthetic construct
MPAAKRVKLDGGDKKYSIGLDIGTNSVGWAVITDEYKVPSKKFKVLGNTDRHSIKKNLIGALLFDSGETAEATRLKRTARRRYTRRKNRICYLQEIFSNEMAKVDDSFFHRLEESFLVEEDKKHERHPIFGNIVDEVAYHEKYPTIYHLRKKLVDSTDKADLRLIYLALAHMIKFRGHFLIEGDLNPDNSDVDKLFIQLVQTYNQLFEENPINASGVDAKAILSARLSKSRRLENLIAQLPGEKKNGLFGNLIALSLGLTPNFKSNFDLAEDAKLQLSKDTYDDDLDNLLAQIGDQYADLFLAAKNLSDAILLSDILRVNTEITKAPLSASMIKRYDEHHQDLTLLKALVRQQLPEKYKEIFFDQSKNGYAGYIDGGASQEEFYKFIKPILEKMDGTEELLVKLNREDLLRKQRTFDNGSIPHQIHLGELHAILRRQEDFYPFLKDNREKIEKILTFRIPYYVGPLARGNSRFAWMTRKSEETITPWNFEEVVDKGASAQSFIERMTNFDKNLPNEKVLPKHSLLYEYFTVYNELTKVKYVTEGMRKPAFLSGEQKKAIVDLLFKTNRKVTVKQLKEDYFKKIECFDSVEISGVEDRFNASLGTYHDLLKIIKDKDFLDNEENEDILEDIVLTLTLFEDREMIEERLKTYAHLFDDKVMKQLKRRRYTGWGRLSRKLINGIRDKQSGKTILDFLKSDGFANRNFMQLIHDDSLTFKEDIQKAQVSGQGDSLHEHIANLAGSPAIKKGILQTVKVVDELVKVMGRHKPENIVIEMARENQTTQKGQKNSRERMKRIEEGIKELGSQILKEHPVENTQLQNEKLYLYYLQNGRDMYVDQELDINRLSDYDVDHIVPQSFLKDDSIDNKVLTRSDKARGKSDNVPSEEVVKKMKNYWRQLLNAKLITQRKFDNLTKAERGGLSELDKAGFIKRQLVETRQITKHVAQILDSRMNTKYDENDKLIREVKVITLKSKLVSDFRKDFQFYKVREINNYHHAHDAYLNAVVGTALIKKYPKLESEFVYGDYKVYDVRKMIAKSEQEIGKATAKYFFYSNIMNFFKTEITLANGEIRKRPLIETNGETGEIVWDKGRDFATVRKVLSMPQVNIVKKTEVQTGGFSKESILPKRNSDKLIARKKDWDPKKYGGFDSPTVAYSVLVVAKVEKGKSKKLKSVKELLGITIMERSSFEKNPIDFLEAKGYKEVKKDLIIKLPKYSLFELENGRKRMLASAGELQKGNELALPSKYVNFLYLASHYEKLKGSPEDNEQKQLFVEQHKHYLDEIIEQISEFSKRVILADANLDKVLSAYNKHRDKPIREQAENIIHLFTLTNLGAPAAFKYFDTTIDRKRYTSTKEVLDATLIHQSITGLYETRIDLSQLGGDGGGSSGSSGSSGSSGSSGSSGGTLQLEEEYRLFEPESTQKQEMDIWLKNFPQAWAETGGMGTAHCQAPVLIQLKATATPISIRQYPMPHEAYQGIKPHIRRMLDQGILKPCQSPWNTPLLPVKKPGTEDYRPVQDLREVNKRVEDIHPTVPNPYNLLSTLPPSHPWYTVLDLKDAFFCLRLHSESQLLFAFEWRDPEIGLSGQLTWTRLPQGFKNSPTLFNEALHSDLADFRVRYPALVLLQYVDDLLLAAATRTECLEGTKALLETLGNKGYRASAKKAQICLQEVTYLGYSLKDGQRWLTKARKEAILSIPVPKNSRQVREFLGTAGYCRLWIPGFAELAAPLYPLTRPGTLFQWGTEQQLAFEDIKKALLSSPALGLPDITKPFELFIDENSGFAKGVLVQKLGPWKRPVAYLSKKLDTVASGWPPCLRMVAAIAILVKDAGKLTLGQPLTILTSHPVEALVRQPPNKWLSNARMTHYQAMLLDAERVHFGPTVSLNPATLLPLPSGGNHHDCLQILAETHGTRPDLTDQPLPDADLTWYTDGSSFIRNGEREAGAAVTTESEVIWAAPLPPGTSAQRAELIALTQALKMAEGKKLTVYTDSRYAFATTHVHGEIYRRRGWLTSEGKEIKNKNEILALLEALFLPKRLSIIHCPGHQKGDSPQAKGNRLADDTAKKAATETHSSLTVLPAGKRTADGSEFEKRTADGSEFESPKKKAKVE

SEQ ID NO: 6340 - protein, 2094 aa, synthetic construct
MPAAKRVKLDGGDKKYSIGLDIGTNSVGWAVITDEYKVPSKKFKVLGNTDRHSIKKNLIGALLFDSGETAEATRLKRTARRRYTRRKNRICYLQEIFSNEMAKVDDSFFHRLEESFLVEEDKKHERHPIFGNIVDEVAYHEKYPTIYHLRKKLVDSTDKADLRLIYLALAHMIKFRGHFLIEGDLNPDNSDVDKLFIQLVQTYNQLFEENPINASGVDAKAILSARLSKSRRLENLIAQLPGEKKNGLFGNLIALSLGLTPNFKSNFDLAEDAKLQLSKDTYDDDLDNLLAQIGDQYADLFLAAKNLSDAILLSDILRVNTEITKAPLSASMIKRYDEHHQDLTLLKALVRQQLPEKYKEIFFDQSKNGYAGYIDGGASQEEFYKFIKPILEKMDGTEELLVKLNREDLLRKQRTFDNGSIPHQIHLGELHAILRRQEDFYPFLKDNREKIEKILTFRIPYYVGPLARGNSRFAWMTRKSEETITPWNFEEVVDKGASAQSFIERMTNFDKNLPNEKVLPKHSLLYEYFTVYNELTKVKYVTEGMRKPAFLSGEQKKAIVDLLFKTNRKVTVKQLKEDYFKKIECFDSVEISGVEDRFNASLGTYHDLLKIIKDKDFLDNEENEDILEDIVLTLTLFEDREMIEERLKTYAHLFDDKVMKQLKRRRYTGWGRLSRKLINGIRDKQSGKTILDFLKSDGFANRNFMQLIHDDSLTFKEDIQKAQVSGQGDSLHEHIANLAGSPAIKKGILQTVKVVDELVKVMGRHKPENIVIEMARENQTTQKGQKNSRERMKRIEEGIKELGSQILKEHPVENTQLQNEKLYLYYLQNGRDMYVDQELDINRLSDYDVDHIVPQSFLKDDSIDNKVLTRSDKARGKSDNVPSEEVVKKMKNYWRQLLNAKLITQRKFDNLTKAERGGLSELDKAGFIKRQLVETRQITKHVAQILDSRMNTKYDENDKLIREVKVITLKSKLVSDFRKDFQFYKVREINNYHHAHDAYLNAVVGTALIKKYPKLESEFVYGDYKVYDVRKMIAKSEQEIGKATAKYFFYSNIMNFFKTEITLANGEIRKRPLIETNGETGEIVWDKGRDFATVRKVLSMPQVNIVKKTEVQTGGFSKESILPKRNSDKLIARKKDWDPKKYGGFDSPTVAYSVLVVAKVEKGKSKKLKSVKELLGITIMERSSFEKNPIDFLEAKGYKEVKKDLIIKLPKYSLFELENGRKRMLASAGELQKGNELALPSKYVNFLYLASHYEKLKGSPEDNEQKQLFVEQHKHYLDEIIEQISEFSKRVILADANLDKVLSAYNKHRDKPIREQAENIIHLFTLTNLGAPAAFKYFDTTIDRKRYTSTKEVLDATLIHQSITGLYETRIDLSQLGGDGGGSSGSSGSSGSSGSSGSSGGVPWLTQQPLQLTILVPLQEYQEKILSKTALPEDQKQQLKTLFVKYDNLWQHWENQVGHRKIRPHNIATGDYPPRPQKQYPINPKAKPSIQIVIDDLLKQGVLTPQNSTMNTPVYPVPKPDGRWRMVLDYREVNKTIPLTAAQNQHSAGILATIVRQKYKTTLDLANGFWAHPITPESYWLTAFTWQGKQYCWTRLPQGFLNSPALFNADVVDLLKEIPNVQVYVDDIYLSHDDPKEHVQQLEKVFQILLQAGYVVSLKKSEIGQKTVEFLGFNITKEGRGLTDTFKTKLLNITPPKDLKQLQSILGLLNFARNFIPNFAELVQPLYNLIAPAKGKYIEWSEENTKQLNMVIEALNTASNLEERLPEQRLVIKVNTSPSAGYVRYYNETGKKPIMYLNYVFSKAELKFSMLEKLLTTMHKALIKAMDLAMGQEILVYSPIVSMTKIQKTPLPERKALPIRWITWMTYLEDPRIQFHYDKTLPELKHIPDVYTSSQSPVKHPSQYEGVFYTDGSAIKSPDPTKSNNAGMGIVHATYKPEYQVLNQWSIPLGNHTAQMAEIAAVEFACKKALKIPGPVLVITDSFYVAESANKELPYWKSNGFVNNKKKPLKHISKWKSIAECLSMKPDITIQHEKGISLQIPVFILKGNALADKLATQGSYVVNAGKRTADGSEFEKRTADGSEFESPKKKAKVE

SEQ ID NO: 6341 - protein, 2094 aa, synthetic construct
MPAAKRVKLDGGDKKYSIGLDIGTNSVGWAVITDEYKVPSKKFKVLGNTDRHSIKKNLIGALLFDSGETAEATRLKRTARRRYTRRKNRICYLQEIFSNEMAKVDDSFFHRLEESFLVEEDKKHERHPIFGNIVDEVAYHEKYPTIYHLRKKLVDSTDKADLRLIYLALAHMIKFRGHFLIEGDLNPDNSDVDKLFIQLVQTYNQLFEENPINASGVDAKAILSARLSKSRRLENLIAQLPGEKKNGLFGNLIALSLGLTPNFKSNFDLAEDAKLQLSKDTYDDDLDNLLAQIGDQYADLFLAAKNLSDAILLSDILRVNTEITKAPLSASMIKRYDEHHQDLTLLKALVRQQLPEKYKEIFFDQSKNGYAGYIDGGASQEEFYKFIKPILEKMDGTEELLVKLNREDLLRKQRTFDNGSIPHQIHLGELHAILRRQEDFYPFLKDNREKIEKILTFRIPYYVGPLARGNSRFAWMTRKSEETITPWNFEEVVDKGASAQSFIERMTNFDKNLPNEKVLPKHSLLYEYFTVYNELTKVKYVTEGMRKPAFLSGEQKKAIVDLLFKTNRKVTVKQLKEDYFKKIECFDSVEISGVEDRFNASLGTYHDLLKIIKDKDFLDNEENEDILEDIVLTLTLFEDREMIEERLKTYAHLFDDKVMKQLKRRRYTGWGRLSRKLINGIRDKQSGKTILDFLKSDGFANRNFMQLIHDDSLTFKEDIQKAQVSGQGDSLHEHIANLAGSPAIKKGILQTVKVVDELVKVMGRHKPENIVIEMARENQTTQKGQKNSRERMKRIEEGIKELGSQILKEHPVENTQLQNEKLYLYYLQNGRDMYVDQELDINRLSDYDVDHIVPQSFLKDDSIDNKVLTRSDKARGKSDNVPSEEVVKKMKNYWRQLLNAKLITQRKFDNLTKAERGGLSELDKAGFIKRQLVETRQITKHVAQILDSRMNTKYDENDKLIREVKVITLKSKLVSDFRKDFQFYKVREINNYHHAHDAYLNAVVGTALIKKYPKLESEFVYGDYKVYDVRKMIAKSEQEIGKATAKYFFYSNIMNFFKTEITLANGEIRKRPLIETNGETGEIVWDKGRDFATVRKVLSMPQVNIVKKTEVQTGGFSKESILPKRNSDKLIARKKDWDPKKYGGFDSPTVAYSVLVVAKVEKGKSKKLKSVKELLGITIMERSSFEKNPIDFLEAKGYKEVKKDLIIKLPKYSLFELENGRKRMLASAGELQKGNELALPSKYVNFLYLASHYEKLKGSPEDNEQKQLFVEQHKHYLDEIIEQISEFSKRVILADANLDKVLSAYNKHRDKPIREQAENIIHLFTLTNLGAPAAFKYFDTTIDRKRYTSTKEVLDATLIHQSITGLYETRIDLSQLGGDGGGSSGSSGSSGSSGSSGSSGGVPWLTQQPLQLTILVPLQEYQEKILSKTALPEDQKQQLKTLFVKYDNLWQHWENQVGHRKIRPHNIATGDYPPRPQKQYPINPKAKPSIQIVIDDLLKQGVLTPQNSTMNTPVYPVPKPDGRWRMVLDYREVNKTIPLTAAQNQHSAGILATIVRQKYKTTLDLANGFWAHPITPESYWLTAFTWQGKQYCWTRLPQGFLNSPALFNADVVDLLKEIPNVQVYVDDIYLSHDDPKEHVQQLEKVFQILLQAGYVVSLKKSEIGQKTVEFLGFNITKEGRGLTDTFKTKLLNITPPKDLKQLQSILGKLNFARNFIPNFAELVQPLYNLIAPAKGKYIEWSEENTKQLNMVIEALNTASNLEERLPEQRLVIKVNTSPSAGYVRYYNETGKKPIMYLNYVFSKAELKFSMLEKLLTTMHKALIKAMDLAMGQEILVYSPIVSMTKIQKTPLPERKALPIRWITWMTYLEDPRIQFHYDKTLPELKHIPDVYTSSQSPVKHPSQYEGVFYTDGSAIKSPDPTKSNNAGMGIVHATYKPEYQVLNQWSIPLGNHTAQMAEIAAVEFACKKALKIPGPVLVITDSFYVAESANKELPYWKSNGFVNNKKKPLKHISKWKSIAECLSMKPDITIQHEKGISLQIPVFILKGNALADKLATQGSYVVNAGKRTADGSEFEKRTADGSEFESPKKKAKVE

SEQ ID NO: 6342 - protein, 2183 aa, synthetic construct
MPAAKRVKLDGGDKKYSIGLDIGTNSVGWAVITDEYKVPSKKFKVLGNTDRHSIKKNLIGALLFDSGETAEATRLKRTARRRYTRRKNRICYLQEIFSNEMAKVDDSFFHRLEESFLVEEDKKHERHPIFGNIVDEVAYHEKYPTIYHLRKKLVDSTDKADLRLIYLALAHMIKFRGHFLIEGDLNPDNSDVDKLFIQLVQTYNQLFEENPINASGVDAKAILSARLSKSRRLENLIAQLPGEKKNGLFGNLIALSLGLTPNFKSNFDLAEDAKLQLSKDTYDDDLDNLLAQIGDQYADLFLAAKNLSDAILLSDILRVNTEITKAPLSASMIKRYDEHHQDLTLLKALVRQQLPEKYKEIFFDQSKNGYAGYIDGGASQEEFYKFIKPILEKMDGTEELLVKLNREDLLRKQRTFDNGSIPHQIHLGELHAILRRQEDFYPFLKDNREKIEKILTFRIPYYVGPLARGNSRFAWMTRKSEETITPWNFEEVVDKGASAQSFIERMTNFDKNLPNEKVLPKHSLLYEYFTVYNELTKVKYVTEGMRKPAFLSGEQKKAIVDLLFKTNRKVTVKQLKEDYFKKIECFDSVEISGVEDRFNASLGTYHDLLKIIKDKDFLDNEENEDILEDIVLTLTLFEDREMIEERLKTYAHLFDDKVMKQLKRRRYTGWGRLSRKLINGIRDKQSGKTILDFLKSDGFANRNFMQLIHDDSLTFKEDIQKAQVSGQGDSLHEHIANLAGSPAIKKGILQTVKVVDELVKVMGRHKPENIVIEMARENQTTQKGQKNSRERMKRIEEGIKELGSQILKEHPVENTQLQNEKLYLYYLQNGRDMYVDQELDINRLSDYDVDHIVPQSFLKDDSIDNKVLTRSDKARGKSDNVPSEEVVKKMKNYWRQLLNAKLITQRKFDNLTKAERGGLSELDKAGFIKRQLVETRQITKHVAQILDSRMNTKYDENDKLIREVKVITLKSKLVSDFRKDFQFYKVREINNYHHAHDAYLNAVVGTALIKKYPKLESEFVYGDYKVYDVRKMIAKSEQEIGKATAKYFFYSNIMNFFKTEITLANGEIRKRPLIETNGETGEIVWDKGRDFATVRKVLSMPQVNIVKKTEVQTGGFSKESILPKRNSDKLIARKKDWDPKKYGGFDSPTVAYSVLVVAKVEKGKSKKLKSVKELLGITIMERSSFEKNPIDFLEAKGYKEVKKDLIIKLPKYSLFELENGRKRMLASAGELQKGNELALPSKYVNFLYLASHYEKLKGSPEDNEQKQLFVEQHKHYLDEIIEQISEFSKRVILADANLDKVLSAYNKHRDKPIREQAENIIHLFTLTNLGAPAAFKYFDTTIDRKRYTSTKEVLDATLIHQSITGLYETRIDLSQLGGDGGGSSGSSGSSGSSGSSGSSGGMNPLQLLQPLPAEIKGTKLLAHWNSGATITCIPESFLEDEQPIKKTLIKTIHGEKQQNVYYVTFKVKGRKVEAEVIASPYEYILLSPTDVPWLTQQPLQLTILVPLQEYQEKILSKTALPEDQKQQLKTLFVKYDNLWQHWENQVGHRKIRPHNIATGDYPPRPQKQYPINPKAKPSIQIVIDDLLKQGVLTPQNSTMNTPVYPVPKPDGRWRMVLDYREVNKTIPLTAAQNQHSAGILATIVRQKYKTTLDLANGFWAHPITPESYWLTAFTWQGKQYCWTRLPQGFLNSPALFNADVVDLLKEIPNVQVYVDDIYLSHDDPKEHVQQLEKVFQILLQAGYVVSLKKSEIGQKTVEFLGFNITKEGRGLTDTFKTKLLNITPPKDLKQLQSILGLLNFARNFIPNFAELVQPLYNLIAPAKGKYIEWSEENTKQLNMVIEALNTASNLEERLPEQRLVIKVNTSPSAGYVRYYNETGKKPIMYLNYVFSKAELKFSMLEKLLTTMHKALIKAMDLAMGQEILVYSPIVSMTKIQKTPLPERKALPIRWITWMTYLEDPRIQFHYDKTLPELKHIPDVYTSSQSPVKHPSQYEGVFYTDGSAIKSPDPTKSNNAGMGIVHATYKPEYQVLNQWSIPLGNHTAQMAEIAAVEFACKKALKIPGPVLVITDSFYVAESANKELPYWKSNGFVNNKKKPLKHISKWKSIAECLSMKPDITIQHEKGISLQIPVFILKGNALADKLATQGSYVVNAGKRTADGSEFEKRTADGSEFESPKKKAKVE

SEQ ID NO: 6343 - protein, 2101 aa, synthetic construct
MPAAKRVKLDGGDKKYSIGLDIGTNSVGWAVITDEYKVPSKKFKVLGNTDRHSIKKNLIGALLFDSGETAEATRLKRTARRRYTRRKNRICYLQEIFSNEMAKVDDSFFHRLEESFLVEEDKKHERHPIFGNIVDEVAYHEKYPTIYHLRKKLVDSTDKADLRLIYLALAHMIKFRGHFLIEGDLNPDNSDVDKLFIQLVQTYNQLFEENPINASGVDAKAILSARLSKSRRLENLIAQLPGEKKNGLFGNLIALSLGLTPNFKSNFDLAEDAKLQLSKDTYDDDLDNLLAQIGDQYADLFLAAKNLSDAILLSDILRVNTEITKAPLSASMIKRYDEHHQDLTLLKALVRQQLPEKYKEIFFDQSKNGYAGYIDGGASQEEFYKFIKPILEKMDGTEELLVKLNREDLLRKQRTFDNGSIPHQIHLGELHAILRRQEDFYPFLKDNREKIEKILTFRIPYYVGPLARGNSRFAWMTRKSEETITPWNFEEVVDKGASAQSFIERMTNFDKNLPNEKVLPKHSLLYEYFTVYNELTKVKYVTEGMRKPAFLSGEQKKAIVDLLFKTNRKVTVKQLKEDYFKKIECFDSVEISGVEDRFNASLGTYHDLLKIIKDKDFLDNEENEDILEDIVLTLTLFEDREMIEERLKTYAHLFDDKVMKQLKRRRYTGWGRLSRKLINGIRDKQSGKTILDFLKSDGFANRNFMQLIHDDSLTFKEDIQKAQVSGQGDSLHEHIANLAGSPAIKKGILQTVKVVDELVKVMGRHKPENIVIEMARENQTTQKGQKNSRERMKRIEEGIKELGSQILKEHPVENTQLQNEKLYLYYLQNGRDMYVDQELDINRLSDYDVDHIVPQSFLKDDSIDNKVLTRSDKARGKSDNVPSEEVVKKMKNYWRQLLNAKLITQRKFDNLTKAERGGLSELDKAGFIKRQLVETRQITKHVAQILDSRMNTKYDENDKLIREVKVITLKSKLVSDFRKDFQFYKVREINNYHHAHDAYLNAVVGTALIKKYPKLESEFVYGDYKVYDVRKMIAKSEQEIGKATAKYFFYSNIMNFFKTEITLANGEIRKRPLIETNGETGEIVWDKGRDFATVRKVLSMPQVNIVKKTEVQTGGFSKESILPKRNSDKLIARKKDWDPKKYGGFDSPTVAYSVLVVAKVEKGKSKKLKSVKELLGITIMERSSFEKNPIDFLEAKGYKEVKKDLIIKLPKYSLFELENGRKRMLASAGELQKGNELALPSKYVNFLYLASHYEKLKGSPEDNEQKQLFVEQHKHYLDEIIEQISEFSKRVILADANLDKVLSAYNKHRDKPIREQAENIIHLFTLTNLGAPAAFKYFDTTIDRKRYTSTKEVLDATLIHQSITGLYETRIDLSQLGGDGGGSSGSSGSSGSSGSSGSSGGVLNLEEEYRLHEKPVPSSIDPSWLQLFPTVWAERAGMGLANQVPPVVVELRSGASPVAVRQYPMSKEAREGIRPHIQKFLDLGVLVPCRSPWNTPLLPVKKPGTNDYRPVQDLREINKRVQDIHPTVPNPYNLLSSLPPSYTWYSVLDLKDAFFCLRLHPNSQPLFAFEWKDPEKGNTGQLTWTRLPQGFKNSPTLFNEALHRDLAPFRALNPQVVLLQYVDDLLVAAPTYEDCKKGTQKLLQELSKLGYRVSAKKAQLCQREVTYLGYLLKEGKRWLTPARKATVMKIPVPTTPRQVREFLGKAGFCRLFIPGFASLAAPLYPLTKPSIPFIWTEEHQQAFDHIKKALLSAPALALPDLTKPFTLYIDERAGVARGVLTQTLGPWRRPVAYLSKKLDPVASGWPTCLKAVAAVALLLKDADKLTLGQNVTVIASHSLESIVRQPPDRWMTNARMTHYQSLLLNERVSFAPPAVLNPATLLPVESEATPVHRCSEILAEETGTRRDLEDQPLPGVPTWYTDGSSFITEGKRRAGAPIVDGKRTVWASSLPEGTSAQKAELVALTQALRLAEGKNINIYTDSRYAFATAHIHGAIYKQRGWLTSAGKDIKNKEEILALLEAIHLPRRVAIIHCPGHQRGSNPVATGNRRADEAAKQAALSTRVLAGTTKPAGKRTADGSEFEKRTADGSEFESPKKKAKVE

SEQ ID NO: 6344 - protein, 2134 aa, synthetic construct
MPAAKRVKLDGGDKKYSIGLDIGTNSVGWAVITDEYKVPSKKFKVLGNTDRHSIKKNLIGALLFDSGETAEATRLKRTARRRYTRRKNRICYLQEIFSNEMAKVDDSFFHRLEESFLVEEDKKHERHPIFGNIVDEVAYHEKYPTIYHLRKKLVDSTDKADLRLIYLALAHMIKFRGHFLIEGDLNPDNSDVDKLFIQLVQTYNQLFEENPINASGVDAKAILSARLSKSRRLENLIAQLPGEKKNGLFGNLIALSLGLTPNFKSNFDLAEDAKLQLSKDTYDDDLDNLLAQIGDQYADLFLAAKNLSDAILLSDILRVNTEITKAPLSASMIKRYDEHHQDLTLLKALVRQQLPEKYKEIFFDQSKNGYAGYIDGGASQEEFYKFIKPILEKMDGTEELLVKLNREDLLRKQRTFDNGSIPHQIHLGELHAILRRQEDFYPFLKDNREKIEKILTFRIPYYVGPLARGNSRFAWMTRKSEETITPWNFEEVVDKGASAQSFIERMTNFDKNLPNEKVLPKHSLLYEYFTVYNELTKVKYVTEGMRKPAFLSGEQKKAIVDLLFKTNRKVTVKQLKEDYFKKIECFDSVEISGVEDRFNASLGTYHDLLKIIKDKDFLDNEENEDILEDIVLTLTLFEDREMIEERLKTYAHLFDDKVMKQLKRRRYTGWGRLSRKLINGIRDKQSGKTILDFLKSDGFANRNFMQLIHDDSLTFKEDIQKAQVSGQGDSLHEHIANLAGSPAIKKGILQTVKVVDELVKVMGRHKPENIVIEMARENQTTQKGQKNSRERMKRIEEGIKELGSQILKEHPVENTQLQNEKLYLYYLQNGRDMYVDQELDINRLSDYDVDHIVPQSFLKDDSIDNKVLTRSDKARGKSDNVPSEEVVKKMKNYWRQLLNAKLITQRKFDNLTKAERGGLSELDKAGFIKRQLVETRQITKHVAQILDSRMNTKYDENDKLIREVKVITLKSKLVSDFRKDFQFYKVREINNYHHAHDAYLNAVVGTALIKKYPKLESEFVYGDYKVYDVRKMIAKSEQEIGKATAKYFFYSNIMNFFKTEITLANGEIRKRPLIETNGETGEIVWDKGRDFATVRKVLSMPQVNIVKKTEVQTGGFSKESILPKRNSDKLIARKKDWDPKKYGGFDSPTVAYSVLVVAKVEKGKSKKLKSVKELLGITIMERSSFEKNPIDFLEAKGYKEVKKDLIIKLPKYSLFELENGRKRMLASAGELQKGNELALPSKYVNFLYLASHYEKLKGSPEDNEQKQLFVEQHKHYLDEIIEQISEFSKRVILADANLDKVLSAYNKHRDKPIREQAENIIHLFTLTNLGAPAAFKYFDTTIDRKRYTSTKEVLDATLIHQSITGLYETRIDLSQLGGDGGGSSGSSGSSGSSGSSGSSGGLLGRDLLTKLKAQIQFSTEGPQVTWEDRPAMCLVLNLEEEYRLHEKPVPPSIDPSWLQLFPMVWAEKAGMGLANQVPPVVVELKSDASPVAVRQYPMSKEAREGIRPHIQRFLDLGILVPCQSPWNTPLLPVKKPGTNDYRPVQDLREVNKRVQDIHPTVPNPYNLLSSLPPSHTWYSVLDLKDAFFCLKLHPNSQPLFAFEWRDPEKGNTGQLTWTRLPQGFKNSPTLFNEALHRDLASFRALNPQVVMLQYVDDLLVAAPTYRDCKEGTRRLLQELSKLGYRVSAKKAQLCREEVTYLGYLLKGGKRWLTPARKATVMKIPTPTTPRQVREFLGTAGFCRLWIPGFASLAAPLYPLTRPKVPFTWTEAHQEAFGRIKEALLSAPALALPDLTKPFALYVDEKEGVARGVLTQTLGPWRRPVAYLSKKLDPVASGWPTCLKAIAAVALLLKDADKLTLGQNVLVIAPHNLESIVRQPPDRWMTNARMTHYQSLLLNERVSFAPPAILNPATLLPVESDDTPIHICSEILAEETGTRPDLRDQPLPGVPAWYTDGSSFIMDGRRQAGAAIVDNKRTVWASNLPEGTSAQKAELIALTQALRLAEGKSINIYTDSRYAFATAHVHGAIYKQRGWLTSAGKDIKNKEEILALLEAIHLPKRVAIIHCPGHQRGTDPVATGNRKADEAAKQAAQSTRILTETTKNAGKRTADGSEFEKRTADGSEFESPKKKAKVE

SEQ ID NO: 6345 - protein, 2225 aa, synthetic construct
MPAAKRVKLDGGDKKYSIGLDIGTNSVGWAVITDEYKVPSKKFKVLGNTDRHSIKKNLIGALLFDSGETAEATRLKRTARRRYTRRKNRICYLQEIFSNEMAKVDDSFFHRLEESFLVEEDKKHERHPIFGNIVDEVAYHEKYPTIYHLRKKLVDSTDKADLRLIYLALAHMIKFRGHFLIEGDLNPDNSDVDKLFIQLVQTYNQLFEENPINASGVDAKAILSARLSKSRRLENLIAQLPGEKKNGLFGNLIALSLGLTPNFKSNFDLAEDAKLQLSKDTYDDDLDNLLAQIGDQYADLFLAAKNLSDAILLSDILRVNTEITKAPLSASMIKRYDEHHQDLTLLKALVRQQLPEKYKEIFFDQSKNGYAGYIDGGASQEEFYKFIKPILEKMDGTEELLVKLNREDLLRKQRTFDNGSIPHQIHLGELHAILRRQEDFYPFLKDNREKIEKILTFRIPYYVGPLARGNSRFAWMTRKSEETITPWNFEEVVDKGASAQSFIERMTNFDKNLPNEKVLPKHSLLYEYFTVYNELTKVKYVTEGMRKPAFLSGEQKKAIVDLLFKTNRKVTVKQLKEDYFKKIECFDSVEISGVEDRFNASLGTYHDLLKIIKDKDFLDNEENEDILEDIVLTLTLFEDREMIEERLKTYAHLFDDKVMKQLKRRRYTGWGRLSRKLINGIRDKQSGKTILDFLKSDGFANRNFMQLIHDDSLTFKEDIQKAQVSGQGDSLHEHIANLAGSPAIKKGILQTVKVVDELVKVMGRHKPENIVIEMARENQTTQKGQKNSRERMKRIEEGIKELGSQILKEHPVENTQLQNEKLYLYYLQNGRDMYVDQELDINRLSDYDVDHIVPQSFLKDDSIDNKVLTRSDKARGKSDNVPSEEVVKKMKNYWRQLLNAKLITQRKFDNLTKAERGGLSELDKAGFIKRQLVETRQITKHVAQILDSRMNTKYDENDKLIREVKVITLKSKLVSDFRKDFQFYKVREINNYHHAHDAYLNAVVGTALIKKYPKLESEFVYGDYKVYDVRKMIAKSEQEIGKATAKYFFYSNIMNFFKTEITLANGEIRKRPLIETNGETGEIVWDKGRDFATVRKVLSMPQVNIVKKTEVQTGGFSKESILPKRNSDKLIARKKDWDPKKYGGFDSPTVAYSVLVVAKVEKGKSKKLKSVKELLGITIMERSSFEKNPIDFLEAKGYKEVKKDLIIKLPKYSLFELENGRKRMLASAGELQKGNELALPSKYVNFLYLASHYEKLKGSPEDNEQKQLFVEQHKHYLDEIIEQISEFSKRVILADANLDKVLSAYNKHRDKPIREQAENIIHLFTLTNLGAPAAFKYFDTTIDRKRYTSTKEVLDATLIHQSITGLYETRIDLSQLGGDGGGSSGSSGSSGSSGSSGSSGGTLGDQGSRGSDPLPEPRVTLTVEGIPTEFLVNTGAEHSVLTKPMGKMGSKRTVVAGATGSKVYPWTTKRLLKIGQKQVTHSFLVIPECPAPLLGRDLLTKLKAQIQFSTEGPQVTWEDRPAMCLVLNLEEEYRLHEKPVPPSIDPSWLQLFPMVWAEKAGMGLANQVPPVVVELKSDASPVAVRQYPMSKEAREGIRPHIQRFLDLGILVPCQSPWNTPLLPVKKPGTNDYRPVQDLREVNKRVQDIHPTVPNPYNLLSSLPPSHTWYSVLDLKDAFFCLKLHPNSQPLFAFEWRDPEKGNTGQLTWTRLPQGFKNSPTLFNEALHRDLASFRALNPQVVMLQYVDDLLVAAPTYRDCKEGTRRLLQELSKLGYRVSAKKAQLCREEVTYLGYLLKGGKRWLTPARKATVMKIPTPTTPRQVREFLGTAGFCRLWIPGFASLAAPLYPLTRPKVPFTWTEAHQEAFGRIKEALLSAPALALPDLTKPFALYVDEKEGVARGVLTQTLGPWRRPVAYLSKKLDPVASGWPTCLKAIAAVALLLKDADKLTLGQNVLVIAPHNLESIVRQPPDRWMTNARMTHYQSLLLNERVSFAPPAILNPATLLPVESDDTPIHICSEILAEETGTRPDLRDQPLPGVPAWYTDGSSFIMDGRRQAGAAIVDNKRTVWASNLPEGTSAQKAELIALTQALRLAEGKSINIYTDSRYAFATAHVHGAIYKQRGWLTSAGKDIKNKEEILALLEAIHLPKRVAIIHCPGHQRGTDPVATGNRKADEAAKQAAQSTRILTETTKNAGKRTADGSEFEKRTADGSEFESPKKKAKVE

SEQ ID NO: 6346 - protein, 2225 aa, synthetic construct
MPAAKRVKLDGGDKKYSIGLDIGTNSVGWAVITDEYKVPSKKFKVLGNTDRHSIKKNLIGALLFDSGETAEATRLKRTARRRYTRRKNRICYLQEIFSNEMAKVDDSFFHRLEESFLVEEDKKHERHPIFGNIVDEVAYHEKYPTIYHLRKKLVDSTDKADLRLIYLALAHMIKFRGHFLIEGDLNPDNSDVDKLFIQLVQTYNQLFEENPINASGVDAKAILSARLSKSRRLENLIAQLPGEKKNGLFGNLIALSLGLTPNFKSNFDLAEDAKLQLSKDTYDDDLDNLLAQIGDQYADLFLAAKNLSDAILLSDILRVNTEITKAPLSASMIKRYDEHHQDLTLLKALVRQQLPEKYKEIFFDQSKNGYAGYIDGGASQEEFYKFIKPILEKMDGTEELLVKLNREDLLRKQRTFDNGSIPHQIHLGELHAILRRQEDFYPFLKDNREKIEKILTFRIPYYVGPLARGNSRFAWMTRKSEETITPWNFEEVVDKGASAQSFIERMTNFDKNLPNEKVLPKHSLLYEYFTVYNELTKVKYVTEGMRKPAFLSGEQKKAIVDLLFKTNRKVTVKQLKEDYFKKIECFDSVEISGVEDRFNASLGTYHDLLKIIKDKDFLDNEENEDILEDIVLTLTLFEDREMIEERLKTYAHLFDDKVMKQLKRRRYTGWGRLSRKLINGIRDKQSGKTILDFLKSDGFANRNFMQLIHDDSLTFKEDIQKAQVSGQGDSLHEHIANLAGSPAIKKGILQTVKVVDELVKVMGRHKPENIVIEMARENQTTQKGQKNSRERMKRIEEGIKELGSQILKEHPVENTQLQNEKLYLYYLQNGRDMYVDQELDINRLSDYDVDHIVPQSFLKDDSIDNKVLTRSDKARGKSDNVPSEEVVKKMKNYWRQLLNAKLITQRKFDNLTKAERGGLSELDKAGFIKRQLVETRQITKHVAQILDSRMNTKYDENDKLIREVKVITLKSKLVSDFRKDFQFYKVREINNYHHAHDAYLNAVVGTALIKKYPKLESEFVYGDYKVYDVRKMIAKSEQEIGKATAKYFFYSNIMNFFKTEITLANGEIRKRPLIETNGETGEIVWDKGRDFATVRKVLSMPQVNIVKKTEVQTGGFSKESILPKRNSDKLIARKKDWDPKKYGGFDSPTVAYSVLVVAKVEKGKSKKLKSVKELLGITIMERSSFEKNPIDFLEAKGYKEVKKDLIIKLPKYSLFELENGRKRMLASAGELQKGNELALPSKYVNFLYLASHYEKLKGSPEDNEQKQLFVEQHKHYLDEIIEQISEFSKRVILADANLDKVLSAYNKHRDKPIREQAENIIHLFTLTNLGAPAAFKYFDTTIDRKRYTSTKEVLDATLIHQSITGLYETRIDLSQLGGDGGGSSGSSGSSGSSGSSGSSGGTLGDQGSRGSDPLPEPRVTLTVEGIPTEFLVNTGAEHSVLTKPMGKMGSKRTVVAGATGSKVYPWTTKRLLKIGQKQVTHSFLVIPECPAPLLGRDLLTKLKAQIQFSTEGPQVTWEDRPAMCLVLNLEEEYRLHEKPVPPSIDPSWLQLFPMVWAEKAGMGLANQVPPVVVELKSDASPVAVRQYPMSKEAREGIRPHIQRFLDLGILVPCQSPWNTPLLPVKKPGTNDYRPVQDLREVNKRVQDIHPTVPNPYNLLSSLPPSHTWYSVLDLKDAFFCLKLHPNSQPLFAFEWRDPEKGNTGQLTWTRLPQGFKNSPTLFNEALHRDLASFRALNPQVVMLQYVDDLLVAAPTYRDCKEGTRRLLQELSKLGYRVSAKKAQLCREEVTYLGYLLKGGKRWLTPARKATVMKIPTPTTPRQVREFLGKAGFCRLFIPGFASLAAPLYPLTRPKVPFTWTEAHQEAFGRIKEALLSAPALALPDLTKPFALYVDEKEGVARGVLTQTLGPWRRPVAYLSKKLDPVASGWPTCLKAIAAVALLLKDADKLTLGQNVLVIAPHNLESIVRQPPDRWMTNARMTHYQSLLLNERVSFAPPAILNPATLLPVESDDTPIHICSEILAEETGTRPDLRDQPLPGVPAWYTDGSSFIMDGRRQAGAAIVDNKRTVWASNLPEGTSAQKAELIALTQALRLAEGKSINIYTDSRYAFATAHVHGAIYKQRGWLTSAGKDIKNKEEILALLEAIHLPKRVAIIHCPGHQRGTDPVATGNRKADEAAKQAAQSTRILTETTKNAGKRTADGSEFEKRTADGSEFESPKKKAKVE

SEQ ID NO: 6347 - protein, 2103 aa, synthetic construct
MPAAKRVKLDGGDKKYSIGLDIGTNSVGWAVITDEYKVPSKKFKVLGNTDRHSIKKNLIGALLFDSGETAEATRLKRTARRRYTRRKNRICYLQEIFSNEMAKVDDSFFHRLEESFLVEEDKKHERHPIFGNIVDEVAYHEKYPTIYHLRKKLVDSTDKADLRLIYLALAHMIKFRGHFLIEGDLNPDNSDVDKLFIQLVQTYNQLFEENPINASGVDAKAILSARLSKSRRLENLIAQLPGEKKNGLFGNLIALSLGLTPNFKSNFDLAEDAKLQLSKDTYDDDLDNLLAQIGDQYADLFLAAKNLSDAILLSDILRVNTEITKAPLSASMIKRYDEHHQDLTLLKALVRQQLPEKYKEIFFDQSKNGYAGYIDGGASQEEFYKFIKPILEKMDGTEELLVKLNREDLLRKQRTFDNGSIPHQIHLGELHAILRRQEDFYPFLKDNREKIEKILTFRIPYYVGPLARGNSRFAWMTRKSEETITPWNFEEVVDKGASAQSFIERMTNFDKNLPNEKVLPKHSLLYEYFTVYNELTKVKYVTEGMRKPAFLSGEQKKAIVDLLFKTNRKVTVKQLKEDYFKKIECFDSVEISGVEDRFNASLGTYHDLLKIIKDKDFLDNEENEDILEDIVLTLTLFEDREMIEERLKTYAHLFDDKVMKQLKRRRYTGWGRLSRKLINGIRDKQSGKTILDFLKSDGFANRNFMQLIHDDSLTFKEDIQKAQVSGQGDSLHEHIANLAGSPAIKKGILQTVKVVDELVKVMGRHKPENIVIEMARENQTTQKGQKNSRERMKRIEEGIKELGSQILKEHPVENTQLQNEKLYLYYLQNGRDMYVDQELDINRLSDYDVDHIVPQSFLKDDSIDNKVLTRSDKARGKSDNVPSEEVVKKMKNYWRQLLNAKLITQRKFDNLTKAERGGLSELDKAGFIKRQLVETRQITKHVAQILDSRMNTKYDENDKLIREVKVITLKSKLVSDFRKDFQFYKVREINNYHHAHDAYLNAVVGTALIKKYPKLESEFVYGDYKVYDVRKMIAKSEQEIGKATAKYFFYSNIMNFFKTEITLANGEIRKRPLIETNGETGEIVWDKGRDFATVRKVLSMPQVNIVKKTEVQTGGFSKESILPKRNSDKLIARKKDWDPKKYGGFDSPTVAYSVLVVAKVEKGKSKKLKSVKELLGITIMERSSFEKNPIDFLEAKGYKEVKKDLIIKLPKYSLFELENGRKRMLASAGELQKGNELALPSKYVNFLYLASHYEKLKGSPEDNEQKQLFVEQHKHYLDEIIEQISEFSKRVILADANLDKVLSAYNKHRDKPIREQAENIIHLFTLTNLGAPAAFKYFDTTIDRKRYTSTKEVLDATLIHQSITGLYETRIDLSQLGGDGGGSSGSSGSSGSSGSSGSSGGTLNLEDEYRLYETSAEPEVSPGSTWLSDFPQAWAETGGMGLAVRQAPLIIPLKATSTPVSIKQYPMSQEAKLGIKPHIQRLLDQGILVPCQSPWNTPLLPVKKPGTNDYRPVQDLREVNKRVEDIHPTVPNPYNLLSGLPPSHRWYTVLDLKDAFFCLRLHPTSQPLFAFEWRDPGMGISGQLTWTRLPQGFKNSPTLFNEALHRDLADFRIQHPDLILLQYVDDILLAATSELDCQQGTRALLLTLGNLGYRASAKKAQLCQKQVKYLGYLLKEGQRWLTEARKETVMGQPTPKTPRQLREFLGTAGFCRLWIPGFAEMAAPLYPLTKPGTLFNWGPDQQKAYQEIKQALLTAPALGLPDLTKPFELFVDEKQGYAKGVLTQKLGPWRRPVAYLSKKLDPVAAGWPPCLRMVAAIAVLRKDAGKLTMGQPLVILAPHAVEALVKQPPDRWLSNARMTHYQAMLLDTDRVQFGPVVALNPATLLPLPEEGAPHDCLEILAETHGTRPDLTDQPIPDADHTWYTDGSSFLQEGQRKAGAAVTTETEVIWARALPAGTSAQRAELIALTQALKMAEGKRLNVYTDSRYAFATAHIHGEIYRRRGWLTSEGREIKNKSEILALLKALFLPKRLSIIHCLGHQKGDSAEARGNRLADQAAREAAIKTPPDTSTLLAGKRTADGSEFEKRTADGSEFESPKKKAKVE

SEQ ID NO: 6348 - protein, 2103 aa, synthetic construct
MPAAKRVKLDGGDKKYSIGLDIGTNSVGWAVITDEYKVPSKKFKVLGNTDRHSIKKNLIGALLFDSGETAEATRLKRTARRRYTRRKNRICYLQEIFSNEMAKVDDSFFHRLEESFLVEEDKKHERHPIFGNIVDEVAYHEKYPTIYHLRKKLVDSTDKADLRLIYLALAHMIKFRGHFLIEGDLNPDNSDVDKLFIQLVQTYNQLFEENPINASGVDAKAILSARLSKSRRLENLIAQLPGEKKNGLFGNLIALSLGLTPNFKSNFDLAEDAKLQLSKDTYDDDLDNLLAQIGDQYADLFLAAKNLSDAILLSDILRVNTEITKAPLSASMIKRYDEHHQDLTLLKALVRQQLPEKYKEIFFDQSKNGYAGYIDGGASQEEFYKFIKPILEKMDGTEELLVKLNREDLLRKQRTFDNGSIPHQIHLGELHAILRRQEDFYPFLKDNREKIEKILTFRIPYYVGPLARGNSRFAWMTRKSEETITPWNFEEVVDKGASAQSFIERMTNFDKNLPNEKVLPKHSLLYEYFTVYNELTKVKYVTEGMRKPAFLSGEQKKAIVDLLFKTNRKVTVKQLKEDYFKKIECFDSVEISGVEDRFNASLGTYHDLLKIIKDKDFLDNEENEDILEDIVLTLTLFEDREMIEERLKTYAHLFDDKVMKQLKRRRYTGWGRLSRKLINGIRDKQSGKTILDFLKSDGFANRNFMQLIHDDSLTFKEDIQKAQVSGQGDSLHEHIANLAGSPAIKKGILQTVKVVDELVKVMGRHKPENIVIEMARENQTTQKGQKNSRERMKRIEEGIKELGSQILKEHPVENTQLQNEKLYLYYLQNGRDMYVDQELDINRLSDYDVDHIVPQSFLKDDSIDNKVLTRSDKARGKSDNVPSEEVVKKMKNYWRQLLNAKLITQRKFDNLTKAERGGLSELDKAGFIKRQLVETRQITKHVAQILDSRMNTKYDENDKLIREVKVITLKSKLVSDFRKDFQFYKVREINNYHHAHDAYLNAVVGTALIKKYPKLESEFVYGDYKVYDVRKMIAKSEQEIGKATAKYFFYSNIMNFFKTEITLANGEIRKRPLIETNGETGEIVWDKGRDFATVRKVLSMPQVNIVKKTEVQTGGFSKESILPKRNSDKLIARKKDWDPKKYGGFDSPTVAYSVLVVAKVEKGKSKKLKSVKELLGITIMERSSFEKNPIDFLEAKGYKEVKKDLIIKLPKYSLFELENGRKRMLASAGELQKGNELALPSKYVNFLYLASHYEKLKGSPEDNEQKQLFVEQHKHYLDEIIEQISEFSKRVILADANLDKVLSAYNKHRDKPIREQAENIIHLFTLTNLGAPAAFKYFDTTIDRKRYTSTKEVLDATLIHQSITGLYETRIDLSQLGGDGGGSSGSSGSSGSSGSSGSSGGTLNLEDEYRLYETSAEPEVSPGSTWLSDFPQAWAETGGMGLAVRQAPLIIPLKATSTPVSIKQYPMSQEAKLGIKPHIQRLLDQGILVPCQSPWNTPLLPVKKPGTNDYRPVQDLREVNKRVEDIHPTVPNPYNLLSGLPPSHRWYTVLDLKDAFFCLRLHPTSQPLFAFEWRDPGMGISGQLTWTRLPQGFKNSPTLFNEALHRDLADFRIQHPDLILLQYVDDILLAATSELDCQQGTRALLLTLGNLGYRASAKKAQLCQKQVKYLGYLLKEGQRWLTEARKETVMGQPTPKTPRQLREFLGKAGFCRLFIPGFAEMAAPLYPLTKPGTLFNWGPDQQKAYQEIKQALLTAPALGLPDLTKPFELFVDEKQGYAKGVLTQKLGPWRRPVAYLSKKLDPVAAGWPPCLRMVAAIAVLRKDAGKLTMGQPLVILAPHAVEALVKQPPDRWLSNARMTHYQAMLLDTDRVQFGPVVALNPATLLPLPEEGAPHDCLEILAETHGTRPDLTDQPIPDADHTWYTDGSSFLQEGQRKAGAAVTTETEVIWARALPAGTSAQRAELIALTQALKMAEGKRLNVYTDSRYAFATAHIHGEIYRRRGWLTSEGREIKNKSEILALLKALFLPKRLSIIHCLGHQKGDSAEARGNRLADQAAREAAIKTPPDTSTLLAGKRTADGSEFEKRTADGSEFESPKKKAKVE

SEQ ID NO: 6349 - protein, 2103 aa, synthetic construct
MPAAKRVKLDGGDKKYSIGLDIGTNSVGWAVITDEYKVPSKKFKVLGNTDRHSIKKNLIGALLFDSGETAEATRLKRTARRRYTRRKNRICYLQEIFSNEMAKVDDSFFHRLEESFLVEEDKKHERHPIFGNIVDEVAYHEKYPTIYHLRKKLVDSTDKADLRLIYLALAHMIKFRGHFLIEGDLNPDNSDVDKLFIQLVQTYNQLFEENPINASGVDAKAILSARLSKSRRLENLIAQLPGEKKNGLFGNLIALSLGLTPNFKSNFDLAEDAKLQLSKDTYDDDLDNLLAQIGDQYADLFLAAKNLSDAILLSDILRVNTEITKAPLSASMIKRYDEHHQDLTLLKALVRQQLPEKYKEIFFDQSKNGYAGYIDGGASQEEFYKFIKPILEKMDGTEELLVKLNREDLLRKQRTFDNGSIPHQIHLGELHAILRRQEDFYPFLKDNREKIEKILTFRIPYYVGPLARGNSRFAWMTRKSEETITPWNFEEVVDKGASAQSFIERMTNFDKNLPNEKVLPKHSLLYEYFTVYNELTKVKYVTEGMRKPAFLSGEQKKAIVDLLFKTNRKVTVKQLKEDYFKKIECFDSVEISGVEDRFNASLGTYHDLLKIIKDKDFLDNEENEDILEDIVLTLTLFEDREMIEERLKTYAHLFDDKVMKQLKRRRYTGWGRLSRKLINGIRDKQSGKTILDFLKSDGFANRNFMQLIHDDSLTFKEDIQKAQVSGQGDSLHEHIANLAGSPAIKKGILQTVKVVDELVKVMGRHKPENIVIEMARENQTTQKGQKNSRERMKRIEEGIKELGSQILKEHPVENTQLQNEKLYLYYLQNGRDMYVDQELDINRLSDYDVDHIVPQSFLKDDSIDNKVLTRSDKARGKSDNVPSEEVVKKMKNYWRQLLNAKLITQRKFDNLTKAERGGLSELDKAGFIKRQLVETRQITKHVAQILDSRMNTKYDENDKLIREVKVITLKSKLVSDFRKDFQFYKVREINNYHHAHDAYLNAVVGTALIKKYPKLESEFVYGDYKVYDVRKMIAKSEQEIGKATAKYFFYSNIMNFFKTEITLANGEIRKRPLIETNGETGEIVWDKGRDFATVRKVLSMPQVNIVKKTEVQTGGFSKESILPKRNSDKLIARKKDWDPKKYGGFDSPTVAYSVLVVAKVEKGKSKKLKSVKELLGITIMERSSFEKNPIDFLEAKGYKEVKKDLIIKLPKYSLFELENGRKRMLASAGELQKGNELALPSKYVNFLYLASHYEKLKGSPEDNEQKQLFVEQHKHYLDEIIEQISEFSKRVILADANLDKVLSAYNKHRDKPIREQAENIIHLFTLTNLGAPAAFKYFDTTIDRKRYTSTKEVLDATLIHQSITGLYETRIDLSQLGGDGGGSSGSSGSSGSSGSSGSSGGTLNIEDEYRLHETSKEPDVSLGSTWLSDFPQAWAETGGMGLAVRQAPLIIPLKATSTPVSIKQYPMSQEARLGIKPHIQRLLDQGILVPCQSPWNTPLLPVKKPGTNDYRPVQDLREVNKRVEDIHPTVPNPYNLLSGLPPSHQWYTVLDLKDAFFCLRLHPTSQPLFAFEWRDPEMGISGQLTWTRLPQGFKNSPTLFNEALHRDLAGFRIQHPDLILLQYVDDLLLAATSELDCQQGTRALLQTLGDLGYRASAKKAQICQKQVKYLGYLLKEGQRWLTEARKETVMGQPIPKTPRQLREFLGTAGFCRLWIPGFAEMAAPLYPLTKPGTLFNWGPDQQKAFQEIKQALLTAPALGLPDLTKPFELFVDEKQGYAKGVLTQKLGPWRRPVAYLSKKLDPVAAGWPPCLRMVAAIAVLTKDAGKLTMGQPLVILAPHAVEALVKQPPDRWLSNARMTHYQALLLDTDRVQFGPVVALNPATLLPLPEEGLQHDCLDILAEAHGTRSDLMDQPLPDADHTWYTDGSSFLQEGQRKAGAAVTTETEVIWARALPAGTSAQRAELIALTQALKMAEGKKLNVYTDSRYAFATAHIHGEIYRRRGWLTSEGKEIKNKDEILALLKALFLPKRLSIIHCPGHQKGNSAEARGNRMADQAAREVATRETPETSTLLAGKRTADGSEFEKRTADGSEFESPKKKAKVE

SEQ ID NO: 6350 - protein, 2103 aa, synthetic construct
MPAAKRVKLDGGDKKYSIGLDIGTNSVGWAVITDEYKVPSKKFKVLGNTDRHSIKKNLIGALLFDSGETAEATRLKRTARRRYTRRKNRICYLQEIFSNEMAKVDDSFFHRLEESFLVEEDKKHERHPIFGNIVDEVAYHEKYPTIYHLRKKLVDSTDKADLRLIYLALAHMIKFRGHFLIEGDLNPDNSDVDKLFIQLVQTYNQLFEENPINASGVDAKAILSARLSKSRRLENLIAQLPGEKKNGLFGNLIALSLGLTPNFKSNFDLAEDAKLQLSKDTYDDDLDNLLAQIGDQYADLFLAAKNLSDAILLSDILRVNTEITKAPLSASMIKRYDEHHQDLTLLKALVRQQLPEKYKEIFFDQSKNGYAGYIDGGASQEEFYKFIKPILEKMDGTEELLVKLNREDLLRKQRTFDNGSIPHQIHLGELHAILRRQEDFYPFLKDNREKIEKILTFRIPYYVGPLARGNSRFAWMTRKSEETITPWNFEEVVDKGASAQSFIERMTNFDKNLPNEKVLPKHSLLYEYFTVYNELTKVKYVTEGMRKPAFLSGEQKKAIVDLLFKTNRKVTVKQLKEDYFKKIECFDSVEISGVEDRFNASLGTYHDLLKIIKDKDFLDNEENEDILEDIVLTLTLFEDREMIEERLKTYAHLFDDKVMKQLKRRRYTGWGRLSRKLINGIRDKQSGKTILDFLKSDGFANRNFMQLIHDDSLTFKEDIQKAQVSGQGDSLHEHIANLAGSPAIKKGILQTVKVVDELVKVMGRHKPENIVIEMARENQTTQKGQKNSRERMKRIEEGIKELGSQILKEHPVENTQLQNEKLYLYYLQNGRDMYVDQELDINRLSDYDVDHIVPQSFLKDDSIDNKVLTRSDKARGKSDNVPSEEVVKKMKNYWRQLLNAKLITQRKFDNLTKAERGGLSELDKAGFIKRQLVETRQITKHVAQILDSRMNTKYDENDKLIREVKVITLKSKLVSDFRKDFQFYKVREINNYHHAHDAYLNAVVGTALIKKYPKLESEFVYGDYKVYDVRKMIAKSEQEIGKATAKYFFYSNIMNFFKTEITLANGEIRKRPLIETNGETGEIVWDKGRDFATVRKVLSMPQVNIVKKTEVQTGGFSKESILPKRNSDKLIARKKDWDPKKYGGFDSPTVAYSVLVVAKVEKGKSKKLKSVKELLGITIMERSSFEKNPIDFLEAKGYKEVKKDLIIKLPKYSLFELENGRKRMLASAGELQKGNELALPSKYVNFLYLASHYEKLKGSPEDNEQKQLFVEQHKHYLDEIIEQISEFSKRVILADANLDKVLSAYNKHRDKPIREQAENIIHLFTLTNLGAPAAFKYFDTTIDRKRYTSTKEVLDATLIHQSITGLYETRIDLSQLGGDGGGSSGSSGSSGSSGSSGSSGGTLNIEDEYRLHETSKGPDVPLGSTWLSDFPQAWAETGGMGLAFRQAPLIISLKATSTPVSIKQYPMSQEARLGIKPHIQRLLDQGILVPCQSPWNTPLLPVKKPGTNDYRPVQDLREVNKRVEDIHPTVPNPYNLLSGLPPSHQWYTVLDLKDAFFCLRLHPTSQSLFAFEWKDPEMGISGQLTWTRLPQGFKNSPTLFDEALHRDLADFRIQHPDLILLQYVDDLLLAATSELDCQQGTRALLQTLGDLGYRASAKKAQICQKQVKYLGYLLKEGQRWLTEARKETVMGQPTPKTPRQLREFLGTAGLCRLWIPGFAEMAAPLYPLTKTGTLFKWGPDQQKAYQEIKQALLTAPALGLPDLTKPFELFVDEKQGYAKGVLTQKLGPWRRPVAYLSKKLDPVAAGWPPCLRMVAAIAVLTKDVGKLTMGQPLVILAPHAVEALVKQPPDRWLSNARMTHYQALLLDTDRVQFGPIVALNPATLLPLPEEGLQHDCLDILAEAHGTRPDLTDQPLPDADHTWYTDGSSFLQEGQRRAGAAVTTETEVIWAKALPAGTSAQRAELIALTQALKMAAGKKLNVYTDSRYAFATAHIHGEIYRRRGLLTSEGKEIKNKDEILALLKALFLPKRLSIIHCPGHQKGNHAEARGNRMADQAAREVATRETPETSTLLAGKRTADGSEFEKRTADGSEFESPKKKAKVE

SEQ ID NO: 6351 - protein, 2103 aa, synthetic construct
MPAAKRVKLDGGDKKYSIGLDIGTNSVGWAVITDEYKVPSKKFKVLGNTDRHSIKKNLIGALLFDSGETAEATRLKRTARRRYTRRKNRICYLQEIFSNEMAKVDDSFFHRLEESFLVEEDKKHERHPIFGNIVDEVAYHEKYPTIYHLRKKLVDSTDKADLRLIYLALAHMIKFRGHFLIEGDLNPDNSDVDKLFIQLVQTYNQLFEENPINASGVDAKAILSARLSKSRRLENLIAQLPGEKKNGLFGNLIALSLGLTPNFKSNFDLAEDAKLQLSKDTYDDDLDNLLAQIGDQYADLFLAAKNLSDAILLSDILRVNTEITKAPLSASMIKRYDEHHQDLTLLKALVRQQLPEKYKEIFFDQSKNGYAGYIDGGASQEEFYKFIKPILEKMDGTEELLVKLNREDLLRKQRTFDNGSIPHQIHLGELHAILRRQEDFYPFLKDNREKIEKILTFRIPYYVGPLARGNSRFAWMTRKSEETITPWNFEEVVDKGASAQSFIERMTNFDKNLPNEKVLPKHSLLYEYFTVYNELTKVKYVTEGMRKPAFLSGEQKKAIVDLLFKTNRKVTVKQLKEDYFKKIECFDSVEISGVEDRFNASLGTYHDLLKIIKDKDFLDNEENEDILEDIVLTLTLFEDREMIEERLKTYAHLFDDKVMKQLKRRRYTGWGRLSRKLINGIRDKQSGKTILDFLKSDGFANRNFMQLIHDDSLTFKEDIQKAQVSGQGDSLHEHIANLAGSPAIKKGILQTVKVVDELVKVMGRHKPENIVIEMARENQTTQKGQKNSRERMKRIEEGIKELGSQILKEHPVENTQLQNEKLYLYYLQNGRDMYVDQELDINRLSDYDVDHIVPQSFLKDDSIDNKVLTRSDKARGKSDNVPSEEVVKKMKNYWRQLLNAKLITQRKFDNLTKAERGGLSELDKAGFIKRQLVETRQITKHVAQILDSRMNTKYDENDKLIREVKVITLKSKLVSDFRKDFQFYKVREINNYHHAHDAYLNAVVGTALIKKYPKLESEFVYGDYKVYDVRKMIAKSEQEIGKATAKYFFYSNIMNFFKTEITLANGEIRKRPLIETNGETGEIVWDKGRDFATVRKVLSMPQVNIVKKTEVQTGGFSKESILPKRNSDKLIARKKDWDPKKYGGFDSPTVAYSVLVVAKVEKGKSKKLKSVKELLGITIMERSSFEKNPIDFLEAKGYKEVKKDLIIKLPKYSLFELENGRKRMLASAGELQKGNELALPSKYVNFLYLASHYEKLKGSPEDNEQKQLFVEQHKHYLDEIIEQISEFSKRVILADANLDKVLSAYNKHRDKPIREQAENIIHLFTLTNLGAPAAFKYFDTTIDRKRYTSTKEVLDATLIHQSITGLYETRIDLSQLGGDGGGSSGSSGSSGSSGSSGSSGGTLNIEDEYRLHETSKGPDVPLGSTWLSDFPQAWAETGGMGLAVRQAPLIIPLKATSTPVSIKQYPMSQEARLGIKPHIQRLLDQGILVPCQSPWNTPLLPVKKPGTNDYRPVQDLREVNKRVEDIHPTVPNPYNLLSGLPPSHQWYTVLDLKDAFFCLRLHPTSQSLFAFEWRDPEMGISGQLTWTRLPQGFKNSPTLFNEALHRDLADFRIQHPDLILLQYVDDLLLAATSELDCQQGTRALLQTLGDLGYRASAKKAQICQKQVKYLGYLLKEGQRWLTEARKETVMGQPTPKTPRQLREFLGTAGFCRLWIPGFAEMAAPLYPLTKPGTLFEWGPDQQKAYQEIKQALLTAPALGLPDLTKPFELFVDEKQGYAKGVLTQKLGPWRRPVAYLSKKLDPVAAGWPPCLRMVAAIAVLTKDAGKLTMGQPLVILAPHAVEALVKQPPDRWLSNARMTHYQALLLDTDRVQFGPIVALNPATLLPLPEEGLQHDCLDILAEAHGTRPDLTDQPLPDADHTWYTDGSSFLQEGQRKAGAAVTTETEVVWAKALPAGTSAQRAELIALTQALKMAEGKKLNVYTDSRYAFATAHIHGEIYRRRGWLTSEGKEIKNKDEILALLKALFLPKRLSIIHCPGHQKGNRAEARGNRMADQAAREVATRETPETSTLLAGKRTADGSEFEKRTADGSEFESPKKKAKVE

SEQ ID NO: 6352 - protein, 2103 aa, synthetic construct
MPAAKRVKLDGGDKKYSIGLDIGTNSVGWAVITDEYKVPSKKFKVLGNTDRHSIKKNLIGALLFDSGETAEATRLKRTARRRYTRRKNRICYLQEIFSNEMAKVDDSFFHRLEESFLVEEDKKHERHPIFGNIVDEVAYHEKYPTIYHLRKKLVDSTDKADLRLIYLALAHMIKFRGHFLIEGDLNPDNSDVDKLFIQLVQTYNQLFEENPINASGVDAKAILSARLSKSRRLENLIAQLPGEKKNGLFGNLIALSLGLTPNFKSNFDLAEDAKLQLSKDTYDDDLDNLLAQIGDQYADLFLAAKNLSDAILLSDILRVNTEITKAPLSASMIKRYDEHHQDLTLLKALVRQQLPEKYKEIFFDQSKNGYAGYIDGGASQEEFYKFIKPILEKMDGTEELLVKLNREDLLRKQRTFDNGSIPHQIHLGELHAILRRQEDFYPFLKDNREKIEKILTFRIPYYVGPLARGNSRFAWMTRKSEETITPWNFEEVVDKGASAQSFIERMTNFDKNLPNEKVLPKHSLLYEYFTVYNELTKVKYVTEGMRKPAFLSGEQKKAIVDLLFKTNRKVTVKQLKEDYFKKIECFDSVEISGVEDRFNASLGTYHDLLKIIKDKDFLDNEENEDILEDIVLTLTLFEDREMIEERLKTYAHLFDDKVMKQLKRRRYTGWGRLSRKLINGIRDKQSGKTILDFLKSDGFANRNFMQLIHDDSLTFKEDIQKAQVSGQGDSLHEHIANLAGSPAIKKGILQTVKVVDELVKVMGRHKPENIVIEMARENQTTQKGQKNSRERMKRIEEGIKELGSQILKEHPVENTQLQNEKLYLYYLQNGRDMYVDQELDINRLSDYDVDHIVPQSFLKDDSIDNKVLTRSDKARGKSDNVPSEEVVKKMKNYWRQLLNAKLITQRKFDNLTKAERGGLSELDKAGFIKRQLVETRQITKHVAQILDSRMNTKYDENDKLIREVKVITLKSKLVSDFRKDFQFYKVREINNYHHAHDAYLNAVVGTALIKKYPKLESEFVYGDYKVYDVRKMIAKSEQEIGKATAKYFFYSNIMNFFKTEITLANGEIRKRPLIETNGETGEIVWDKGRDFATVRKVLSMPQVNIVKKTEVQTGGFSKESILPKRNSDKLIARKKDWDPKKYGGFDSPTVAYSVLVVAKVEKGKSKKLKSVKELLGITIMERSSFEKNPIDFLEAKGYKEVKKDLIIKLPKYSLFELENGRKRMLASAGELQKGNELALPSKYVNFLYLASHYEKLKGSPEDNEQKQLFVEQHKHYLDEIIEQISEFSKRVILADANLDKVLSAYNKHRDKPIREQAENIIHLFTLTNLGAPAAFKYFDTTIDRKRYTSTKEVLDATLIHQSITGLYETRIDLSQLGGDGGGSSGSSGSSGSSGSSGSSGGTLNIEDEHRLHETSKEPDVSLGSTWLSDFPQAWAETGGMGLAVRQAPLIIPLKATSTPVSIKQYPMSQEARLGIKPHIQRLLDQGILVPCQSPWNTPLLPVKKPGTNDYRPVQDLREVNKRVEDIHPTVPNPYNLLSGLPPSHQWYTVLDLKDAFFCLRLHPTSQPLFAFEWRDPEMGISGQLTWTRLPQGFKNSPTLFDEALHRDLADFRIQHPDLILLQYVDDLLLAATSELDCQQGTRALLQTLGNLGYRASAKKAQICQKQVKYLGYLLKEGQRWLTEARKETVMGQPTPKTPRQLREFLGTAGFCRLWIPGFAEMAAPLYPLTKTGTLFNWGPDQQKAYQEIKQALLTAPALGLPDLTKPFELFVDEKQGYAKGVLTQKLGPWRRPVAYLSKKLDPVAAGWPPCLRMVAAIAVLTKDAGKLTMGQPLVILAPHAVEALVKQPPDRWLSNARMTHYQALLLDTDRVQFGPVVALNPATLLPLPEEGLQHNCLDILAEAHGTRPDLTDQPLPDADHTWYTDGSSLLQEGQRKAGAAVTTETEVIWAKALPAGTSAQRAELIALTQALKMAEGKKLNVYTDSRYAFATAHIHGEIYRRRGLLTSEGKEIKNKDEILALLKALFLPKRLSIIHCPGHQKGHSAEARGNRMADQAARKAAITETPDTSTLLAGKRTADGSEFEKRTADGSEFESPKKKAKVE

SEQ ID NO: 6353 - protein, 2103 aa, synthetic construct
MPAAKRVKLDGGDKKYSIGLDIGTNSVGWAVITDEYKVPSKKFKVLGNTDRHSIKKNLIGALLFDSGETAEATRLKRTARRRYTRRKNRICYLQEIFSNEMAKVDDSFFHRLEESFLVEEDKKHERHPIFGNIVDEVAYHEKYPTIYHLRKKLVDSTDKADLRLIYLALAHMIKFRGHFLIEGDLNPDNSDVDKLFIQLVQTYNQLFEENPINASGVDAKAILSARLSKSRRLENLIAQLPGEKKNGLFGNLIALSLGLTPNFKSNFDLAEDAKLQLSKDTYDDDLDNLLAQIGDQYADLFLAAKNLSDAILLSDILRVNTEITKAPLSASMIKRYDEHHQDLTLLKALVRQQLPEKYKEIFFDQSKNGYAGYIDGGASQEEFYKFIKPILEKMDGTEELLVKLNREDLLRKQRTFDNGSIPHQIHLGELHAILRRQEDFYPFLKDNREKIEKILTFRIPYYVGPLARGNSRFAWMTRKSEETITPWNFEEVVDKGASAQSFIERMTNFDKNLPNEKVLPKHSLLYEYFTVYNELTKVKYVTEGMRKPAFLSGEQKKAIVDLLFKTNRKVTVKQLKEDYFKKIECFDSVEISGVEDRFNASLGTYHDLLKIIKDKDFLDNEENEDILEDIVLTLTLFEDREMIEERLKTYAHLFDDKVMKQLKRRRYTGWGRLSRKLINGIRDKQSGKTILDFLKSDGFANRNFMQLIHDDSLTFKEDIQKAQVSGQGDSLHEHIANLAGSPAIKKGILQTVKVVDELVKVMGRHKPENIVIEMARENQTTQKGQKNSRERMKRIEEGIKELGSQILKEHPVENTQLQNEKLYLYYLQNGRDMYVDQELDINRLSDYDVDHIVPQSFLKDDSIDNKVLTRSDKARGKSDNVPSEEVVKKMKNYWRQLLNAKLITQRKFDNLTKAERGGLSELDKAGFIKRQLVETRQITKHVAQILDSRMNTKYDENDKLIREVKVITLKSKLVSDFRKDFQFYKVREINNYHHAHDAYLNAVVGTALIKKYPKLESEFVYGDYKVYDVRKMIAKSEQEIGKATAKYFFYSNIMNFFKTEITLANGEIRKRPLIETNGETGEIVWDKGRDFATVRKVLSMPQVNIVKKTEVQTGGFSKESILPKRNSDKLIARKKDWDPKKYGGFDSPTVAYSVLVVAKVEKGKSKKLKSVKELLGITIMERSSFEKNPIDFLEAKGYKEVKKDLIIKLPKYSLFELENGRKRMLASAGELQKGNELALPSKYVNFLYLASHYEKLKGSPEDNEQKQLFVEQHKHYLDEIIEQISEFSKRVILADANLDKVLSAYNKHRDKPIREQAENIIHLFTLTNLGAPAAFKYFDTTIDRKRYTSTKEVLDATLIHQSITGLYETRIDLSQLGGDGGGSSGSSGSSGSSGSSGSSGGTLNIEDEYRLHEISTEPDVSPGSTWLSDFPQAWAETGGMGLAVRQAPLIIPLKATSTPVSIKQYPMSQEAKLGIKPHIQRLLDQGILVPCQSPWNTPLLPVKKPGTNDYRPVQGLREVNKRVEDIHPTVPNPYNLLSGLPTSHRWYTVLDLKDAFFCLRLHPTSQPLFASEWRDPGMGISGQLTWTRLPQGFKNSPTLFDEALHRGLADFRIQHPDLILLQYVDDLLLAATSELDCQQGTRALLKTLGNLGYRASAKKAQICQKQVKYLGYLLREGQRWLTEARKETVMGQPTPKTPRQLREFLGTAGFCRLWIPRFAEMAAPLYPLTKTGTLFNWGPDQQKAYHEIKQALLTAPALGLPDLTKPFELFVDEKQGYAKGVLTQKLGPWRRPVAYLSKKLDPVAAGWPPCLRMVAAIAVLTKDAGKLTMGQPLVILAPHAVEALVKQPPDRWLSNARMTHYQAMLLDTDRVQFGPVVALNPATLLPLPEEGAPHDCLEILAETHGTEPDLTDQPIPDADHTWYTDGSSFLQEGQRKAGAAVTTETEVIWARALPAGTSAQRAELIALTQALKMAEGKRLNVYTDSRYAFATAHIHGEIYKRRGLLTSEGREIKNKSEILALLKALFLPKRLSIIHCLGHQKGDSAEARGNRLADQAAREAAIKTPPDTSTLLAGKRTADGSEFEKRTADGSEFESPKKKAKVE

SEQ ID NO: 6354 - protein, 2097 aa, synthetic construct
MPAAKRVKLDGGDKKYSIGLDIGTNSVGWAVITDEYKVPSKKFKVLGNTDRHSIKKNLIGALLFDSGETAEATRLKRTARRRYTRRKNRICYLQEIFSNEMAKVDDSFFHRLEESFLVEEDKKHERHPIFGNIVDEVAYHEKYPTIYHLRKKLVDSTDKADLRLIYLALAHMIKFRGHFLIEGDLNPDNSDVDKLFIQLVQTYNQLFEENPINASGVDAKAILSARLSKSRRLENLIAQLPGEKKNGLFGNLIALSLGLTPNFKSNFDLAEDAKLQLSKDTYDDDLDNLLAQIGDQYADLFLAAKNLSDAILLSDILRVNTEITKAPLSASMIKRYDEHHQDLTLLKALVRQQLPEKYKEIFFDQSKNGYAGYIDGGASQEEFYKFIKPILEKMDGTEELLVKLNREDLLRKQRTFDNGSIPHQIHLGELHAILRRQEDFYPFLKDNREKIEKILTFRIPYYVGPLARGNSRFAWMTRKSEETITPWNFEEVVDKGASAQSFIERMTNFDKNLPNEKVLPKHSLLYEYFTVYNELTKVKYVTEGMRKPAFLSGEQKKAIVDLLFKTNRKVTVKQLKEDYFKKIECFDSVEISGVEDRFNASLGTYHDLLKIIKDKDFLDNEENEDILEDIVLTLTLFEDREMIEERLKTYAHLFDDKVMKQLKRRRYTGWGRLSRKLINGIRDKQSGKTILDFLKSDGFANRNFMQLIHDDSLTFKEDIQKAQVSGQGDSLHEHIANLAGSPAIKKGILQTVKVVDELVKVMGRHKPENIVIEMARENQTTQKGQKNSRERMKRIEEGIKELGSQILKEHPVENTQLQNEKLYLYYLQNGRDMYVDQELDINRLSDYDVDHIVPQSFLKDDSIDNKVLTRSDKARGKSDNVPSEEVVKKMKNYWRQLLNAKLITQRKFDNLTKAERGGLSELDKAGFIKRQLVETRQITKHVAQILDSRMNTKYDENDKLIREVKVITLKSKLVSDFRKDFQFYKVREINNYHHAHDAYLNAVVGTALIKKYPKLESEFVYGDYKVYDVRKMIAKSEQEIGKATAKYFFYSNIMNFFKTEITLANGEIRKRPLIETNGETGEIVWDKGRDFATVRKVLSMPQVNIVKKTEVQTGGFSKESILPKRNSDKLIARKKDWDPKKYGGFDSPTVAYSVLVVAKVEKGKSKKLKSVKELLGITIMERSSFEKNPIDFLEAKGYKEVKKDLIIKLPKYSLFELENGRKRMLASAGELQKGNELALPSKYVNFLYLASHYEKLKGSPEDNEQKQLFVEQHKHYLDEIIEQISEFSKRVILADANLDKVLSAYNKHRDKPIREQAENIIHLFTLTNLGAPAAFKYFDTTIDRKRYTSTKEVLDATLIHQSITGLYETRIDLSQLGGDGGGSSGSSGSSGSSGSSGSSGGTLQLDDEYRLYSPLVKPDQNIQFWLEQFPQAWAETAGMGLAKQVPPQVIQLKASATPVSVRQYPLSKEAQEGIRPHVQRLIQQGILVPVQSPWNTPLLPVRKPGTNDYRPVQDLREVNKRVQDIHPTVPNPYNLLCALPPQRSWYTVLDLKDAFFCLRLHPTSQPLFAFEWRDPGTGRTGQLTWTRLPQGFKNSPTIFDEALHRDLANFRIQHPQVTLLQYVDDLLLAGATKQDCLEGTKALLLELSDLGYRASAKKAQICRREVTYLGYSLRDGQRWLTEARKKTVVQIPAPTTAKQVREFLGTAGFCRLWIPGFATLAAPLYPLTKEKGEFSWAPEHQKAFDAIKKALLSAPALALPDVTKPFTLYVDERKGVARGVLTQTLGPWRRPVAYLSKKLDPVASGWPVCLKAIAAVAILVKDADKLTLGQNITVIAPHALENIVRQPPDRWMTNARMTHYQSLLLTERVTFAPPAALNPATLLPEETDEPVTHDCHQLLIEETGVRKDLTDIPLTGEVLTWFTDGSSYVVEGKRMAGAAVVDGTRTIWASSLPEGTSAQKAELMALTQALRLAEGKSINIYTDSRYAFATAHVHGAIYKQRGLLTSAGREIKNKEEILSLLEALHLPKRLAIIHCPGHQKAKDPISRGNQMADRVAKQAAQGVNLLAGKRTADGSEFEKRTADGSEFESPKKKAKVE

SEQ ID NO: 6355 - protein, 2183 aa, synthetic construct
MPAAKRVKLDGGDKKYSIGLDIGTNSVGWAVITDEYKVPSKKFKVLGNTDRHSIKKNLIGALLFDSGETAEATRLKRTARRRYTRRKNRICYLQEIFSNEMAKVDDSFFHRLEESFLVEEDKKHERHPIFGNIVDEVAYHEKYPTIYHLRKKLVDSTDKADLRLIYLALAHMIKFRGHFLIEGDLNPDNSDVDKLFIQLVQTYNQLFEENPINASGVDAKAILSARLSKSRRLENLIAQLPGEKKNGLFGNLIALSLGLTPNFKSNFDLAEDAKLQLSKDTYDDDLDNLLAQIGDQYADLFLAAKNLSDAILLSDILRVNTEITKAPLSASMIKRYDEHHQDLTLLKALVRQQLPEKYKEIFFDQSKNGYAGYIDGGASQEEFYKFIKPILEKMDGTEELLVKLNREDLLRKQRTFDNGSIPHQIHLGELHAILRRQEDFYPFLKDNREKIEKILTFRIPYYVGPLARGNSRFAWMTRKSEETITPWNFEEVVDKGASAQSFIERMTNFDKNLPNEKVLPKHSLLYEYFTVYNELTKVKYVTEGMRKPAFLSGEQKKAIVDLLFKTNRKVTVKQLKEDYFKKIECFDSVEISGVEDRFNASLGTYHDLLKIIKDKDFLDNEENEDILEDIVLTLTLFEDREMIEERLKTYAHLFDDKVMKQLKRRRYTGWGRLSRKLINGIRDKQSGKTILDFLKSDGFANRNFMQLIHDDSLTFKEDIQKAQVSGQGDSLHEHIANLAGSPAIKKGILQTVKVVDELVKVMGRHKPENIVIEMARENQTTQKGQKNSRERMKRIEEGIKELGSQILKEHPVENTQLQNEKLYLYYLQNGRDMYVDQELDINRLSDYDVDHIVPQSFLKDDSIDNKVLTRSDKARGKSDNVPSEEVVKKMKNYWRQLLNAKLITQRKFDNLTKAERGGLSELDKAGFIKRQLVETRQITKHVAQILDSRMNTKYDENDKLIREVKVITLKSKLVSDFRKDFQFYKVREINNYHHAHDAYLNAVVGTALIKKYPKLESEFVYGDYKVYDVRKMIAKSEQEIGKATAKYFFYSNIMNFFKTEITLANGEIRKRPLIETNGETGEIVWDKGRDFATVRKVLSMPQVNIVKKTEVQTGGFSKESILPKRNSDKLIARKKDWDPKKYGGFDSPTVAYSVLVVAKVEKGKSKKLKSVKELLGITIMERSSFEKNPIDFLEAKGYKEVKKDLIIKLPKYSLFELENGRKRMLASAGELQKGNELALPSKYVNFLYLASHYEKLKGSPEDNEQKQLFVEQHKHYLDEIIEQISEFSKRVILADANLDKVLSAYNKHRDKPIREQAENIIHLFTLTNLGAPAAFKYFDTTIDRKRYTSTKEVLDATLIHQSITGLYETRIDLSQLGGDGGGSSGSSGSSGSSGSSGSSGGMDPLQLLQPLEAEIKGTKLKAHWNSGATITCVPEAFLEDERPIQTMLIKTIHGEKQQDVYYLTFKVQGRKVEAEVLASPYDYILLNPSDVPWLMKKPLQLTVLVPLHEYQERLLQQTALPKEQKELLQKLFLKYDALWQHWENQVGHRRIKPHNIATGTLAPRPQKQYPINPKAKPSIQIVIDDLLKQGVLIQQNSTMNTPVYPVPKPDGKWRMVLDYREVNKTIPLIAAQNQHSAGILSSIYRGKYKTTLDLTNGFWAHPITPESYWLTAFTWQGKQYCWTRLPQGFLNSPALFNADVVDLLKEIPNVQAYVDDIYISHDDPQEHLEQLEKIFSILLNAGYVVSLKKSEIAQREVEFLGFNITKEGRGLTDTFKQKLLNITPPKDLKQLQSILGLLNFARNFIPNYSELVKPLYTIVAPANGKFISWTEDNSNQLQHIISVLNQADNLEERNPETRLIIKVNSSPSAGYIRYYNEGSKRPIMYVNYIFSKAEAKFTQTEKLLTTMHKGLIKAMDLAMGQEILVYSPIVSMTKIQRTPLPERKALPVRWITWMTYLEDPRIQFHYDKSLPELQQIPNVTEDVIAKTKHPSEFAMVFYTDGSAIKHPDVNKSHSAGMGIAQVQFIPEYKIVHQWSIPLGDHTAQLAEIAAVEFACKKALKISGPVLIVTDSFYVAESANKELPYWKSNGFLNNKKKPLRHVSKWKSIAECLQLKPDIIIMHEKGHQQPMTTLHTEGNNLADKLATQGSYVVHAGKRTADGSEFEKRTADGSEFESPKKKAKVE

SEQ ID NO: 6356 - protein, 2094 aa, synthetic construct
MPAAKRVKLDGGDKKYSIGLDIGTNSVGWAVITDEYKVPSKKFKVLGNTDRHSIKKNLIGALLFDSGETAEATRLKRTARRRYTRRKNRICYLQEIFSNEMAKVDDSFFHRLEESFLVEEDKKHERHPIFGNIVDEVAYHEKYPTIYHLRKKLVDSTDKADLRLIYLALAHMIKFRGHFLIEGDLNPDNSDVDKLFIQLVQTYNQLFEENPINASGVDAKAILSARLSKSRRLENLIAQLPGEKKNGLFGNLIALSLGLTPNFKSNFDLAEDAKLQLSKDTYDDDLDNLLAQIGDQYADLFLAAKNLSDAILLSDILRVNTEITKAPLSASMIKRYDEHHQDLTLLKALVRQQLPEKYKEIFFDQSKNGYAGYIDGGASQEEFYKFIKPILEKMDGTEELLVKLNREDLLRKQRTFDNGSIPHQIHLGELHAILRRQEDFYPFLKDNREKIEKILTFRIPYYVGPLARGNSRFAWMTRKSEETITPWNFEEVVDKGASAQSFIERMTNFDKNLPNEKVLPKHSLLYEYFTVYNELTKVKYVTEGMRKPAFLSGEQKKAIVDLLFKTNRKVTVKQLKEDYFKKIECFDSVEISGVEDRFNASLGTYHDLLKIIKDKDFLDNEENEDILEDIVLTLTLFEDREMIEERLKTYAHLFDDKVMKQLKRRRYTGWGRLSRKLINGIRDKQSGKTILDFLKSDGFANRNFMQLIHDDSLTFKEDIQKAQVSGQGDSLHEHIANLAGSPAIKKGILQTVKVVDELVKVMGRHKPENIVIEMARENQTTQKGQKNSRERMKRIEEGIKELGSQILKEHPVENTQLQNEKLYLYYLQNGRDMYVDQELDINRLSDYDVDHIVPQSFLKDDSIDNKVLTRSDKARGKSDNVPSEEVVKKMKNYWRQLLNAKLITQRKFDNLTKAERGGLSELDKAGFIKRQLVETRQITKHVAQILDSRMNTKYDENDKLIREVKVITLKSKLVSDFRKDFQFYKVREINNYHHAHDAYLNAVVGTALIKKYPKLESEFVYGDYKVYDVRKMIAKSEQEIGKATAKYFFYSNIMNFFKTEITLANGEIRKRPLIETNGETGEIVWDKGRDFATVRKVLSMPQVNIVKKTEVQTGGFSKESILPKRNSDKLIARKKDWDPKKYGGFDSPTVAYSVLVVAKVEKGKSKKLKSVKELLGITIMERSSFEKNPIDFLEAKGYKEVKKDLIIKLPKYSLFELENGRKRMLASAGELQKGNELALPSKYVNFLYLASHYEKLKGSPEDNEQKQLFVEQHKHYLDEIIEQISEFSKRVILADANLDKVLSAYNKHRDKPIREQAENIIHLFTLTNLGAPAAFKYFDTTIDRKRYTSTKEVLDATLIHQSITGLYETRIDLSQLGGDGGGSSGSSGSSGSSGSSGSSGGIPWLMKKPLQLTTLVPLQEYEERLLKQTMLTGSYKEKLQSLFLKYDALWQHWENQVGHRRIKPHHIATGTVNPRPQKQYPINPKAKASIQTVINDLLKQGVLIQQNSIMNTPVYPVPKPDGKWRMVLDYREVNKTIPLIAAQNQHSAGILSSIFRGKYKTTLDLSNGFWAHSITPESYWLTAFTWLGQQYCWTRLPQGFLNSPALFNADVVDLLKEVPNVQVYVDDIYISHDDPREHLEQLEKVFSLLLNAGYVVSLKKSEIAQHEVEFLGFNITKEGRGLTETFKQKLLNITPPRDLKQLQSILGKLNFARNFIPNFSELVKPLYNIIATAPGKYITWTTDNSQQLQNIISMLNSAENLEERNPEVRLIMKVNTSPSAGYIRFYNEFAKRPIMYLNYVYTKAEVKFTNTEKLLTTIHKGLIKALDLGMGQEILVYSPIVSMTKIQKTPLPERKALPIRWITWMSYLEDPRIQFHYDKTLPELQQVPTVTDDIIAKIKHPSEFSMVFYTDGSAIKHPNVNKSHNAGMGIAQVQFKPEFTVINTWSIPLGDHTAQLAEVAAVEFACKKALKIDGPVLIVTDSFYVAESVNKELPYWQSNGFFNNKKKPLKHVSKWKSIADCIQLKPDIIIIHEKGHQPTASTFHTEGNNLADKLATQGSYVVNAGKRTADGSEFEKRTADGSEFESPKKKAKVE

SEQ ID NO: 6357 - protein, 2183 aa, synthetic construct
MPAAKRVKLDGGDKKYSIGLDIGTNSVGWAVITDEYKVPSKKFKVLGNTDRHSIKKNLIGALLFDSGETAEATRLKRTARRRYTRRKNRICYLQEIFSNEMAKVDDSFFHRLEESFLVEEDKKHERHPIFGNIVDEVAYHEKYPTIYHLRKKLVDSTDKADLRLIYLALAHMIKFRGHFLIEGDLNPDNSDVDKLFIQLVQTYNQLFEENPINASGVDAKAILSARLSKSRRLENLIAQLPGEKKNGLFGNLIALSLGLTPNFKSNFDLAEDAKLQLSKDTYDDDLDNLLAQIGDQYADLFLAAKNLSDAILLSDILRVNTEITKAPLSASMIKRYDEHHQDLTLLKALVRQQLPEKYKEIFFDQSKNGYAGYIDGGASQEEFYKFIKPILEKMDGTEELLVKLNREDLLRKQRTFDNGSIPHQIHLGELHAILRRQEDFYPFLKDNREKIEKILTFRIPYYVGPLARGNSRFAWMTRKSEETITPWNFEEVVDKGASAQSFIERMTNFDKNLPNEKVLPKHSLLYEYFTVYNELTKVKYVTEGMRKPAFLSGEQKKAIVDLLFKTNRKVTVKQLKEDYFKKIECFDSVEISGVEDRFNASLGTYHDLLKIIKDKDFLDNEENEDILEDIVLTLTLFEDREMIEERLKTYAHLFDDKVMKQLKRRRYTGWGRLSRKLINGIRDKQSGKTILDFLKSDGFANRNFMQLIHDDSLTFKEDIQKAQVSGQGDSLHEHIANLAGSPAIKKGILQTVKVVDELVKVMGRHKPENIVIEMARENQTTQKGQKNSRERMKRIEEGIKELGSQILKEHPVENTQLQNEKLYLYYLQNGRDMYVDQELDINRLSDYDVDHIVPQSFLKDDSIDNKVLTRSDKARGKSDNVPSEEVVKKMKNYWRQLLNAKLITQRKFDNLTKAERGGLSELDKAGFIKRQLVETRQITKHVAQILDSRMNTKYDENDKLIREVKVITLKSKLVSDFRKDFQFYKVREINNYHHAHDAYLNAVVGTALIKKYPKLESEFVYGDYKVYDVRKMIAKSEQEIGKATAKYFFYSNIMNFFKTEITLANGEIRKRPLIETNGETGEIVWDKGRDFATVRKVLSMPQVNIVKKTEVQTGGFSKESILPKRNSDKLIARKKDWDPKKYGGFDSPTVAYSVLVVAKVEKGKSKKLKSVKELLGITIMERSSFEKNPIDFLEAKGYKEVKKDLIIKLPKYSLFELENGRKRMLASAGELQKGNELALPSKYVNFLYLASHYEKLKGSPEDNEQKQLFVEQHKHYLDEIIEQISEFSKRVILADANLDKVLSAYNKHRDKPIREQAENIIHLFTLTNLGAPAAFKYFDTTIDRKRYTSTKEVLDATLIHQSITGLYETRIDLSQLGGDGGGSSGSSGSSGSSGSSGSSGGMDPLQLLQPLEAEIKGTKLKAHWNSGATITCVPQAFLEEEVPIKNIWIKTIHGEKEQPVYYLTFKIQGRKVEAEVISSPYDYILVSPSDIPWLMKKPLQLTTLVPLQEYEERLLKQTMLTGSYKEKLQSLFLKYDALWQHWENQVGHRRIKPHHIATGTVNPRPQKQYPINPKAKASIQTVINDLLKQGVLIQQNSIMNTPVYPVPKPDGKWRMVLDYREVNKTIPLIAAQNQHSAGILSSIFRGKYKTTLDLSNGFWAHSITPESYWLTAFTWLGQQYCWTRLPQGFLNSPALFNADVVDLLKEVPNVQVYVDDIYISHDDPREHLEQLEKVFSLLLNAGYVVSLKKSEIAQHEVEFLGFNITKEGRGLTETFKQKLLNITPPRDLKQLQSILGLLNFARNFIPNFSELVKPLYNIIATAPGKYITWTTDNSQQLQNIISMLNSAENLEERNPEVRLIMKVNTSPSAGYIRFYNEFAKRPIMYLNYVYTKAEVKFTNTEKLLTTIHKGLIKALDLGMGQEILVYSPIVSMTKIQKTPLPERKALPIRWITWMSYLEDPRIQFHYDKTLPELQQVPTVTDDIIAKIKHPSEFSMVFYTDGSAIKHPNVNKSHNAGMGIAQVQFKPEFTVINTWSIPLGDHTAQLAEVAAVEFACKKALKIDGPVLIVTDSFYVAESVNKELPYWQSNGFFNNKKKPLKHVSKWKSIADCIQLKPDIIIIHEKGHQPTASTFHTEGNNLADKLATQGSYVVNAGKRTADGSEFEKRTADGSEFESPKKKAKVE

SEQ ID NO: 6358 - protein, 2101 aa, synthetic construct
MPAAKRVKLDGGDKKYSIGLDIGTNSVGWAVITDEYKVPSKKFKVLGNTDRHSIKKNLIGALLFDSGETAEATRLKRTARRRYTRRKNRICYLQEIFSNEMAKVDDSFFHRLEESFLVEEDKKHERHPIFGNIVDEVAYHEKYPTIYHLRKKLVDSTDKADLRLIYLALAHMIKFRGHFLIEGDLNPDNSDVDKLFIQLVQTYNQLFEENPINASGVDAKAILSARLSKSRRLENLIAQLPGEKKNGLFGNLIALSLGLTPNFKSNFDLAEDAKLQLSKDTYDDDLDNLLAQIGDQYADLFLAAKNLSDAILLSDILRVNTEITKAPLSASMIKRYDEHHQDLTLLKALVRQQLPEKYKEIFFDQSKNGYAGYIDGGASQEEFYKFIKPILEKMDGTEELLVKLNREDLLRKQRTFDNGSIPHQIHLGELHAILRRQEDFYPFLKDNREKIEKILTFRIPYYVGPLARGNSRFAWMTRKSEETITPWNFEEVVDKGASAQSFIERMTNFDKNLPNEKVLPKHSLLYEYFTVYNELTKVKYVTEGMRKPAFLSGEQKKAIVDLLFKTNRKVTVKQLKEDYFKKIECFDSVEISGVEDRFNASLGTYHDLLKIIKDKDFLDNEENEDILEDIVLTLTLFEDREMIEERLKTYAHLFDDKVMKQLKRRRYTGWGRLSRKLINGIRDKQSGKTILDFLKSDGFANRNFMQLIHDDSLTFKEDIQKAQVSGQGDSLHEHIANLAGSPAIKKGILQTVKVVDELVKVMGRHKPENIVIEMARENQTTQKGQKNSRERMKRIEEGIKELGSQILKEHPVENTQLQNEKLYLYYLQNGRDMYVDQELDINRLSDYDVDHIVPQSFLKDDSIDNKVLTRSDKARGKSDNVPSEEVVKKMKNYWRQLLNAKLITQRKFDNLTKAERGGLSELDKAGFIKRQLVETRQITKHVAQILDSRMNTKYDENDKLIREVKVITLKSKLVSDFRKDFQFYKVREINNYHHAHDAYLNAVVGTALIKKYPKLESEFVYGDYKVYDVRKMIAKSEQEIGKATAKYFFYSNIMNFFKTEITLANGEIRKRPLIETNGETGEIVWDKGRDFATVRKVLSMPQVNIVKKTEVQTGGFSKESILPKRNSDKLIARKKDWDPKKYGGFDSPTVAYSVLVVAKVEKGKSKKLKSVKELLGITIMERSSFEKNPIDFLEAKGYKEVKKDLIIKLPKYSLFELENGRKRMLASAGELQKGNELALPSKYVNFLYLASHYEKLKGSPEDNEQKQLFVEQHKHYLDEIIEQISEFSKRVILADANLDKVLSAYNKHRDKPIREQAENIIHLFTLTNLGAPAAFKYFDTTIDRKRYTSTKEVLDATLIHQSITGLYETRIDLSQLGGDGGGSSGSSGSSGSSGSSGSSGGVLNLEEEYRLHEKPVPSSIDPSWLQLFPTVWAERAGMGLANQVPPVVVELRSGASPVAVRQYPMSKEAREGIRPHIQRFLDLGVLVPCQSPWNTPLLPVKKPGTNDYRPVQDLREINKRVQDIHPTVPNPYNLLSSLPPSHTWYSVLDLKDAFFCLKLHPNSQPLFAFEWRDPEKGNTGQLTWTRLPQGFKNSPTLFDEALHRDLAPFRALNPQVVLLQYVDDLLVAAPTYRDCKEGTQKLLQELSKLGYRVSAKKAQLCQKEVTYLGYLLKEGKRWLTPARKATVMKIPPPTTPRQVREFLGTAGFCRLWIPGFASLAAPLYPLTKESIPFIWTEEHQKAFDRIKEALLSAPALALPDLTKPFTLYVDERAGVARGVLTQTLGPWRRPVAYLSKKLDPVASGWPTCLKAVAAVALLLKDADKLTLGQNVTVIASHSLESIVRQPPDRWMTNARMTHYQSLLLNERVSFAPPAVLNPATLLPVESEATPVHRCSEILAEETGTRRDLKDQPLPGVPAWYTDGSSFIAEGKRRAGAAIVDGKRTVWASSLPEGTSAQKAELVALTQALRLAEGKDINIYTDSRYAFATAHIHGAIYKQRGLLTSAGKDIKNKEEILALLEAIHLPKRVAIIHCPGHQKGNDPVATGNRRADEAAKQAALSTRVLAETTKPAGKRTADGSEFEKRTADGSEFESPKKKAKVE

SEQ ID NO: 6359 - protein, 2103 aa, synthetic construct
MPAAKRVKLDGGDKKYSIGLDIGTNSVGWAVITDEYKVPSKKFKVLGNTDRHSIKKNLIGALLFDSGETAEATRLKRTARRRYTRRKNRICYLQEIFSNEMAKVDDSFFHRLEESFLVEEDKKHERHPIFGNIVDEVAYHEKYPTIYHLRKKLVDSTDKADLRLIYLALAHMIKFRGHFLIEGDLNPDNSDVDKLFIQLVQTYNQLFEENPINASGVDAKAILSARLSKSRRLENLIAQLPGEKKNGLFGNLIALSLGLTPNFKSNFDLAEDAKLQLSKDTYDDDLDNLLAQIGDQYADLFLAAKNLSDAILLSDILRVNTEITKAPLSASMIKRYDEHHQDLTLLKALVRQQLPEKYKEIFFDQSKNGYAGYIDGGASQEEFYKFIKPILEKMDGTEELLVKLNREDLLRKQRTFDNGSIPHQIHLGELHAILRRQEDFYPFLKDNREKIEKILTFRIPYYVGPLARGNSRFAWMTRKSEETITPWNFEEVVDKGASAQSFIERMTNFDKNLPNEKVLPKHSLLYEYFTVYNELTKVKYVTEGMRKPAFLSGEQKKAIVDLLFKTNRKVTVKQLKEDYFKKIECFDSVEISGVEDRFNASLGTYHDLLKIIKDKDFLDNEENEDILEDIVLTLTLFEDREMIEERLKTYAHLFDDKVMKQLKRRRYTGWGRLSRKLINGIRDKQSGKTILDFLKSDGFANRNFMQLIHDDSLTFKEDIQKAQVSGQGDSLHEHIANLAGSPAIKKGILQTVKVVDELVKVMGRHKPENIVIEMARENQTTQKGQKNSRERMKRIEEGIKELGSQILKEHPVENTQLQNEKLYLYYLQNGRDMYVDQELDINRLSDYDVDHIVPQSFLKDDSIDNKVLTRSDKARGKSDNVPSEEVVKKMKNYWRQLLNAKLITQRKFDNLTKAERGGLSELDKAGFIKRQLVETRQITKHVAQILDSRMNTKYDENDKLIREVKVITLKSKLVSDFRKDFQFYKVREINNYHHAHDAYLNAVVGTALIKKYPKLESEFVYGDYKVYDVRKMIAKSEQEIGKATAKYFFYSNIMNFFKTEITLANGEIRKRPLIETNGETGEIVWDKGRDFATVRKVLSMPQVNIVKKTEVQTGGFSKESILPKRNSDKLIARKKDWDPKKYGGFDSPTVAYSVLVVAKVEKGKSKKLKSVKELLGITIMERSSFEKNPIDFLEAKGYKEVKKDLIIKLPKYSLFELENGRKRMLASAGELQKGNELALPSKYVNFLYLASHYEKLKGSPEDNEQKQLFVEQHKHYLDEIIEQISEFSKRVILADANLDKVLSAYNKHRDKPIREQAENIIHLFTLTNLGAPAAFKYFDTTIDRKRYTSTKEVLDATLIHQSITGLYETRIDLSQLGGDGGGSSGSSGSSGSSGSSGSSGGTLNIEDEYRLHETSKEPDVPLGSTWLSDFPQAWAETGGMGLAVRQAPLIIPLKATSTPVSIKQYPMSQEARLGIKPHIQRLLDQGILVPCQSPWNTPLLPVKKPGTNDYRPVQDLREVNKRVEDIHPTVPNPYNLLSGLPPSHQWYTVLDLKDAFFCLRLHPTSQPLFAFEWRDPEMGISGQLTWTRLPQGFKNSPTLFNEALHRDLADFRIQHPDLILLQYVDDLLLAATSEQDCQRGTRALLQTLGNLGYRASAKKAQICQKQVKYLGYLLKEGQRWLTEARKETVMGQPTPKTPRQLREFLGTAGFCRLWIPGFAEMAAPLYPLTKPGTLFNWGPDQQKAYQEIKQALLTAPALGLPDLTKPFELFVDEKQGYAKGVLTQKLGPWRRPVAYLSKKLDPVAAGWPPCLRMVAAIAVLTKDAGKLTMGQPLVILAPHAVEALVKQPPDRWLSNARMTHYQAMLLDTDRVQFGPVVALNPATLLPLPEKEAPHDCLEILAETHGTRPDLTDQPIPDADYTWYTDGSSFLQEGQRRAGAAVTTETEVIWARALPAGTSAQRAELIALTQALKMAEGKKLNVYTDSRYAFATAHVHGEIYRRRGWLTSEGREIKNKNEILALLKALFLPKRLSIIHCPGHQKGNSAEARGNRMADQAAREAAMKAVLETSTLLAGKRTADGSEFEKRTADGSEFESPKKKAKVE

SEQ ID NO: 6360 - protein, 2096 aa, synthetic construct
MPAAKRVKLDGGDKKYSIGLDIGTNSVGWAVITDEYKVPSKKFKVLGNTDRHSIKKNLIGALLFDSGETAEATRLKRTARRRYTRRKNRICYLQEIFSNEMAKVDDSFFHRLEESFLVEEDKKHERHPIFGNIVDEVAYHEKYPTIYHLRKKLVDSTDKADLRLIYLALAHMIKFRGHFLIEGDLNPDNSDVDKLFIQLVQTYNQLFEENPINASGVDAKAILSARLSKSRRLENLIAQLPGEKKNGLFGNLIALSLGLTPNFKSNFDLAEDAKLQLSKDTYDDDLDNLLAQIGDQYADLFLAAKNLSDAILLSDILRVNTEITKAPLSASMIKRYDEHHQDLTLLKALVRQQLPEKYKEIFFDQSKNGYAGYIDGGASQEEFYKFIKPILEKMDGTEELLVKLNREDLLRKQRTFDNGSIPHQIHLGELHAILRRQEDFYPFLKDNREKIEKILTFRIPYYVGPLARGNSRFAWMTRKSEETITPWNFEEVVDKGASAQSFIERMTNFDKNLPNEKVLPKHSLLYEYFTVYNELTKVKYVTEGMRKPAFLSGEQKKAIVDLLFKTNRKVTVKQLKEDYFKKIECFDSVEISGVEDRFNASLGTYHDLLKIIKDKDFLDNEENEDILEDIVLTLTLFEDREMIEERLKTYAHLFDDKVMKQLKRRRYTGWGRLSRKLINGIRDKQSGKTILDFLKSDGFANRNFMQLIHDDSLTFKEDIQKAQVSGQGDSLHEHIANLAGSPAIKKGILQTVKVVDELVKVMGRHKPENIVIEMARENQTTQKGQKNSRERMKRIEEGIKELGSQILKEHPVENTQLQNEKLYLYYLQNGRDMYVDQELDINRLSDYDVDHIVPQSFLKDDSIDNKVLTRSDKARGKSDNVPSEEVVKKMKNYWRQLLNAKLITQRKFDNLTKAERGGLSELDKAGFIKRQLVETRQITKHVAQILDSRMNTKYDENDKLIREVKVITLKSKLVSDFRKDFQFYKVREINNYHHAHDAYLNAVVGTALIKKYPKLESEFVYGDYKVYDVRKMIAKSEQEIGKATAKYFFYSNIMNFFKTEITLANGEIRKRPLIETNGETGEIVWDKGRDFATVRKVLSMPQVNIVKKTEVQTGGFSKESILPKRNSDKLIARKKDWDPKKYGGFDSPTVAYSVLVVAKVEKGKSKKLKSVKELLGITIMERSSFEKNPIDFLEAKGYKEVKKDLIIKLPKYSLFELENGRKRMLASAGELQKGNELALPSKYVNFLYLASHYEKLKGSPEDNEQKQLFVEQHKHYLDEIIEQISEFSKRVILADANLDKVLSAYNKHRDKPIREQAENIIHLFTLTNLGAPAAFKYFDTTIDRKRYTSTKEVLDATLIHQSITGLYETRIDLSQLGGDGGEAAAKGGTVSLQDEHRLFDIPVTTSLPDVWLQDFPQAWAETGGLGRAKCQAPIIIDLKPTAVPVSIKQYPMSLEAHMGIRQHIIKFLELGVLRPCRSPWNTPLLPVKKPGTQDYRPVQDLREINKRTVDIHPTVPNPYNLLSTLKPDYSWYTVLDLKDAFFCLPLAPQSQELFAFEWKDPERGISGQLTWTRLPQGFKNSPTLFNEALHRDLTDFRTQHPEVTLLQYVDDLLLAAPTKKACTQGTRHLLQELGEKGYRASAKKAQICQTKVTYLGYILSEGKRWLTPGRIETVARIPPPRNPREVREFLGTAGFCRLWIPGFAELAAPLYALTKPSTPFTWQTEHQLAFEALKKALLSAPALGLPDTSKPFTLFLDERQGIAKGVLTQKLGPWKRPVAYLSKKLDPVAAGWPPCLRIMAATAMLVKDSAKLTLGQPLTVITPHTLEAIVRQPPDRWITNARLTHYQALLLDTDRVQFGPPVTLNPATLLPVPENQPSPHDCRQVLAETHGTREDLKDQELPDADHTWYTDGSSYLDSGTRRAGAAVVDGHNTIWAQSLPPGTSAQKAELIALTKALELSKGKKANIYTDSRYAFATAHTHGSIYERRGWLTSEGKEIKNKAEIIALLKALFLPQEVAIIHCPGHQKGQDPVAVGNRQADRVARQAAMAEVLTLATEPDNTSHITAGKRTADGSEFEKRTADGSEFESPKKKAKVE

SEQ ID NO: 6361 - protein, 2167 aa, synthetic construct
MPAAKRVKLDGGDKKYSIGLDIGTNSVGWAVITDEYKVPSKKFKVLGNTDRHSIKKNLIGALLFDSGETAEATRLKRTARRRYTRRKNRICYLQEIFSNEMAKVDDSFFHRLEESFLVEEDKKHERHPIFGNIVDEVAYHEKYPTIYHLRKKLVDSTDKADLRLIYLALAHMIKFRGHFLIEGDLNPDNSDVDKLFIQLVQTYNQLFEENPINASGVDAKAILSARLSKSRRLENLIAQLPGEKKNGLFGNLIALSLGLTPNFKSNFDLAEDAKLQLSKDTYDDDLDNLLAQIGDQYADLFLAAKNLSDAILLSDILRVNTEITKAPLSASMIKRYDEHHQDLTLLKALVRQQLPEKYKEIFFDQSKNGYAGYIDGGASQEEFYKFIKPILEKMDGTEELLVKLNREDLLRKQRTFDNGSIPHQIHLGELHAILRRQEDFYPFLKDNREKIEKILTFRIPYYVGPLARGNSRFAWMTRKSEETITPWNFEEVVDKGASAQSFIERMTNFDKNLPNEKVLPKHSLLYEYFTVYNELTKVKYVTEGMRKPAFLSGEQKKAIVDLLFKTNRKVTVKQLKEDYFKKIECFDSVEISGVEDRFNASLGTYHDLLKIIKDKDFLDNEENEDILEDIVLTLTLFEDREMIEERLKTYAHLFDDKVMKQLKRRRYTGWGRLSRKLINGIRDKQSGKTILDFLKSDGFANRNFMQLIHDDSLTFKEDIQKAQVSGQGDSLHEHIANLAGSPAIKKGILQTVKVVDELVKVMGRHKPENIVIEMARENQTTQKGQKNSRERMKRIEEGIKELGSQILKEHPVENTQLQNEKLYLYYLQNGRDMYVDQELDINRLSDYDVDHIVPQSFLKDDSIDNKVLTRSDKARGKSDNVPSEEVVKKMKNYWRQLLNAKLITQRKFDNLTKAERGGLSELDKAGFIKRQLVETRQITKHVAQILDSRMNTKYDENDKLIREVKVITLKSKLVSDFRKDFQFYKVREINNYHHAHDAYLNAVVGTALIKKYPKLESEFVYGDYKVYDVRKMIAKSEQEIGKATAKYFFYSNIMNFFKTEITLANGEIRKRPLIETNGETGEIVWDKGRDFATVRKVLSMPQVNIVKKTEVQTGGFSKESILPKRNSDKLIARKKDWDPKKYGGFDSPTVAYSVLVVAKVEKGKSKKLKSVKELLGITIMERSSFEKNPIDFLEAKGYKEVKKDLIIKLPKYSLFELENGRKRMLASAGELQKGNELALPSKYVNFLYLASHYEKLKGSPEDNEQKQLFVEQHKHYLDEIIEQISEFSKRVILADANLDKVLSAYNKHRDKPIREQAENIIHLFTLTNLGAPAAFKYFDTTIDRKRYTSTKEVLDATLIHQSITGLYETRIDLSQLGGDGGEAAAKGGMDLLKPLTVERKGVKIKGYWNSQADITCVPKDLLQGEEPVRQQNVTTIHGTQEGDVYYVNLKIDGRRINTEVIGTTLDYAIITPGDVPWILKKPLELTIKLDLEEQQGTLLNNSILSKKGKEELKQLFEKYSALWQSWENQVGHRRIRPHKIATGTVKPTPQKQYHINPKAKPDIQIVINDLLKQGVLIQKESTMNTPVYPVPKPNGRWRMVLDYRAVNKVTPLIAVQNQHSYGILGSLFKGRYKTTIDLSNGFWAHPIVPEDYWITAFTWQGKQYCWTVLPQGFLNSPGLFNGDVVDLLQGIPNVEVYVDDVYISHDSEKEHLEYLDILFNRLKEAGYIISLKKSNIANSIVDFLGFQITNEGRGLTDTFKEKLENITAPTTLKQLQSILGLLNFARNFIPDFTELIAPLYALIPKSPKNYVPWQIEHSTTLETLITKLNGAEYLQGRKGDKTLIMKVNASYTTGYIRYYNEGEKKPISYVSIVFSKTELKFTELEKLLTTVHKGLLKALDLSMGQNIHVYSPIVSMQNIQKTPQTAKKALASRWLSWLSYLEDPRIRFFYDPQMPALKDLPAVDTGKDNKKHPSNFQHIFYTDGSAITSPTKEGHLNAGMGIVYFINKDGNLQKQQEWSISLGNHTAQFAEIAAFEFALKKCLPLGGNILVVTDSNYVAKAYNEELDVWASNGFVNNRKKPLKHISKWKSVADLKRLRPDVVVTHEPGHQKLDSSPHAYGNNLADQLATQASFKVHAGKRTADGSEFEKRTADGSEFESPKKKAKVE

SEQ ID NO: 6362 - protein, 2121 aa, synthetic construct
MPAAKRVKLDGGDKKYSIGLDIGTNSVGWAVITDEYKVPSKKFKVLGNTDRHSIKKNLIGALLFDSGETAEATRLKRTARRRYTRRKNRICYLQEIFSNEMAKVDDSFFHRLEESFLVEEDKKHERHPIFGNIVDEVAYHEKYPTIYHLRKKLVDSTDKADLRLIYLALAHMIKFRGHFLIEGDLNPDNSDVDKLFIQLVQTYNQLFEENPINASGVDAKAILSARLSKSRRLENLIAQLPGEKKNGLFGNLIALSLGLTPNFKSNFDLAEDAKLQLSKDTYDDDLDNLLAQIGDQYADLFLAAKNLSDAILLSDILRVNTEITKAPLSASMIKRYDEHHQDLTLLKALVRQQLPEKYKEIFFDQSKNGYAGYIDGGASQEEFYKFIKPILEKMDGTEELLVKLNREDLLRKQRTFDNGSIPHQIHLGELHAILRRQEDFYPFLKDNREKIEKILTFRIPYYVGPLARGNSRFAWMTRKSEETITPWNFEEVVDKGASAQSFIERMTNFDKNLPNEKVLPKHSLLYEYFTVYNELTKVKYVTEGMRKPAFLSGEQKKAIVDLLFKTNRKVTVKQLKEDYFKKIECFDSVEISGVEDRFNASLGTYHDLLKIIKDKDFLDNEENEDILEDIVLTLTLFEDREMIEERLKTYAHLFDDKVMKQLKRRRYTGWGRLSRKLINGIRDKQSGKTILDFLKSDGFANRNFMQLIHDDSLTFKEDIQKAQVSGQGDSLHEHIANLAGSPAIKKGILQTVKVVDELVKVMGRHKPENIVIEMARENQTTQKGQKNSRERMKRIEEGIKELGSQILKEHPVENTQLQNEKLYLYYLQNGRDMYVDQELDINRLSDYDVDHIVPQSFLKDDSIDNKVLTRSDKARGKSDNVPSEEVVKKMKNYWRQLLNAKLITQRKFDNLTKAERGGLSELDKAGFIKRQLVETRQITKHVAQILDSRMNTKYDENDKLIREVKVITLKSKLVSDFRKDFQFYKVREINNYHHAHDAYLNAVVGTALIKKYPKLESEFVYGDYKVYDVRKMIAKSEQEIGKATAKYFFYSNIMNFFKTEITLANGEIRKRPLIETNGETGEIVWDKGRDFATVRKVLSMPQVNIVKKTEVQTGGFSKESILPKRNSDKLIARKKDWDPKKYGGFDSPTVAYSVLVVAKVEKGKSKKLKSVKELLGITIMERSSFEKNPIDFLEAKGYKEVKKDLIIKLPKYSLFELENGRKRMLASAGELQKGNELALPSKYVNFLYLASHYEKLKGSPEDNEQKQLFVEQHKHYLDEIIEQISEFSKRVILADANLDKVLSAYNKHRDKPIREQAENIIHLFTLTNLGAPAAFKYFDTTIDRKRYTSTKEVLDATLIHQSITGLYETRIDLSQLGGDGGEAAAKGGLLGRDLLTKLKAQIQFSTEGPQVTWEDRPAMCLVLNLEEEYRLHEKPVPPSIDPSWLQLFPMVWAEKAGMGLANQVPPVVVELKSDASPVAVRQYPMSKEAREGIRPHIQRFLDLGILVPCQSPWNTPLLPVKKPGTNDYRPVQDLREVNKRVQDIHPTVPNPYNLLSSLPPSHTWYSVLDLKDAFFCLKLHPNSQPLFAFEWRDPEKGNTGQLTWTRLPQGFKNSPTLFNEALHRDLASFRALNPQVVMLQYVDDLLVAAPTYRDCKEGTRRLLQELSKLGYRVSAKKAQLCREEVTYLGYLLKGGKRWLTPARKATVMKIPTPTTPRQVREFLGTAGFCRLWIPGFASLAAPLYPLTRPKVPFTWTEAHQEAFGRIKEALLSAPALALPDLTKPFALYVDEKEGVARGVLTQTLGPWRRPVAYLSKKLDPVASGWPTCLKAIAAVALLLKDADKLTLGQNVLVIAPHNLESIVRQPPDRWMTNARMTHYQSLLLNERVSFAPPAILNPATLLPVESDDTPIHICSEILAEETGTRPDLRDQPLPGVPAWYTDGSSFIMDGRRQAGAAIVDNKRTVWASNLPEGTSAQKAELIALTQALRLAEGKSINIYTDSRYAFATAHVHGAIYKQRGWLTSAGKDIKNKEEILALLEAIHLPKRVAIIHCPGHQRGTDPVATGNRKADEAAKQAAQSTRILTETTKNAGKRTADGSEFEKRTADGSEFESPKKKAKVE

SEQ ID NO: 6363 - protein, 2212 aa, synthetic construct
MPAAKRVKLDGGDKKYSIGLDIGTNSVGWAVITDEYKVPSKKFKVLGNTDRHSIKKNLIGALLFDSGETAEATRLKRTARRRYTRRKNRICYLQEIFSNEMAKVDDSFFHRLEESFLVEEDKKHERHPIFGNIVDEVAYHEKYPTIYHLRKKLVDSTDKADLRLIYLALAHMIKFRGHFLIEGDLNPDNSDVDKLFIQLVQTYNQLFEENPINASGVDAKAILSARLSKSRRLENLIAQLPGEKKNGLFGNLIALSLGLTPNFKSNFDLAEDAKLQLSKDTYDDDLDNLLAQIGDQYADLFLAAKNLSDAILLSDILRVNTEITKAPLSASMIKRYDEHHQDLTLLKALVRQQLPEKYKEIFFDQSKNGYAGYIDGGASQEEFYKFIKPILEKMDGTEELLVKLNREDLLRKQRTFDNGSIPHQIHLGELHAILRRQEDFYPFLKDNREKIEKILTFRIPYYVGPLARGNSRFAWMTRKSEETITPWNFEEVVDKGASAQSFIERMTNFDKNLPNEKVLPKHSLLYEYFTVYNELTKVKYVTEGMRKPAFLSGEQKKAIVDLLFKTNRKVTVKQLKEDYFKKIECFDSVEISGVEDRFNASLGTYHDLLKIIKDKDFLDNEENEDILEDIVLTLTLFEDREMIEERLKTYAHLFDDKVMKQLKRRRYTGWGRLSRKLINGIRDKQSGKTILDFLKSDGFANRNFMQLIHDDSLTFKEDIQKAQVSGQGDSLHEHIANLAGSPAIKKGILQTVKVVDELVKVMGRHKPENIVIEMARENQTTQKGQKNSRERMKRIEEGIKELGSQILKEHPVENTQLQNEKLYLYYLQNGRDMYVDQELDINRLSDYDVDHIVPQSFLKDDSIDNKVLTRSDKARGKSDNVPSEEVVKKMKNYWRQLLNAKLITQRKFDNLTKAERGGLSELDKAGFIKRQLVETRQITKHVAQILDSRMNTKYDENDKLIREVKVITLKSKLVSDFRKDFQFYKVREINNYHHAHDAYLNAVVGTALIKKYPKLESEFVYGDYKVYDVRKMIAKSEQEIGKATAKYFFYSNIMNFFKTEITLANGEIRKRPLIETNGETGEIVWDKGRDFATVRKVLSMPQVNIVKKTEVQTGGFSKESILPKRNSDKLIARKKDWDPKKYGGFDSPTVAYSVLVVAKVEKGKSKKLKSVKELLGITIMERSSFEKNPIDFLEAKGYKEVKKDLIIKLPKYSLFELENGRKRMLASAGELQKGNELALPSKYVNFLYLASHYEKLKGSPEDNEQKQLFVEQHKHYLDEIIEQISEFSKRVILADANLDKVLSAYNKHRDKPIREQAENIIHLFTLTNLGAPAAFKYFDTTIDRKRYTSTKEVLDATLIHQSITGLYETRIDLSQLGGDGGEAAAKGGTLGDQGSRGSDPLPEPRVTLTVEGIPTEFLVNTGAEHSVLTKPMGKMGSKRTVVAGATGSKVYPWTTKRLLKIGQKQVTHSFLVIPECPAPLLGRDLLTKLKAQIQFSTEGPQVTWEDRPAMCLVLNLEEEYRLHEKPVPPSIDPSWLQLFPMVWAEKAGMGLANQVPPVVVELKSDASPVAVRQYPMSKEAREGIRPHIQRFLDLGILVPCQSPWNTPLLPVKKPGTNDYRPVQDLREVNKRVQDIHPTVPNPYNLLSSLPPSHTWYSVLDLKDAFFCLKLHPNSQPLFAFEWRDPEKGNTGQLTWTRLPQGFKNSPTLFNEALHRDLASFRALNPQVVMLQYVDDLLVAAPTYRDCKEGTRRLLQELSKLGYRVSAKKAQLCREEVTYLGYLLKGGKRWLTPARKATVMKIPTPTTPRQVREFLGTAGFCRLWIPGFASLAAPLYPLTRPKVPFTWTEAHQEAFGRIKEALLSAPALALPDLTKPFALYVDEKEGVARGVLTQTLGPWRRPVAYLSKKLDPVASGWPTCLKAIAAVALLLKDADKLTLGQNVLVIAPHNLESIVRQPPDRWMTNARMTHYQSLLLNERVSFAPPAILNPATLLPVESDDTPIHICSEILAEETGTRPDLRDQPLPGVPAWYTDGSSFIMDGRRQAGAAIVDNKRTVWASNLPEGTSAQKAELIALTQALRLAEGKSINIYTDSRYAFATAHVHGAIYKQRGWLTSAGKDIKNKEEILALLEAIHLPKRVAIIHCPGHQRGTDPVATGNRKADEAAKQAAQSTRILTETTKNAGKRTADGSEFEKRTADGSEFESPKKKAKVE

SEQ ID NO: 6364 - protein, 2212 aa, synthetic construct
MPAAKRVKLDGGDKKYSIGLDIGTNSVGWAVITDEYKVPSKKFKVLGNTDRHSIKKNLIGALLFDSGETAEATRLKRTARRRYTRRKNRICYLQEIFSNEMAKVDDSFFHRLEESFLVEEDKKHERHPIFGNIVDEVAYHEKYPTIYHLRKKLVDSTDKADLRLIYLALAHMIKFRGHFLIEGDLNPDNSDVDKLFIQLVQTYNQLFEENPINASGVDAKAILSARLSKSRRLENLIAQLPGEKKNGLFGNLIALSLGLTPNFKSNFDLAEDAKLQLSKDTYDDDLDNLLAQIGDQYADLFLAAKNLSDAILLSDILRVNTEITKAPLSASMIKRYDEHHQDLTLLKALVRQQLPEKYKEIFFDQSKNGYAGYIDGGASQEEFYKFIKPILEKMDGTEELLVKLNREDLLRKQRTFDNGSIPHQIHLGELHAILRRQEDFYPFLKDNREKIEKILTFRIPYYVGPLARGNSRFAWMTRKSEETITPWNFEEVVDKGASAQSFIERMTNFDKNLPNEKVLPKHSLLYEYFTVYNELTKVKYVTEGMRKPAFLSGEQKKAIVDLLFKTNRKVTVKQLKEDYFKKIECFDSVEISGVEDRFNASLGTYHDLLKIIKDKDFLDNEENEDILEDIVLTLTLFEDREMIEERLKTYAHLFDDKVMKQLKRRRYTGWGRLSRKLINGIRDKQSGKTILDFLKSDGFANRNFMQLIHDDSLTFKEDIQKAQVSGQGDSLHEHIANLAGSPAIKKGILQTVKVVDELVKVMGRHKPENIVIEMARENQTTQKGQKNSRERMKRIEEGIKELGSQILKEHPVENTQLQNEKLYLYYLQNGRDMYVDQELDINRLSDYDVDHIVPQSFLKDDSIDNKVLTRSDKARGKSDNVPSEEVVKKMKNYWRQLLNAKLITQRKFDNLTKAERGGLSELDKAGFIKRQLVETRQITKHVAQILDSRMNTKYDENDKLIREVKVITLKSKLVSDFRKDFQFYKVREINNYHHAHDAYLNAVVGTALIKKYPKLESEFVYGDYKVYDVRKMIAKSEQEIGKATAKYFFYSNIMNFFKTEITLANGEIRKRPLIETNGETGEIVWDKGRDFATVRKVLSMPQVNIVKKTEVQTGGFSKESILPKRNSDKLIARKKDWDPKKYGGFDSPTVAYSVLVVAKVEKGKSKKLKSVKELLGITIMERSSFEKNPIDFLEAKGYKEVKKDLIIKLPKYSLFELENGRKRMLASAGELQKGNELALPSKYVNFLYLASHYEKLKGSPEDNEQKQLFVEQHKHYLDEIIEQISEFSKRVILADANLDKVLSAYNKHRDKPIREQAENIIHLFTLTNLGAPAAFKYFDTTIDRKRYTSTKEVLDATLIHQSITGLYETRIDLSQLGGDGGEAAAKGGTLGDQGSRGSDPLPEPRVTLTVEGIPTEFLVNTGAEHSVLTKPMGKMGSKRTVVAGATGSKVYPWTTKRLLKIGQKQVTHSFLVIPECPAPLLGRDLLTKLKAQIQFSTEGPQVTWEDRPAMCLVLNLEEEYRLHEKPVPPSIDPSWLQLFPMVWAEKAGMGLANQVPPVVVELKSDASPVAVRQYPMSKEAREGIRPHIQRFLDLGILVPCQSPWNTPLLPVKKPGTNDYRPVQDLREVNKRVQDIHPTVPNPYNLLSSLPPSHTWYSVLDLKDAFFCLKLHPNSQPLFAFEWRDPEKGNTGQLTWTRLPQGFKNSPTLFNEALHRDLASFRALNPQVVMLQYVDDLLVAAPTYRDCKEGTRRLLQELSKLGYRVSAKKAQLCREEVTYLGYLLKGGKRWLTPARKATVMKIPTPTTPRQVREFLGKAGFCRLFIPGFASLAAPLYPLTRPKVPFTWTEAHQEAFGRIKEALLSAPALALPDLTKPFALYVDEKEGVARGVLTQTLGPWRRPVAYLSKKLDPVASGWPTCLKAIAAVALLLKDADKLTLGQNVLVIAPHNLESIVRQPPDRWMTNARMTHYQSLLLNERVSFAPPAILNPATLLPVESDDTPIHICSEILAEETGTRPDLRDQPLPGVPAWYTDGSSFIMDGRRQAGAAIVDNKRTVWASNLPEGTSAQKAELIALTQALRLAEGKSINIYTDSRYAFATAHVHGAIYKQRGWLTSAGKDIKNKEEILALLEAIHLPKRVAIIHCPGHQRGTDPVATGNRKADEAAKQAAQSTRILTETTKNAGKRTADGSEFEKRTADGSEFESPKKKAKVE

SEQ ID NO: 6365 - protein, 2090 aa, synthetic construct
MPAAKRVKLDGGDKKYSIGLDIGTNSVGWAVITDEYKVPSKKFKVLGNTDRHSIKKNLIGALLFDSGETAEATRLKRTARRRYTRRKNRICYLQEIFSNEMAKVDDSFFHRLEESFLVEEDKKHERHPIFGNIVDEVAYHEKYPTIYHLRKKLVDSTDKADLRLIYLALAHMIKFRGHFLIEGDLNPDNSDVDKLFIQLVQTYNQLFEENPINASGVDAKAILSARLSKSRRLENLIAQLPGEKKNGLFGNLIALSLGLTPNFKSNFDLAEDAKLQLSKDTYDDDLDNLLAQIGDQYADLFLAAKNLSDAILLSDILRVNTEITKAPLSASMIKRYDEHHQDLTLLKALVRQQLPEKYKEIFFDQSKNGYAGYIDGGASQEEFYKFIKPILEKMDGTEELLVKLNREDLLRKQRTFDNGSIPHQIHLGELHAILRRQEDFYPFLKDNREKIEKILTFRIPYYVGPLARGNSRFAWMTRKSEETITPWNFEEVVDKGASAQSFIERMTNFDKNLPNEKVLPKHSLLYEYFTVYNELTKVKYVTEGMRKPAFLSGEQKKAIVDLLFKTNRKVTVKQLKEDYFKKIECFDSVEISGVEDRFNASLGTYHDLLKIIKDKDFLDNEENEDILEDIVLTLTLFEDREMIEERLKTYAHLFDDKVMKQLKRRRYTGWGRLSRKLINGIRDKQSGKTILDFLKSDGFANRNFMQLIHDDSLTFKEDIQKAQVSGQGDSLHEHIANLAGSPAIKKGILQTVKVVDELVKVMGRHKPENIVIEMARENQTTQKGQKNSRERMKRIEEGIKELGSQILKEHPVENTQLQNEKLYLYYLQNGRDMYVDQELDINRLSDYDVDHIVPQSFLKDDSIDNKVLTRSDKARGKSDNVPSEEVVKKMKNYWRQLLNAKLITQRKFDNLTKAERGGLSELDKAGFIKRQLVETRQITKHVAQILDSRMNTKYDENDKLIREVKVITLKSKLVSDFRKDFQFYKVREINNYHHAHDAYLNAVVGTALIKKYPKLESEFVYGDYKVYDVRKMIAKSEQEIGKATAKYFFYSNIMNFFKTEITLANGEIRKRPLIETNGETGEIVWDKGRDFATVRKVLSMPQVNIVKKTEVQTGGFSKESILPKRNSDKLIARKKDWDPKKYGGFDSPTVAYSVLVVAKVEKGKSKKLKSVKELLGITIMERSSFEKNPIDFLEAKGYKEVKKDLIIKLPKYSLFELENGRKRMLASAGELQKGNELALPSKYVNFLYLASHYEKLKGSPEDNEQKQLFVEQHKHYLDEIIEQISEFSKRVILADANLDKVLSAYNKHRDKPIREQAENIIHLFTLTNLGAPAAFKYFDTTIDRKRYTSTKEVLDATLIHQSITGLYETRIDLSQLGGDGGEAAAKGGTLNIEDEHRLHETSKEPDVSLGSTWLSDFPQAWAETGGMGLAVRQAPLIIPLKATSTPVSIKQYPMSQEARLGIKPHIQRLLDQGILVPCQSPWNTPLLPVKKPGTNDYRPVQDLREVNKRVEDIHPTVPNPYNLLSGLPPSHQWYTVLDLKDAFFCLRLHPTSQPLFAFEWRDPEMGISGQLTWTRLPQGFKNSPTLFDEALHRDLADFRIQHPDLILLQYVDDLLLAATSELDCQQGTRALLQTLGNLGYRASAKKAQICQKQVKYLGYLLKEGQRWLTEARKETVMGQPTPKTPRQLREFLGTAGFCRLWIPGFAEMAAPLYPLTKTGTLFNWGPDQQKAYQEIKQALLTAPALGLPDLTKPFELFVDEKQGYAKGVLTQKLGPWRRPVAYLSKKLDPVAAGWPPCLRMVAAIAVLTKDAGKLTMGQPLVILAPHAVEALVKQPPDRWLSNARMTHYQALLLDTDRVQFGPVVALNPATLLPLPEEGLQHNCLDILAEAHGTRPDLTDQPLPDADHTWYTDGSSLLQEGQRKAGAAVTTETEVIWAKALPAGTSAQRAELIALTQALKMAEGKKLNVYTDSRYAFATAHIHGEIYRRRGLLTSEGKEIKNKDEILALLKALFLPKRLSIIHCPGHQKGHSAEARGNRMADQAARKAAITETPDTSTLLAGKRTADGSEFEKRTADGSEFESPKKKAKVE

SEQ ID NO: 6366 - protein, 2082 aa, synthetic construct
MPAAKRVKLDGGDKKYSIGLDIGTNSVGWAVITDEYKVPSKKFKVLGNTDRHSIKKNLIGALLFDSGETAEATRLKRTARRRYTRRKNRICYLQEIFSNEMAKVDDSFFHRLEESFLVEEDKKHERHPIFGNIVDEVAYHEKYPTIYHLRKKLVDSTDKADLRLIYLALAHMIKFRGHFLIEGDLNPDNSDVDKLFIQLVQTYNQLFEENPINASGVDAKAILSARLSKSRRLENLIAQLPGEKKNGLFGNLIALSLGLTPNFKSNFDLAEDAKLQLSKDTYDDDLDNLLAQIGDQYADLFLAAKNLSDAILLSDILRVNTEITKAPLSASMIKRYDEHHQDLTLLKALVRQQLPEKYKEIFFDQSKNGYAGYIDGGASQEEFYKFIKPILEKMDGTEELLVKLNREDLLRKQRTFDNGSIPHQIHLGELHAILRRQEDFYPFLKDNREKIEKILTFRIPYYVGPLARGNSRFAWMTRKSEETITPWNFEEVVDKGASAQSFIERMTNFDKNLPNEKVLPKHSLLYEYFTVYNELTKVKYVTEGMRKPAFLSGEQKKAIVDLLFKTNRKVTVKQLKEDYFKKIECFDSVEISGVEDRFNASLGTYHDLLKIIKDKDFLDNEENEDILEDIVLTLTLFEDREMIEERLKTYAHLFDDKVMKQLKRRRYTGWGRLSRKLINGIRDKQSGKTILDFLKSDGFANRNFMQLIHDDSLTFKEDIQKAQVSGQGDSLHEHIANLAGSPAIKKGILQTVKVVDELVKVMGRHKPENIVIEMARENQTTQKGQKNSRERMKRIEEGIKELGSQILKEHPVENTQLQNEKLYLYYLQNGRDMYVDQELDINRLSDYDVDHIVPQSFLKDDSIDNKVLTRSDKARGKSDNVPSEEVVKKMKNYWRQLLNAKLITQRKFDNLTKAERGGLSELDKAGFIKRQLVETRQITKHVAQILDSRMNTKYDENDKLIREVKVITLKSKLVSDFRKDFQFYKVREINNYHHAHDAYLNAVVGTALIKKYPKLESEFVYGDYKVYDVRKMIAKSEQEIGKATAKYFFYSNIMNFFKTEITLANGEIRKRPLIETNGETGEIVWDKGRDFATVRKVLSMPQVNIVKKTEVQTGGFSKESILPKRNSDKLIARKKDWDPKKYGGFDSPTVAYSVLVVAKVEKGKSKKLKSVKELLGITIMERSSFEKNPIDFLEAKGYKEVKKDLIIKLPKYSLFELENGRKRMLASAGELQKGNELALPSKYVNFLYLASHYEKLKGSPEDNEQKQLFVEQHKHYLDEIIEQISEFSKRVILADANLDKVLSAYNKHRDKPIREQAENIIHLFTLTNLGAPAAFKYFDTTIDRKRYTSTKEVLDATLIHQSITGLYETRIDLSQLGGDGGEAAAKGGLDDEYRLYSPLVKPDQNIQFWLEQFPQAWAETAGMGLAKQVPPQVIQLKASATPVSVRQYPLSKEAQEGIRPHVQRLIQQGILVPVQSPWNTPLLPVRKPGTNDYRPVQDLREVNKRVQDIHPTVPNPYNLLCALPPQRSWYTVLDLKDAFFCLRLHPTSQPLFAFEWRDPGTGRTGQLTWTRLPQGFKNSPTIFNEALHRDLANFRIQHPQVTLLQYVDDLLLAGATKQDCLEGTKALLLELSDLGYRASAKKAQICRREVTYLGYSLRDGQRWLTEARKKTVVQIPAPTTAKQVREFLGKAGFCRLFIPGFATLAAPLYPLTKPKGEFSWAPEHQKAFDAIKKALLSAPALALPDVTKPFTLYVDERKGVARGVLTQTLGPWRRPVAYLSKKLDPVASGWPVCLKAIAAVAILVKDADKLTLGQNITVIAPHALENIVRQPPDRWMTNARMTHYQSLLLTERVTFAPPAALNPATLLPEETDEPVTHDCHQLLIEETGVRKDLTDIPLTGEVLTWFTDGSSYVVEGKRMAGAAVVDGTRTIWASSLPEGTSAQKAELMALTQALRLAEGKSINIYTDSRYAFATAHVHGAIYKQRGWLTSAGREIKNKEEILSLLEALHLPKRLAIIHCPGHQKAKDPISRGNQMADRVAKQAAQGVNLLPAGKRTADGSEFEKRTADGSEFESPKKKAKVE

SEQ ID NO: 6367 - protein, 2084 aa, synthetic construct
MPAAKRVKLDGGDKKYSIGLDIGTNSVGWAVITDEYKVPSKKFKVLGNTDRHSIKKNLIGALLFDSGETAEATRLKRTARRRYTRRKNRICYLQEIFSNEMAKVDDSFFHRLEESFLVEEDKKHERHPIFGNIVDEVAYHEKYPTIYHLRKKLVDSTDKADLRLIYLALAHMIKFRGHFLIEGDLNPDNSDVDKLFIQLVQTYNQLFEENPINASGVDAKAILSARLSKSRRLENLIAQLPGEKKNGLFGNLIALSLGLTPNFKSNFDLAEDAKLQLSKDTYDDDLDNLLAQIGDQYADLFLAAKNLSDAILLSDILRVNTEITKAPLSASMIKRYDEHHQDLTLLKALVRQQLPEKYKEIFFDQSKNGYAGYIDGGASQEEFYKFIKPILEKMDGTEELLVKLNREDLLRKQRTFDNGSIPHQIHLGELHAILRRQEDFYPFLKDNREKIEKILTFRIPYYVGPLARGNSRFAWMTRKSEETITPWNFEEVVDKGASAQSFIERMTNFDKNLPNEKVLPKHSLLYEYFTVYNELTKVKYVTEGMRKPAFLSGEQKKAIVDLLFKTNRKVTVKQLKEDYFKKIECFDSVEISGVEDRFNASLGTYHDLLKIIKDKDFLDNEENEDILEDIVLTLTLFEDREMIEERLKTYAHLFDDKVMKQLKRRRYTGWGRLSRKLINGIRDKQSGKTILDFLKSDGFANRNFMQLIHDDSLTFKEDIQKAQVSGQGDSLHEHIANLAGSPAIKKGILQTVKVVDELVKVMGRHKPENIVIEMARENQTTQKGQKNSRERMKRIEEGIKELGSQILKEHPVENTQLQNEKLYLYYLQNGRDMYVDQELDINRLSDYDVDHIVPQSFLKDDSIDNKVLTRSDKARGKSDNVPSEEVVKKMKNYWRQLLNAKLITQRKFDNLTKAERGGLSELDKAGFIKRQLVETRQITKHVAQILDSRMNTKYDENDKLIREVKVITLKSKLVSDFRKDFQFYKVREINNYHHAHDAYLNAVVGTALIKKYPKLESEFVYGDYKVYDVRKMIAKSEQEIGKATAKYFFYSNIMNFFKTEITLANGEIRKRPLIETNGETGEIVWDKGRDFATVRKVLSMPQVNIVKKTEVQTGGFSKESILPKRNSDKLIARKKDWDPKKYGGFDSPTVAYSVLVVAKVEKGKSKKLKSVKELLGITIMERSSFEKNPIDFLEAKGYKEVKKDLIIKLPKYSLFELENGRKRMLASAGELQKGNELALPSKYVNFLYLASHYEKLKGSPEDNEQKQLFVEQHKHYLDEIIEQISEFSKRVILADANLDKVLSAYNKHRDKPIREQAENIIHLFTLTNLGAPAAFKYFDTTIDRKRYTSTKEVLDATLIHQSITGLYETRIDLSQLGGDGGEAAAKGGTLQLDDEYRLYSPLVKPDQNIQFWLEQFPQAWAETAGMGLAKQVPPQVIQLKASATPVSVRQYPLSKEAQEGIRPHVQRLIQQGILVPVQSPWNTPLLPVRKPGTNDYRPVQDLREVNKRVQDIHPTVPNPYNLLCALPPQRSWYTVLDLKDAFFCLRLHPTSQPLFAFEWRDPGTGRTGQLTWTRLPQGFKNSPTIFDEALHRDLANFRIQHPQVTLLQYVDDLLLAGATKQDCLEGTKALLLELSDLGYRASAKKAQICRREVTYLGYSLRDGQRWLTEARKKTVVQIPAPTTAKQVREFLGTAGFCRLWIPGFATLAAPLYPLTKEKGEFSWAPEHQKAFDAIKKALLSAPALALPDVTKPFTLYVDERKGVARGVLTQTLGPWRRPVAYLSKKLDPVASGWPVCLKAIAAVAILVKDADKLTLGQNITVIAPHALENIVRQPPDRWMTNARMTHYQSLLLTERVTFAPPAALNPATLLPEETDEPVTHDCHQLLIEETGVRKDLTDIPLTGEVLTWFTDGSSYVVEGKRMAGAAVVDGTRTIWASSLPEGTSAQKAELMALTQALRLAEGKSINIYTDSRYAFATAHVHGAIYKQRGLLTSAGREIKNKEEILSLLEALHLPKRLAIIHCPGHQKAKDPISRGNQMADRVAKQAAQGVNLLAGKRTADGSEFEKRTADGSEFESPKKKAKVE

SEQ ID NO: 6368 - protein, 2082 aa, synthetic construct; identical to SEQ ID NO: 6366

SEQ ID NO: 6369 - protein, 2081 aa, synthetic construct
MPAAKRVKLDGGDKKYSIGLDIGTNSVGWAVITDEYKVPSKKFKVLGNTDRHSIKKNLIGALLFDSGETAEATRLKRTARRRYTRRKNRICYLQEIFSNEMAKVDDSFFHRLEESFLVEEDKKHERHPIFGNIVDEVAYHEKYPTIYHLRKKLVDSTDKADLRLIYLALAHMIKFRGHFLIEGDLNPDNSDVDKLFIQLVQTYNQLFEENPINASGVDAKAILSARLSKSRRLENLIAQLPGEKKNGLFGNLIALSLGLTPNFKSNFDLAEDAKLQLSKDTYDDDLDNLLAQIGDQYADLFLAAKNLSDAILLSDILRVNTEITKAPLSASMIKRYDEHHQDLTLLKALVRQQLPEKYKEIFFDQSKNGYAGYIDGGASQEEFYKFIKPILEKMDGTEELLVKLNREDLLRKQRTFDNGSIPHQIHLGELHAILRRQEDFYPFLKDNREKIEKILTFRIPYYVGPLARGNSRFAWMTRKSEETITPWNFEEVVDKGASAQSFIERMTNFDKNLPNEKVLPKHSLLYEYFTVYNELTKVKYVTEGMRKPAFLSGEQKKAIVDLLFKTNRKVTVKQLKEDYFKKIECFDSVEISGVEDRFNASLGTYHDLLKIIKDKDFLDNEENEDILEDIVLTLTLFEDREMIEERLKTYAHLFDDKVMKQLKRRRYTGWGRLSRKLINGIRDKQSGKTILDFLKSDGFANRNFMQLIHDDSLTFKEDIQKAQVSGQGDSLHEHIANLAGSPAIKKGILQTVKVVDELVKVMGRHKPENIVIEMARENQTTQKGQKNSRERMKRIEEGIKELGSQILKEHPVENTQLQNEKLYLYYLQNGRDMYVDQELDINRLSDYDVDHIVPQSFLKDDSIDNKVLTRSDKARGKSDNVPSEEVVKKMKNYWRQLLNAKLITQRKFDNLTKAERGGLSELDKAGFIKRQLVETRQITKHVAQILDSRMNTKYDENDKLIREVKVITLKSKLVSDFRKDFQFYKVREINNYHHAHDAYLNAVVGTALIKKYPKLESEFVYGDYKVYDVRKMIAKSEQEIGKATAKYFFYSNIMNFFKTEITLANGEIRKRPLIETNGETGEIVWDKGRDFATVRKVLSMPQVNIVKKTEVQTGGFSKESILPKRNSDKLIARKKDWDPKKYGGFDSPTVAYSVLVVAKVEKGKSKKLKSVKELLGITIMERSSFEKNPIDFLEAKGYKEVKKDLIIKLPKYSLFELENGRKRMLASAGELQKGNELALPSKYVNFLYLASHYEKLKGSPEDNEQKQLFVEQHKHYLDEIIEQISEFSKRVILADANLDKVLSAYNKHRDKPIREQAENIIHLFTLTNLGAPAAFKYFDTTIDRKRYTSTKEVLDATLIHQSITGLYETRIDLSQLGGDGGEAAAKGGIPWLMKKPLQLTTLVPLQEYEERLLKQTMLTGSYKEKLQSLFLKYDALWQHWENQVGHRRIKPHHIATGTVNPRPQKQYPINPKAKASIQTVINDLLKQGVLIQQNSIMNTPVYPVPKPDGKWRMVLDYREVNKTIPLIAAQNQHSAGILSSIFRGKYKTTLDLSNGFWAHSITPESYWLTAFTWLGQQYCWTRLPQGFLNSPALFNADVVDLLKEVPNVQVYVDDIYISHDDPREHLEQLEKVFSLLLNAGYVVSLKKSEIAQHEVEFLGFNITKEGRGLTETFKQKLLNITPPRDLKQLQSILGLLNFARNFIPNFSELVKPLYNIIATAPGKYITWTTDNSQQLQNIISMLNSAENLEERNPEVRLIMKVNTSPSAGYIRFYNEFAKRPIMYLNYVYTKAEVKFTNTEKLLTTIHKGLIKALDLGMGQEILVYSPIVSMTKIQKTPLPERKALPIRWITWMSYLEDPRIQFHYDKTLPELQQVPTVTDDIIAKIKHPSEFSMVFYTDGSAIKHPNVNKSHNAGMGIAQVQFKPEFTVINTWSIPLGDHTAQLAEVAAVEFACKKALKIDGPVLIVTDSFYVAESVNKELPYWQSNGFFNNKKKPLKHVSKWKSIADCIQLKPDIIIIHEKGHQPTASTFHTEGNNLADKLATQGSYVVNAGKRTADGSEFEKRTADGSEFESPKKKAKVE

SEQ ID NO: 6370 - protein, 2097 aa, synthetic construct
MPAAKRVKLDGGDKKYSIGLDIGTNSVGWAVITDEYKVPSKKFKVLGNTDRHSIKKNLIGALLFDSGETAEATRLKRTARRRYTRRKNRICYLQEIFSNEMAKVDDSFFHRLEESFLVEEDKKHERHPIFGNIVDEVAYHEKYPTIYHLRKKLVDSTDKADLRLIYLALAHMIKFRGHFLIEGDLNPDNSDVDKLFIQLVQTYNQLFEENPINASGVDAKAILSARLSKSRRLENLIAQLPGEKKNGLFGNLIALSLGLTPNFKSNFDLAEDAKLQLSKDTYDDDLDNLLAQIGDQYADLFLAAKNLSDAILLSDILRVNTEITKAPLSASMIKRYDEHHQDLTLLKALVRQQLPEKYKEIFFDQSKNGYAGYIDGGASQEEFYKFIKPILEKMDGTEELLVKLNREDLLRKQRTFDNGSIPHQIHLGELHAILRRQEDFYPFLKDNREKIEKILTFRIPYYVGPLARGNSRFAWMTRKSEETITPWNFEEVVDKGASAQSFIERMTNFDKNLPNEKVLPKHSLLYEYFTVYNELTKVKYVTEGMRKPAFLSGEQKKAIVDLLFKTNRKVTVKQLKEDYFKKIECFDSVEISGVEDRFNASLGTYHDLLKIIKDKDFLDNEENEDILEDIVLTLTLFEDREMIEERLKTYAHLFDDKVMKQLKRRRYTGWGRLSRKLINGIRDKQSGKTILDFLKSDGFANRNFMQLIHDDSLTFKEDIQKAQVSGQGDSLHEHIANLAGSPAIKKGILQTVKVVDELVKVMGRHKPENIVIEMARENQTTQKGQKNSRERMKRIEEGIKELGSQILKEHPVENTQLQNEKLYLYYLQNGRDMYVDQELDINRLSDYDVDHIVPQSFLKDDSIDNKVLTRSDKARGKSDNVPSEEVVKKMKNYWRQLLNAKLITQRKFDNLTKAERGGLSELDKAGFIKRQLVETRQITKHVAQILDSRMNTKYDENDKLIREVKVITLKSKLVSDFRKDFQFYKVREINNYHHAHDAYLNAVVGTALIKKYPKLESEFVYGDYKVYDVRKMIAKSEQEIGKATAKYFFYSNIMNFFKTEITLANGEIRKRPLIETNGETGEIVWDKGRDFATVRKVLSMPQVNIVKKTEVQTGGFSKESILPKRNSDKLIARKKDWDPKKYGGFDSPTVAYSVLVVAKVEKGKSKKLKSVKELLGITIMERSSFEKNPIDFLEAKGYKEVKKDLIIKLPKYSLFELENGRKRMLASAGELQKGNELALPSKYVNFLYLASHYEKLKGSPEDNEQKQLFVEQHKHYLDEIIEQISEFSKRVILADANLDKVLSAYNKHRDKPIREQAENIIHLFTLTNLGAPAAFKYFDTTIDRKRYTSTKEVLDATLIHQSITGLYETRIDLSQLGGDGGEAAAKEAAAKGGTAPLEEEYRLFLEAPIQNVTLLEQWKREIPKVWAEINPPGLASTQAPIHVQLLSTALPVRVRQYPITLEAKRSLRETIRKFRAAGILRPVHSPWNTPLLPVRKSGTSEYRMVQDLREVNKRVETIHPTVPNPYTLLSLLPPDRIWYSVLDLKDAFFCIPLAPESQLIFAFEWADAEEGESGQLTWTRLPQGFKNSPTLFNEALNRDLQGFRLDHPSVSLLQYVDDLLIAADTQAACLSATRDLLMTLAELGYRVSGKKAQLCQEEVTYLGFKIHKGSRSLSNSRTQAILQIPVPKTKRQVREFLGKIGYCRLFIPGFAELAQPLYAATRPGNDPLVWGEKEEEAFQSLKLALTQPPALALPSLDKPFQLFVEETSGAAKGVLTQALGPWKRPVAYLSKRLDPVAAGWPRCLRAIAAAALLTREASKLTFGQDIEITSSHNLESLLRSPPDKWLTNARITQYQVLLLDPPRVRFKQTAALNPATLLPETDDTLPIHHCLDTLDSLTSTRPDLTDQPLAQAEATLFTDGSSYIRDGKRYAGAAVVTLDSVIWAEPLPIGTSAQKAELIALTKALEWSKDKSVNIYTDSRYAFATLHVHGMIYRERGWLTAGGKAIKNAPEILALLTAVWLPKRVAVMHCKGHQKDDAPTSTGNRRADEVAREVAIRPLSTQATISAGKRTADGSEFEKRTADGSEFESPKKKAKVE

SEQ ID NO: 6371 - protein, 2172 aa, synthetic construct
MPAAKRVKLDGGDKKYSIGLDIGTNSVGWAVITDEYKVPSKKFKVLGNTDRHSIKKNLIGALLFDSGETAEATRLKRTARRRYTRRKNRICYLQEIFSNEMAKVDDSFFHRLEESFLVEEDKKHERHPIFGNIVDEVAYHEKYPTIYHLRKKLVDSTDKADLRLIYLALAHMIKFRGHFLIEGDLNPDNSDVDKLFIQLVQTYNQLFEENPINASGVDAKAILSARLSKSRRLENLIAQLPGEKKNGLFGNLIALSLGLTPNFKSNFDLAEDAKLQLSKDTYDDDLDNLLAQIGDQYADLFLAAKNLSDAILLSDILRVNTEITKAPLSASMIKRYDEHHQDLTLLKALVRQQLPEKYKEIFFDQSKNGYAGYIDGGASQEEFYKFIKPILEKMDGTEELLVKLNREDLLRKQRTFDNGSIPHQIHLGELHAILRRQEDFYPFLKDNREKIEKILTFRIPYYVGPLARGNSRFAWMTRKSEETITPWNFEEVVDKGASAQSFIERMTNFDKNLPNEKVLPKHSLLYEYFTVYNELTKVKYVTEGMRKPAFLSGEQKKAIVDLLFKTNRKVTVKQLKEDYFKKIECFDSVEISGVEDRFNASLGTYHDLLKIIKDKDFLDNEENEDILEDIVLTLTLFEDREMIEERLKTYAHLFDDKVMKQLKRRRYTGWGRLSRKLINGIRDKQSGKTILDFLKSDGFANRNFMQLIHDDSLTFKEDIQKAQVSGQGDSLHEHIANLAGSPAIKKGILQTVKVVDELVKVMGRHKPENIVIEMARENQTTQKGQKNSRERMKRIEEGIKELGSQILKEHPVENTQLQNEKLYLYYLQNGRDMYVDQELDINRLSDYDVDHIVPQSFLKDDSIDNKVLTRSDKARGKSDNVPSEEVVKKMKNYWRQLLNAKLITQRKFDNLTKAERGGLSELDKAGFIKRQLVETRQITKHVAQILDSRMNTKYDENDKLIREVKVITLKSKLVSDFRKDFQFYKVREINNYHHAHDAYLNAVVGTALIKKYPKLESEFVYGDYKVYDVRKMIAKSEQEIGKATAKYFFYSNIMNFFKTEITLANGEIRKRPLIETNGETGEIVWDKGRDFATVRKVLSMPQVNIVKKTEVQTGGFSKESILPKRNSDKLIARKKDWDPKKYGGFDSPTVAYSVLVVAKVEKGKSKKLKSVKELLGITIMERSSFEKNPIDFLEAKGYKEVKKDLIIKLPKYSLFELENGRKRMLASAGELQKGNELALPSKYVNFLYLASHYEKLKGSPEDNEQKQLFVEQHKHYLDEIIEQISEFSKRVILADANLDKVLSAYNKHRDKPIREQAENIIHLFTLTNLGAPAAFKYFDTTIDRKRYTSTKEVLDATLIHQSITGLYETRIDLSQLGGDGGEAAAKEAAAKGGMDLLKPLTVERKGVKIKGYWNSQADITCVPKDLLQGEEPVRQQNVTTIHGTQEGDVYYVNLKIDGRRINTEVIGTTLDYAIITPGDVPWILKKPLELTIKLDLEEQQGTLLNNSILSKKGKEELKQLFEKYSALWQSWENQVGHRRIRPHKIATGTVKPTPQKQYHINPKAKPDIQIVINDLLKQGVLIQKESTMNTPVYPVPKPNGRWRMVLDYRAVNKVTPLIAVQNQHSYGILGSLFKGRYKTTIDLSNGFWAHPIVPEDYWITAFTWQGKQYCWTVLPQGFLNSPGLFTGDVVDLLQGIPNVEVYVDDVYISHDSEKEHLEYLDILFNRLKEAGYIISLKKSNIANSIVDFLGFQITNEGRGLTDTFKEKLENITAPTTLKQLQSILGLLNFARNFIPDFTELIAPLYALIPKSTKNYVPWQIEHSTTLETLITKLNGAEYLQGRKGDKTLIMKVNASYTTGYIRYYNEGEKKPISYVSIVFSKTELKFTELEKLLTTVHKGLLKALDLSMGQNIHVYSPIVSMQNIQKTPQTAKKALASRWLSWLSYLEDPRIRFFYDPQMPALKDLPAVDTGKDNKKHPSNFQHIFYTDGSAITSPTKEGHLNAGMGIVYFINKDGNLQKQQEWSISLGNHTAQFAEIAAFEFALKKCLPLGGNILVVTDSNYVAKAYNEELDVWASNGFVNNRKKPLKHISKWKSVADLKRLRPDVVVTHEPGHQKLDSSPHAYGNNLADQLATQASFKVHAGKRTADGSEFEKRTADGSEFESPKKKAKVE

SEQ ID NO: 6372 - protein, 2086 aa, synthetic construct
MPAAKRVKLDGGDKKYSIGLDIGTNSVGWAVITDEYKVPSKKFKVLGNTDRHSIKKNLIGALLFDSGETAEATRLKRTARRRYTRRKNRICYLQEIFSNEMAKVDDSFFHRLEESFLVEEDKKHERHPIFGNIVDEVAYHEKYPTIYHLRKKLVDSTDKADLRLIYLALAHMIKFRGHFLIEGDLNPDNSDVDKLFIQLVQTYNQLFEENPINASGVDAKAILSARLSKSRRLENLIAQLPGEKKNGLFGNLIALSLGLTPNFKSNFDLAEDAKLQLSKDTYDDDLDNLLAQIGDQYADLFLAAKNLSDAILLSDILRVNTEITKAPLSASMIKRYDEHHQDLTLLKALVRQQLPEKYKEIFFDQSKNGYAGYIDGGASQEEFYKFIKPILEKMDGTEELLVKLNREDLLRKQRTFDNGSIPHQIHLGELHAILRRQEDFYPFLKDNREKIEKILTFRIPYYVGPLARGNSRFAWMTRKSEETITPWNFEEVVDKGASAQSFIERMTNFDKNLPNEKVLPKHSLLYEYFTVYNELTKVKYVTEGMRKPAFLSGEQKKAIVDLLFKTNRKVTVKQLKEDYFKKIECFDSVEISGVEDRFNASLGTYHDLLKIIKDKDFLDNEENEDILEDIVLTLTLFEDREMIEERLKTYAHLFDDKVMKQLKRRRYTGWGRLSRKLINGIRDKQSGKTILDFLKSDGFANRNFMQLIHDDSLTFKEDIQKAQVSGQGDSLHEHIANLAGSPAIKKGILQTVKVVDELVKVMGRHKPENIVIEMARENQTTQKGQKNSRERMKRIEEGIKELGSQILKEHPVENTQLQNEKLYLYYLQNGRDMYVDQELDINRLSDYDVDHIVPQSFLKDDSIDNKVLTRSDKARGKSDNVPSEEVVKKMKNYWRQLLNAKLITQRKFDNLTKAERGGLSELDKAGFIKRQLVETRQITKHVAQILDSRMNTKYDENDKLIREVKVITLKSKLVSDFRKDFQFYKVREINNYHHAHDAYLNAVVGTALIKKYPKLESEFVYGDYKVYDVRKMIAKSEQEIGKATAKYFFYSNIMNFFKTEITLANGEIRKRPLIETNGETGEIVWDKGRDFATVRKVLSMPQVNIVKKTEVQTGGFSKESILPKRNSDKLIARKKDWDPKKYGGFDSPTVAYSVLVVAKVEKGKSKKLKSVKELLGITIMERSSFEKNPIDFLEAKGYKEVKKDLIIKLPKYSLFELENGRKRMLASAGELQKGNELALPSKYVNFLYLASHYEKLKGSPEDNEQKQLFVEQHKHYLDEIIEQISEFSKRVILADANLDKVLSAYNKHRDKPIREQAENIIHLFTLTNLGAPAAFKYFDTTIDRKRYTSTKEVLDATLIHQSITGLYETRIDLSQLGGDGGEAAAKEAAAKGGVPWILKKPLELTIKLDLEEQQGTLLNNSILSKKGKEELKQLFEKYSALWQSWENQVGHRRIRPHKIATGTVKPTPQKQYHINPKAKPDIQIVINDLLKQGVLIQKESTMNTPVYPVPKPNGRWRMVLDYRAVNKVTPLIAVQNQHSYGILGSLFKGRYKTTIDLSNGFWAHPIVPEDYWITAFTWQGKQYCWTVLPQGFLNSPGLFTGDVVDLLQGIPNVEVYVDDVYISHDSEKEHLEYLDILFNRLKEAGYIISLKKSNIANSIVDFLGFQITNEGRGLTDTFKEKLENITAPTTLKQLQSILGLLNFARNFIPDFTELIAPLYALIPKSTKNYVPWQIEHSTTLETLITKLNGAEYLQGRKGDKTLIMKVNASYTTGYIRYYNEGEKKPISYVSIVFSKTELKFTELEKLLTTVHKGLLKALDLSMGQNIHVYSPIVSMQNIQKTPQTAKKALASRWLSWLSYLEDPRIRFFYDPQMPALKDLPAVDTGKDNKKHPSNFQHIFYTDGSAITSPTKEGHLNAGMGIVYFINKDGNLQKQQEWSISLGNHTAQFAEIAAFEFALKKCLPLGGNILVVTDSNYVAKAYNEELDVWASNGFVNNRKKPLKHISKWKSVADLKRLRPDVVVTHEPGHQKLDSSPHAYGNNLADQLATQASFKVHAGKRTADGSEFEKRTADGSEFESPKKKAKVE

SEQ ID NO: 6373 - protein, 2172 aa, synthetic construct
MPAAKRVKLDGGDKKYSIGLDIGTNSVGWAVITDEYKVPSKKFKVLGNTDRHSIKKNLIGALLFDSGETAEATRLKRTARRRYTRRKNRICYLQEIFSNEMAKVDDSFFHRLEESFLVEEDKKHERHPIFGNIVDEVAYHEKYPTIYHLRKKLVDSTDKADLRLIYLALAHMIKFRGHFLIEGDLNPDNSDVDKLFIQLVQTYNQLFEENPINASGVDAKAILSARLSKSRRLENLIAQLPGEKKNGLFGNLIALSLGLTPNFKSNFDLAEDAKLQLSKDTYDDDLDNLLAQIGDQYADLFLAAKNLSDAILLSDILRVNTEITKAPLSASMIKRYDEHHQDLTLLKALVRQQLPEKYKEIFFDQSKNGYAGYIDGGASQEEFYKFIKPILEKMDGTEELLVKLNREDLLRKQRTFDNGSIPHQIHLGELHAILRRQEDFYPFLKDNREKIEKILTFRIPYYVGPLARGNSRFAWMTRKSEETITPWNFEEVVDKGASAQSFIERMTNFDKNLPNEKVLPKHSLLYEYFTVYNELTKVKYVTEGMRKPAFLSGEQKKAIVDLLFKTNRKVTVKQLKEDYFKKIECFDSVEISGVEDRFNASLGTYHDLLKIIKDKDFLDNEENEDILEDIVLTLTLFEDREMIEERLKTYAHLFDDKVMKQLKRRRYTGWGRLSRKLINGIRDKQSGKTILDFLKSDGFANRNFMQLIHDDSLTFKEDIQKAQVSGQGDSLHEHIANLAGSPAIKKGILQTVKVVDELVKVMGRHKPENIVIEMARENQTTQKGQKNSRERMKRIEEGIKELGSQILKEHPVENTQLQNEKLYLYYLQNGRDMYVDQELDINRLSDYDVDHIVPQSFLKDDSIDNKVLTRSDKARGKSDNVPSEEVVKKMKNYWRQLLNAKLITQRKFDNLTKAERGGLSELDKAGFIKRQLVETRQITKHVAQILDSRMNTKYDENDKLIREVKVITLKSKLVSDFRKDFQFYKVREINNYHHAHDAYLNAVVGTALIKKYPKLESEFVYGDYKVYDVRKMIAKSEQEIGKATAKYFFYSNIMNFFKTEITLANGEIRKRPLIETNGETGEIVWDKGRDFATVRKVLSMPQVNIVKKTEVQTGGFSKESILPKRNSDKLIARKKDWDPKKYGGFDSPTVAYSVLVVAKVEKGKSKKLKSVKELLGITIMERSSFEKNPIDFLEAKGYKEVKKDLIIKLPKYSLFELENGRKRMLASAGELQKGNELALPSKYVNFLYLASHYEKLKGSPEDNEQKQLFVEQHKHYLDEIIEQISEFSKRVILADANLDKVLSAYNKHRDKPIREQAENIIHLFTLTNLGAPAAFKYFDTTIDRKRYTSTKEVLDATLIHQSITGLYETRIDLSQLGGDGGEAAAKEAAAKGGMDLLKPLTVERKGVKIKGYWNSQADITCVPKDLLQGEEPVRQQNVTTIHGTQEGDVYYVNLKIDGRRINTEVIGTTLDYAIITPGDVPWILKKPLELTIKLDLEEQQGTLLNNSILSKKGKEELKQLFEKYSALWQSWENQVGHRRIRPHKIATGTVKPTPQKQYHINPKAKPDIQIVINDLLKQGVLIQKESTMNTPVYPVPKPNGRWRMVLDYRAVNKVTPLIAVQNQHSYGILGSLFKGRYKTTIDLSNGFWAHPIVPEDYWITAFTWQGKQYCWTVLPQGFLNSPGLFNGDVVDLLQGIPNVEVYVDDVYISHDSEKEHLEYLDILFNRLKEAGYIISLKKSNIANSIVDFLGFQITNEGRGLTDTFKEKLENITAPTTLKQLQSILGLLNFARNFIPDFTELIAPLYALIPKSPKNYVPWQIEHSTTLETLITKLNGAEYLQGRKGDKTLIMKVNASYTTGYIRYYNEGEKKPISYVSIVFSKTELKFTELEKLLTTVHKGLLKALDLSMGQNIHVYSPIVSMQNIQKTPQTAKKALASRWLSWLSYLEDPRIRFFYDPQMPALKDLPAVDTGKDNKKHPSNFQHIFYTDGSAITSPTKEGHLNAGMGIVYFINKDGNLQKQQEWSISLGNHTAQFAEIAAFEFALKKCLPLGGNILVVTDSNYVAKAYNEELDVWASNGFVNNRKKPLKHISKWKSVADLKRLRPDVVVTHEPGHQKLDSSPHAYGNNLADQLATQASFKVHAGKRTADGSEFEKRTADGSEFESPKKKAKVE

SEQ ID NO: 6374 - protein, 2093 aa, synthetic construct
MPAAKRVKLDGGDKKYSIGLDIGTNSVGWAVITDEYKVPSKKFKVLGNTDRHSIKKNLIGALLFDSGETAEATRLKRTARRRYTRRKNRICYLQEIFSNEMAKVDDSFFHRLEESFLVEEDKKHERHPIFGNIVDEVAYHEKYPTIYHLRKKLVDSTDKADLRLIYLALAHMIKFRGHFLIEGDLNPDNSDVDKLFIQLVQTYNQLFEENPINASGVDAKAILSARLSKSRRLENLIAQLPGEKKNGLFGNLIALSLGLTPNFKSNFDLAEDAKLQLSKDTYDDDLDNLLAQIGDQYADLFLAAKNLSDAILLSDILRVNTEITKAPLSASMIKRYDEHHQDLTLLKALVRQQLPEKYKEIFFDQSKNGYAGYIDGGASQEEFYKFIKPILEKMDGTEELLVKLNREDLLRKQRTFDNGSIPHQIHLGELHAILRRQEDFYPFLKDNREKIEKILTFRIPYYVGPLARGNSRFAWMTRKSEETITPWNFEEVVDKGASAQSFIERMTNFDKNLPNEKVLPKHSLLYEYFTVYNELTKVKYVTEGMRKPAFLSGEQKKAIVDLLFKTNRKVTVKQLKEDYFKKIECFDSVEISGVEDRFNASLGTYHDLLKIIKDKDFLDNEENEDILEDIVLTLTLFEDREMIEERLKTYAHLFDDKVMKQLKRRRYTGWGRLSRKLINGIRDKQSGKTILDFLKSDGFANRNFMQLIHDDSLTFKEDIQKAQVSGQGDSLHEHIANLAGSPAIKKGILQTVKVVDELVKVMGRHKPENIVIEMARENQTTQKGQKNSRERMKRIEEGIKELGSQILKEHPVENTQLQNEKLYLYYLQNGRDMYVDQELDINRLSDYDVDHIVPQSFLKDDSIDNKVLTRSDKARGKSDNVPSEEVVKKMKNYWRQLLNAKLITQRKFDNLTKAERGGLSELDKAGFIKRQLVETRQITKHVAQILDSRMNTKYDENDKLIREVKVITLKSKLVSDFRKDFQFYKVREINNYHHAHDAYLNAVVGTALIKKYPKLESEFVYGDYKVYDVRKMIAKSEQEIGKATAKYFFYSNIMNFFKTEITLANGEIRKRPLIETNGETGEIVWDKGRDFATVRKVLSMPQVNIVKKTEVQTGGFSKESILPKRNSDKLIARKKDWDPKKYGGFDSPTVAYSVLVVAKVEKGKSKKLKSVKELLGITIMERSSFEKNPIDFLEAKGYKEVKKDLIIKLPKYSLFELENGRKRMLASAGELQKGNELALPSKYVNFLYLASHYEKLKGSPEDNEQKQLFVEQHKHYLDEIIEQISEFSKRVILADANLDKVLSAYNKHRDKPIREQAENIIHLFTLTNLGAPAAFKYFDTTIDRKRYTSTKEVLDATLIHQSITGLYETRIDLSQLGGDGGEAAAKEAAAKGGVLNLEEEYRLHEKPVPSSIDPSWLQLFPTVWAERAGMGLANQVPPVVVELRSGASPVAVRQYPMSKEAREGIRPHIQKFLDLGVLVPCRSPWNTPLLPVKKPGTNDYRPVQDLREINKRVQDIHPTVPNPYNLLSSLPPSYTWYSVLDLKDAFFCLRLHPNSQPLFAFEWKDPEKGNTGQLTWTRLPQGFKNSPTLFNEALHRDLAPFRALNPQVVLLQYVDDLLVAAPTYEDCKKGTQKLLQELSKLGYRVSAKKAQLCQREVTYLGYLLKEGKRWLTPARKATVMKIPVPTTPRQVREFLGKAGFCRLFIPGFASLAAPLYPLTKPSIPFIWTEEHQQAFDHIKKALLSAPALALPDLTKPFTLYIDERAGVARGVLTQTLGPWRRPVAYLSKKLDPVASGWPTCLKAVAAVALLLKDADKLTLGQNVTVIASHSLESIVRQPPDRWMTNARMTHYQSLLLNERVSFAPPAVLNPATLLPVESEATPVHRCSEILAEETGTRRDLEDQPLPGVPTWYTDGSSFITEGKRRAGAPIVDGKRTVWASSLPEGTSAQKAELVALTQALRLAEGKNINIYTDSRYAFATAHIHGAIYKQRGWLTSAGKDIKNKEEILALLEAIHLPRRVAIIHCPGHQRGSNPVATGNRRADEAAKQAALSTRVLAGTTKPAGKRTADGSEFEKRTADGSEFESPKKKAKVE

SEQ ID NO: 6375 - protein, 2126 aa, synthetic construct
MPAAKRVKLDGGDKKYSIGLDIGTNSVGWAVITDEYKVPSKKFKVLGNTDRHSIKKNLIGALLFDSGETAEATRLKRTARRRYTRRKNRICYLQEIFSNEMAKVDDSFFHRLEESFLVEEDKKHERHPIFGNIVDEVAYHEKYPTIYHLRKKLVDSTDKADLRLIYLALAHMIKFRGHFLIEGDLNPDNSDVDKLFIQLVQTYNQLFEENPINASGVDAKAILSARLSKSRRLENLIAQLPGEKKNGLFGNLIALSLGLTPNFKSNFDLAEDAKLQLSKDTYDDDLDNLLAQIGDQYADLFLAAKNLSDAILLSDILRVNTEITKAPLSASMIKRYDEHHQDLTLLKALVRQQLPEKYKEIFFDQSKNGYAGYIDGGASQEEFYKFIKPILEKMDGTEELLVKLNREDLLRKQRTFDNGSIPHQIHLGELHAILRRQEDFYPFLKDNREKIEKILTFRIPYYVGPLARGNSRFAWMTRKSEETITPWNFEEVVDKGASAQSFIERMTNFDKNLPNEKVLPKHSLLYEYFTVYNELTKVKYVTEGMRKPAFLSGEQKKAIVDLLFKTNRKVTVKQLKEDYFKKIECFDSVEISGVEDRFNASLGTYHDLLKIIKDKDFLDNEENEDILEDIVLTLTLFEDREMIEERLKTYAHLFDDKVMKQLKRRRYTGWGRLSRKLINGIRDKQSGKTILDFLKSDGFANRNFMQLIHDDSLTFKEDIQKAQVSGQGDSLHEHIANLAGSPAIKKGILQTVKVVDELVKVMGRHKPENIVIEMARENQTTQKGQKNSRERMKRIEEGIKELGSQILKEHPVENTQLQNEKLYLYYLQNGRDMYVDQELDINRLSDYDVDHIVPQSFLKDDSIDNKVLTRSDKARGKSDNVPSEEVVKKMKNYWRQLLNAKLITQRKFDNLTKAERGGLSELDKAGFIKRQLVETRQITKHVAQILDSRMNTKYDENDKLIREVKVITLKSKLVSDFRKDFQFYKVREINNYHHAHDAYLNAVVGTALIKKYPKLESEFVYGDYKVYDVRKMIAKSEQEIGKATAKYFFYSNIMNFFKTEITLANGEIRKRPLIETNGETGEIVWDKGRDFATVRKVLSMPQVNIVKKTEVQTGGFSKESILPKRNSDKLIARKKDWDPKKYGGFDSPTVAYSVLVVAKVEKGKSKKLKSVKELLGITIMERSSFEKNPIDFLEAKGYKEVKKDLIIKLPKYSLFELENGRKRMLASAGELQKGNELALPSKYVNFLYLASHYEKLKGSPEDNEQKQLFVEQHKHYLDEIIEQISEFSKRVILADANLDKVLSAYNKHRDKPIREQAENIIHLFTLTNLGAPAAFKYFDTTIDRKRYTSTKEVLDATLIHQSITGLYETRIDLSQLGGDGGEAAAKEAAAKGGLLGRDLLTKLKAQIQFSTEGPQVTWEDRPAMCLVLNLEEEYRLHEKPVPPSIDPSWLQLFPMVWAEKAGMGLANQVPPVVVELKSDASPVAVRQYPMSKEAREGIRPHIQRFLDLGILVPCQSPWNTPLLPVKKPGTNDYRPVQDLREVNKRVQDIHPTVPNPYNLLSSLPPSHTWYSVLDLKDAFFCLKLHPNSQPLFAFEWRDPEKGNTGQLTWTRLPQGFKNSPTLFNEALHRDLASFRALNPQVVMLQYVDDLLVAAPTYRDCKEGTRRLLQELSKLGYRVSAKKAQLCREEVTYLGYLLKGGKRWLTPARKATVMKIPTPTTPRQVREFLGTAGFCRLWIPGFASLAAPLYPLTRPKVPFTWTEAHQEAFGRIKEALLSAPALALPDLTKPFALYVDEKEGVARGVLTQTLGPWRRPVAYLSKKLDPVASGWPTCLKAIAAVALLLKDADKLTLGQNVLVIAPHNLESIVRQPPDRWMTNARMTHYQSLLLNERVSFAPPAILNPATLLPVESDDTPIHICSEILAEETGTRPDLRDQPLPGVPAWYTDGSSFIMDGRRQAGAAIVDNKRTVWASNLPEGTSAQKAELIALTQALRLAEGKSINIYTDSRYAFATAHVHGAIYKQRGWLTSAGKDIKNKEEILALLEAIHLPKRVAIIHCPGHQRGTDPVATGNRKADEAAKQAAQSTRILTETTKNAGKRTADGSEFEKRTADGSEFESPKKKAKVE

SEQ ID NO: 6376 - protein, 2126 aa, synthetic construct
MPAAKRVKLDGGDKKYSIGLDIGTNSVGWAVITDEYKVPSKKFKVLGNTDRHSIKKNLIGALLFDSGETAEATRLKRTARRRYTRRKNRICYLQEIFSNEMAKVDDSFFHRLEESFLVEEDKKHERHPIFGNIVDEVAYHEKYPTIYHLRKKLVDSTDKADLRLIYLALAHMIKFRGHFLIEGDLNPDNSDVDKLFIQLVQTYNQLFEENPINASGVDAKAILSARLSKSRRLENLIAQLPGEKKNGLFGNLIALSLGLTPNFKSNFDLAEDAKLQLSKDTYDDDLDNLLAQIGDQYADLFLAAKNLSDAILLSDILRVNTEITKAPLSASMIKRYDEHHQDLTLLKALVRQQLPEKYKEIFFDQSKNGYAGYIDGGASQEEFYKFIKPILEKMDGTEELLVKLNREDLLRKQRTFDNGSIPHQIHLGELHAILRRQEDFYPFLKDNREKIEKILTFRIPYYVGPLARGNSRFAWMTRKSEETITPWNFEEVVDKGASAQSFIERMTNFDKNLPNEKVLPKHSLLYEYFTVYNELTKVKYVTEGMRKPAFLSGEQKKAIVDLLFKTNRKVTVKQLKEDYFKKIECFDSVEISGVEDRFNASLGTYHDLLKIIKDKDFLDNEENEDILEDIVLTLTLFEDREMIEERLKTYAHLFDDKVMKQLKRRRYTGWGRLSRKLINGIRDKQSGKTILDFLKSDGFANRNFMQLIHDDSLTFKEDIQKAQVSGQGDSLHEHIANLAGSPAIKKGILQTVKVVDELVKVMGRHKPENIVIEMARENQTTQKGQKNSRERMKRIEEGIKELGSQILKEHPVENTQLQNEKLYLYYLQNGRDMYVDQELDINRLSDYDVDHIVPQSFLKDDSIDNKVLTRSDKARGKSDNVPSEEVVKKMKNYWRQLLNAKLITQRKFDNLTKAERGGLSELDKAGFIKRQLVETRQITKHVAQILDSRMNTKYDENDKLIREVKVITLKSKLVSDFRKDFQFYKVREINNYHHAHDAYLNAVVGTALIKKYPKLESEFVYGDYKVYDVRKMIAKSEQEIGKATAKYFFYSNIMNFFKTEITLANGEIRKRPLIETNGETGEIVWDKGRDFATVRKVLSMPQVNIVKKTEVQTGGFSKESILPKRNSDKLIARKKDWDPKKYGGFDSPTVAYSVLVVAKVEKGKSKKLKSVKELLGITIMERSSFEKNPIDFLEAKGYKEVKKDLIIKLPKYSLFELENGRKRMLASAGELQKGNELALPSKYVNFLYLASHYEKLKGSPEDNEQKQLFVEQHKHYLDEIIEQISEFSKRVILADANLDKVLSAYNKHRDKPIREQAENIIHLFTLTNLGAPAAFKYFDTTIDRKRYTSTKEVLDATLIHQSITGLYETRIDLSQLGGDGGEAAAKEAAAKGGLLGRDLLTKLKAQIQFSTEGPQVTWEDRPAMCLVLNLEEEYRLHEKPVPPSIDPSWLQLFPMVWAEKAGMGLANQVPPVVVELKSDASPVAVRQYPMSKEAREGIRPHIQRFLDLGILVPCQSPWNTPLLPVKKPGTNDYRPVQDLREVNKRVQDIHPTVPNPYNLLSSLPPSHTWYSVLDLKDAFFCLKLHPNSQPLFAFEWRDPEKGNTGQLTWTRLPQGFKNSPTLFNEALHRDLASFRALNPQVVMLQYVDDLLVAAPTYRDCKEGTRRLLQELSKLGYRVSAKKAQLCREEVTYLGYLLKGGKRWLTPARKATVMKIPTPTTPRQVREFLGKAGFCRLFIPGFASLAAPLYPLTRPKVPFTWTEAHQEAFGRIKEALLSAPALALPDLTKPFALYVDEKEGVARGVLTQTLGPWRRPVAYLSKKLDPVASGWPTCLKAIAAVALLLKDADKLTLGQNVLVIAPHNLESIVRQPPDRWMTNARMTHYQSLLLNERVSFAPPAILNPATLLPVESDDTPIHICSEILAEETGTRPDLRDQPLPGVPAWYTDGSSFIMDGRRQAGAAIVDNKRTVWASNLPEGTSAQKAELIALTQALRLAEGKSINIYTDSRYAFATAHVHGAIYKQRGWLTSAGKDIKNKEEILALLEAIHLPKRVAIIHCPGHQRGTDPVATGNRKADEAAKQAAQSTRILTETTKNAGKRTADGSEFEKRTADGSEFESPKKKAKVE

SEQ ID NO: 6377 - protein, 2095 aa, synthetic construct
MPAAKRVKLDGGDKKYSIGLDIGTNSVGWAVITDEYKVPSKKFKVLGNTDRHSIKKNLIGALLFDSGETAEATRLKRTARRRYTRRKNRICYLQEIFSNEMAKVDDSFFHRLEESFLVEEDKKHERHPIFGNIVDEVAYHEKYPTIYHLRKKLVDSTDKADLRLIYLALAHMIKFRGHFLIEGDLNPDNSDVDKLFIQLVQTYNQLFEENPINASGVDAKAILSARLSKSRRLENLIAQLPGEKKNGLFGNLIALSLGLTPNFKSNFDLAEDAKLQLSKDTYDDDLDNLLAQIGDQYADLFLAAKNLSDAILLSDILRVNTEITKAPLSASMIKRYDEHHQDLTLLKALVRQQLPEKYKEIFFDQSKNGYAGYIDGGASQEEFYKFIKPILEKMDGTEELLVKLNREDLLRKQRTFDNGSIPHQIHLGELHAILRRQEDFYPFLKDNREKIEKILTFRIPYYVGPLARGNSRFAWMTRKSEETITPWNFEEVVDKGASAQSFIERMTNFDKNLPNEKVLPKHSLLYEYFTVYNELTKVKYVTEGMRKPAFLSGEQKKAIVDLLFKTNRKVTVKQLKEDYFKKIECFDSVEISGVEDRFNASLGTYHDLLKIIKDKDFLDNEENEDILEDIVLTLTLFEDREMIEERLKTYAHLFDDKVMKQLKRRRYTGWGRLSRKLINGIRDKQSGKTILDFLKSDGFANRNFMQLIHDDSLTFKEDIQKAQVSGQGDSLHEHIANLAGSPAIKKGILQTVKVVDELVKVMGRHKPENIVIEMARENQTTQKGQKNSRERMKRIEEGIKELGSQILKEHPVENTQLQNEKLYLYYLQNGRDMYVDQELDINRLSDYDVDHIVPQSFLKDDSIDNKVLTRSDKARGKSDNVPSEEVVKKMKNYWRQLLNAKLITQRKFDNLTKAERGGLSELDKAGFIKRQLVETRQITKHVAQILDSRMNTKYDENDKLIREVKVITLKSKLVSDFRKDFQFYKVREINNYHHAHDAYLNAVVGTALIKKYPKLESEFVYGDYKVYDVRKMIAKSEQEIGKATAKYFFYSNIMNFFKTEITLANGEIRKRPLIETNGETGEIVWDKGRDFATVRKVLSMPQVNIVKKTEVQTGGFSKESILPKRNSDKLIARKKDWDPKKYGGFDSPTVAYSVLVVAKVEKGKSKKLKSVKELLGITIMERSSFEKNPIDFLEAKGYKEVKKDLIIKLPKYSLFELENGRKRMLASAGELQKGNELALPSKYVNFLYLASHYEKLKGSPEDNEQKQLFVEQHKHYLDEIIEQISEFSKRVILADANLDKVLSAYNKHRDKPIREQAENIIHLFTLTNLGAPAAFKYFDTTIDRKRYTSTKEVLDATLIHQSITGLYETRIDLSQLGGDGGEAAAKEAAAKGGTLNLEDEYRLYETSAEPEVSPGSTWLSDFPQAWAETGGMGLAVRQAPLIIPLKATSTPVSIKQYPMSQEAKLGIKPHIQRLLDQGILVPCQSPWNTPLLPVKKPGTNDYRPVQDLREVNKRVEDIHPTVPNPYNLLSGLPPSHRWYTVLDLKDAFFCLRLHPTSQPLFAFEWRDPGMGISGQLTWTRLPQGFKNSPTLFNEALHRDLADFRIQHPDLILLQYVDDILLAATSELDCQQGTRALLLTLGNLGYRASAKKAQLCQKQVKYLGYLLKEGQRWLTEARKETVMGQPTPKTPRQLREFLGKAGFCRLFIPGFAEMAAPLYPLTKPGTLFNWGPDQQKAYQEIKQALLTAPALGLPDLTKPFELFVDEKQGYAKGVLTQKLGPWRRPVAYLSKKLDPVAAGWPPCLRMVAAIAVLRKDAGKLTMGQPLVILAPHAVEALVKQPPDRWLSNARMTHYQAMLLDTDRVQFGPVVALNPATLLPLPEEGAPHDCLEILAETHGTRPDLTDQPIPDADHTWYTDGSSFLQEGQRKAGAAVTTETEVIWARALPAGTSAQRAELIALTQALKMAEGKRLNVYTDSRYAFATAHIHGEIYRRRGWLTSEGREIKNKSEILALLKALFLPKRLSIIHCLGHQKGDSAEARGNRLADQAAREAAIKTPPDTSTLLAGKRTADGSEFEKRTADGSEFESPKKKAKVE

SEQ ID NO: 6378 - protein, 2095 aa, synthetic construct
MPAAKRVKLDGGDKKYSIGLDIGTNSVGWAVITDEYKVPSKKFKVLGNTDRHSIKKNLIGALLFDSGETAEATRLKRTARRRYTRRKNRICYLQEIFSNEMAKVDDSFFHRLEESFLVEEDKKHERHPIFGNIVDEVAYHEKYPTIYHLRKKLVDSTDKADLRLIYLALAHMIKFRGHFLIEGDLNPDNSDVDKLFIQLVQTYNQLFEENPINASGVDAKAILSARLSKSRRLENLIAQLPGEKKNGLFGNLIALSLGLTPNFKSNFDLAEDAKLQLSKDTYDDDLDNLLAQIGDQYADLFLAAKNLSDAILLSDILRVNTEITKAPLSASMIKRYDEHHQDLTLLKALVRQQLPEKYKEIFFDQSKNGYAGYIDGGASQEEFYKFIKPILEKMDGTEELLVKLNREDLLRKQRTFDNGSIPHQIHLGELHAILRRQEDFYPFLKDNREKIEKILTFRIPYYVGPLARGNSRFAWMTRKSEETITPWNFEEVVDKGASAQSFIERMTNFDKNLPNEKVLPKHSLLYEYFTVYNELTKVKYVTEGMRKPAFLSGEQKKAIVDLLFKTNRKVTVKQLKEDYFKKIECFDSVEISGVEDRFNASLGTYHDLLKIIKDKDFLDNEENEDILEDIVLTLTLFEDREMIEERLKTYAHLFDDKVMKQLKRRRYTGWGRLSRKLINGIRDKQSGKTILDFLKSDGFANRNFMQLIHDDSLTFKEDIQKAQVSGQGDSLHEHIANLAGSPAIKKGILQTVKVVDELVKVMGRHKPENIVIEMARENQTTQKGQKNSRERMKRIEEGIKELGSQILKEHPVENTQLQNEKLYLYYLQNGRDMYVDQELDINRLSDYDVDHIVPQSFLKDDSIDNKVLTRSDKARGKSDNVPSEEVVKKMKNYWRQLLNAKLITQRKFDNLTKAERGGLSELDKAGFIKRQLVETRQITKHVAQILDSRMNTKYDENDKLIREVKVITLKSKLVSDFRKDFQFYKVREINNYHHAHDAYLNAVVGTALIKKYPKLESEFVYGDYKVYDVRKMIAKSEQEIGKATAKYFFYSNIMNFFKTEITLANGEIRKRPLIETNGETGEIVWDKGRDFATVRKVLSMPQVNIVKKTEVQTGGFSKESILPKRNSDKLIARKKDWDPKKYGGFDSPTVAYSVLVVAKVEKGKSKKLKSVKELLGITIMERSSFEKNPIDFLEAKGYKEVKKDLIIKLPKYSLFELENGRKRMLASAGELQKGNELALPSKYVNFLYLASHYEKLKGSPEDNEQKQLFVEQHKHYLDEIIEQISEFSKRVILADANLDKVLSAYNKHRDKPIREQAENIIHLFTLTNLGAPAAFKYFDTTIDRKRYTSTKEVLDATLIHQSITGLYETRIDLSQLGGDGGEAAAKEAAAKGGTLGIEDEYRLHETSTEPDVSLGSTWLSDFPQAWAETGGMGLAVRQAPLIIPLKATSTPVSIQQYPMSHEARLGIKPHIQRLLDQGILVPCQSPWNTPLLPVKKPGTNDYRPVQDLREVNKRVEDIHPTVPNPYNLLSGLPPSHQWYTVLDLKDAFFCLRLHPTSQPLFAFEWRDPGMGISGQLTWTRLPQGFKNSPTLFNEALHRDLADFRIQHPDLILLQYVDDILLAATSELDCQQGTRALLQTLGDLGYRASAKKAQICQKQVKYLGYLLREGQRWLTEARKETVMGQPVPKTPRQLREFLGTAGFCRLWIPGFAEMAAPLYPLTKPGTLFSWGPDQQKAYQEIKQALLTAPALGLPDLTKPFELFVDEKQGYAKGVLTQKLGPWRRPVAYLSKKLDPVAAGWPPCLRMVAAIAVLTKDAGKLTMGQPLVILAPHAVEALVKQPPDRWLSNARMTHYQAMLLDTDRVQFGPVVALNPATLLPLPEEGAPHDCLEILAETHGTRPDLTDQPIPDADHTWYTDGSSFLQEGQRKAGAAVTTETEVIWAGALPAGTSAQRAELIALTQALKMAEGKRLNVYTDSRYAFATAHIHGEIYRRRGWLTSEGREIKNKSEILALLKALFLPKRLSIIHCLGHQKGDSAEARGNRLADQAAREAAIKTPPDTSTLLAGKRTADGSEFEKRTADGSEFESPKKKAKVE

SEQ ID NO: 6379 - protein, 2087 aa, synthetic construct
MPAAKRVKLDGGDKKYSIGLDIGTNSVGWAVITDEYKVPSKKFKVLGNTDRHSIKKNLIGALLFDSGETAEATRLKRTARRRYTRRKNRICYLQEIFSNEMAKVDDSFFHRLEESFLVEEDKKHERHPIFGNIVDEVAYHEKYPTIYHLRKKLVDSTDKADLRLIYLALAHMIKFRGHFLIEGDLNPDNSDVDKLFIQLVQTYNQLFEENPINASGVDAKAILSARLSKSRRLENLIAQLPGEKKNGLFGNLIALSLGLTPNFKSNFDLAEDAKLQLSKDTYDDDLDNLLAQIGDQYADLFLAAKNLSDAILLSDILRVNTEITKAPLSASMIKRYDEHHQDLTLLKALVRQQLPEKYKEIFFDQSKNGYAGYIDGGASQEEFYKFIKPILEKMDGTEELLVKLNREDLLRKQRTFDNGSIPHQIHLGELHAILRRQEDFYPFLKDNREKIEKILTFRIPYYVGPLARGNSRFAWMTRKSEETITPWNFEEVVDKGASAQSFIERMTNFDKNLPNEKVLPKHSLLYEYFTVYNELTKVKYVTEGMRKPAFLSGEQKKAIVDLLFKTNRKVTVKQLKEDYFKKIECFDSVEISGVEDRFNASLGTYHDLLKIIKDKDFLDNEENEDILEDIVLTLTLFEDREMIEERLKTYAHLFDDKVMKQLKRRRYTGWGRLSRKLINGIRDKQSGKTILDFLKSDGFANRNFMQLIHDDSLTFKEDIQKAQVSGQGDSLHEHIANLAGSPAIKKGILQTVKVVDELVKVMGRHKPENIVIEMARENQTTQKGQKNSRERMKRIEEGIKELGSQILKEHPVENTQLQNEKLYLYYLQNGRDMYVDQELDINRLSDYDVDHIVPQSFLKDDSIDNKVLTRSDKARGKSDNVPSEEVVKKMKNYWRQLLNAKLITQRKFDNLTKAERGGLSELDKAGFIKRQLVETRQITKHVAQILDSRMNTKYDENDKLIREVKVITLKSKLVSDFRKDFQFYKVREINNYHHAHDAYLNAVVGTALIKKYPKLESEFVYGDYKVYDVRKMIAKSEQEIGKATAKYFFYSNIMNFFKTEITLANGEIRKRPLIETNGETGEIVWDKGRDFATVRKVLSMPQVNIVKKTEVQTGGFSKESILPKRNSDKLIARKKDWDPKKYGGFDSPTVAYSVLVVAKVEKGKSKKLKSVKELLGITIMERSSFEKNPIDFLEAKGYKEVKKDLIIKLPKYSLFELENGRKRMLASAGELQKGNELALPSKYVNFLYLASHYEKLKGSPEDNEQKQLFVEQHKHYLDEIIEQISEFSKRVILADANLDKVLSAYNKHRDKPIREQAENIIHLFTLTNLGAPAAFKYFDTTIDRKRYTSTKEVLDATLIHQSITGLYETRIDLSQLGGDGGEAAAKEAAAKGGLDDEYRLYSPLVKPDQNIQFWLEQFPQAWAETAGMGLAKQVPPQVIQLKASATPVSVRQYPLSKEAQEGIRPHVQRLIQQGILVPVQSPWNTPLLPVRKPGTNDYRPVQDLREVNKRVQDIHPTVPNPYNLLCALPPQRSWYTVLDLKDAFFCLRLHPTSQPLFAFEWRDPGTGRTGQLTWTRLPQGFKNSPTIFNEALHRDLANFRIQHPQVTLLQYVDDLLLAGATKQDCLEGTKALLLELSDLGYRASAKKAQICRREVTYLGYSLRDGQRWLTEARKKTVVQIPAPTTAKQVREFLGKAGFCRLFIPGFATLAAPLYPLTKPKGEFSWAPEHQKAFDAIKKALLSAPALALPDVTKPFTLYVDERKGVARGVLTQTLGPWRRPVAYLSKKLDPVASGWPVCLKAIAAVAILVKDADKLTLGQNITVIAPHALENIVRQPPDRWMTNARMTHYQSLLLTERVTFAPPAALNPATLLPEETDEPVTHDCHQLLIEETGVRKDLTDIPLTGEVLTWFTDGSSYVVEGKRMAGAAVVDGTRTIWASSLPEGTSAQKAELMALTQALRLAEGKSINIYTDSRYAFATAHVHGAIYKQRGWLTSAGREIKNKEEILSLLEALHLPKRLAIIHCPGHQKAKDPISRGNQMADRVAKQAAQGVNLLPAGKRTADGSEFEKRTADGSEFESPKKKAKVE

SEQ ID NO: 6380 - protein, 2089 aa, synthetic construct
MPAAKRVKLDGGDKKYSIGLDIGTNSVGWAVITDEYKVPSKKFKVLGNTDRHSIKKNLIGALLFDSGETAEATRLKRTARRRYTRRKNRICYLQEIFSNEMAKVDDSFFHRLEESFLVEEDKKHERHPIFGNIVDEVAYHEKYPTIYHLRKKLVDSTDKADLRLIYLALAHMIKFRGHFLIEGDLNPDNSDVDKLFIQLVQTYNQLFEENPINASGVDAKAILSARLSKSRRLENLIAQLPGEKKNGLFGNLIALSLGLTPNFKSNFDLAEDAKLQLSKDTYDDDLDNLLAQIGDQYADLFLAAKNLSDAILLSDILRVNTEITKAPLSASMIKRYDEHHQDLTLLKALVRQQLPEKYKEIFFDQSKNGYAGYIDGGASQEEFYKFIKPILEKMDGTEELLVKLNREDLLRKQRTFDNGSIPHQIHLGELHAILRRQEDFYPFLKDNREKIEKILTFRIPYYVGPLARGNSRFAWMTRKSEETITPWNFEEVVDKGASAQSFIERMTNFDKNLPNEKVLPKHSLLYEYFTVYNELTKVKYVTEGMRKPAFLSGEQKKAIVDLLFKTNRKVTVKQLKEDYFKKIECFDSVEISGVEDRFNASLGTYHDLLKIIKDKDFLDNEENEDILEDIVLTLTLFEDREMIEERLKTYAHLFDDKVMKQLKRRRYTGWGRLSRKLINGIRDKQSGKTILDFLKSDGFANRNFMQLIHDDSLTFKEDIQKAQVSGQGDSLHEHIANLAGSPAIKKGILQTVKVVDELVKVMGRHKPENIVIEMARENQTTQKGQKNSRERMKRIEEGIKELGSQILKEHPVENTQLQNEKLYLYYLQNGRDMYVDQELDINRLSDYDVDHIVPQSFLKDDSIDNKVLTRSDKARGKSDNVPSEEVVKKMKNYWRQLLNAKLITQRKFDNLTKAERGGLSELDKAGFIKRQLVETRQITKHVAQILDSRMNTKYDENDKLIREVKVITLKSKLVSDFRKDFQFYKVREINNYHHAHDAYLNAVVGTALIKKYPKLESEFVYGDYKVYDVRKMIAKSEQEIGKATAKYFFYSNIMNFFKTEITLANGEIRKRPLIETNGETGEIVWDKGRDFATVRKVLSMPQVNIVKKTEVQTGGFSKESILPKRNSDKLIARKKDWDPKKYGGFDSPTVAYSVLVVAKVEKGKSKKLKSVKELLGITIMERSSFEKNPIDFLEAKGYKEVKKDLIIKLPKYSLFELENGRKRMLASAGELQKGNELALPSKYVNFLYLASHYEKLKGSPEDNEQKQLFVEQHKHYLDEIIEQISEFSKRVILADANLDKVLSAYNKHRDKPIREQAENIIHLFTLTNLGAPAAFKYFDTTIDRKRYTSTKEVLDATLIHQSITGLYETRIDLSQLGGDGGEAAAKEAAAKGGTLQLDDEYRLYSPLVKPDQNIQFWLEQFPQAWAETAGMGLAKQVPPQVIQLKASATPVSVRQYPLSKEAQEGIRPHVQRLIQQGILVPVQSPWNTPLLPVRKPGTNDYRPVQDLREVNKRVQDIHPTVPNPYNLLCALPPQRSWYTVLDLKDAFFCLRLHPTSQPLFAFEWRDPGTGRTGQLTWTRLPQGFKNSPTIFDEALHRDLANFRIQHPQVTLLQYVDDLLLAGATKQDCLEGTKALLLELSDLGYRASAKKAQICRREVTYLGYSLRDGQRWLTEARKKTVVQIPAPTTAKQVREFLGTAGFCRLWIPGFATLAAPLYPLTKEKGEFSWAPEHQKAFDAIKKALLSAPALALPDVTKPFTLYVDERKGVARGVLTQTLGPWRRPVAYLSKKLDPVASGWPVCLKAIAAVAILVKDADKLTLGQNITVIAPHALENIVRQPPDRWMTNARMTHYQSLLLTERVTFAPPAALNPATLLPEETDEPVTHDCHQLLIEETGVRKDLTDIPLTGEVLTWFTDGSSYVVEGKRMAGAAVVDGTRTIWASSLPEGTSAQKAELMALTQALRLAEGKSINIYTDSRYAFATAHVHGAIYKQRGLLTSAGREIKNKEEILSLLEALHLPKRLAIIHCPGHQKAKDPISRGNQMADRVAKQAAQGVNLLAGKRTADGSEFEKRTADGSEFESPKKKAKVE

SEQ ID NO: 6381 - protein, 2087 aa, synthetic construct; identical to SEQ ID NO: 6379

SEQ ID NO: 6382 - protein, 2175 aa, synthetic construct
MPAAKRVKLDGGDKKYSIGLDIGTNSVGWAVITDEYKVPSKKFKVLGNTDRHSIKKNLIGALLFDSGETAEATRLKRTARRRYTRRKNRICYLQEIFSNEMAKVDDSFFHRLEESFLVEEDKKHERHPIFGNIVDEVAYHEKYPTIYHLRKKLVDSTDKADLRLIYLALAHMIKFRGHFLIEGDLNPDNSDVDKLFIQLVQTYNQLFEENPINASGVDAKAILSARLSKSRRLENLIAQLPGEKKNGLFGNLIALSLGLTPNFKSNFDLAEDAKLQLSKDTYDDDLDNLLAQIGDQYADLFLAAKNLSDAILLSDILRVNTEITKAPLSASMIKRYDEHHQDLTLLKALVRQQLPEKYKEIFFDQSKNGYAGYIDGGASQEEFYKFIKPILEKMDGTEELLVKLNREDLLRKQRTFDNGSIPHQIHLGELHAILRRQEDFYPFLKDNREKIEKILTFRIPYYVGPLARGNSRFAWMTRKSEETITPWNFEEVVDKGASAQSFIERMTNFDKNLPNEKVLPKHSLLYEYFTVYNELTKVKYVTEGMRKPAFLSGEQKKAIVDLLFKTNRKVTVKQLKEDYFKKIECFDSVEISGVEDRFNASLGTYHDLLKIIKDKDFLDNEENEDILEDIVLTLTLFEDREMIEERLKTYAHLFDDKVMKQLKRRRYTGWGRLSRKLINGIRDKQSGKTILDFLKSDGFANRNFMQLIHDDSLTFKEDIQKAQVSGQGDSLHEHIANLAGSPAIKKGILQTVKVVDELVKVMGRHKPENIVIEMARENQTTQKGQKNSRERMKRIEEGIKELGSQILKEHPVENTQLQNEKLYLYYLQNGRDMYVDQELDINRLSDYDVDHIVPQSFLKDDSIDNKVLTRSDKARGKSDNVPSEEVVKKMKNYWRQLLNAKLITQRKFDNLTKAERGGLSELDKAGFIKRQLVETRQITKHVAQILDSRMNTKYDENDKLIREVKVITLKSKLVSDFRKDFQFYKVREINNYHHAHDAYLNAVVGTALIKKYPKLESEFVYGDYKVYDVRKMIAKSEQEIGKATAKYFFYSNIMNFFKTEITLANGEIRKRPLIETNGETGEIVWDKGRDFATVRKVLSMPQVNIVKKTEVQTGGFSKESILPKRNSDKLIARKKDWDPKKYGGFDSPTVAYSVLVVAKVEKGKSKKLKSVKELLGITIMERSSFEKNPIDFLEAKGYKEVKKDLIIKLPKYSLFELENGRKRMLASAGELQKGNELALPSKYVNFLYLASHYEKLKGSPEDNEQKQLFVEQHKHYLDEIIEQISEFSKRVILADANLDKVLSAYNKHRDKPIREQAENIIHLFTLTNLGAPAAFKYFDTTIDRKRYTSTKEVLDATLIHQSITGLYETRIDLSQLGGDGGEAAAKEAAAKGGMDPLQLLQPLEAEIKGTKLKAHWNSGATITCVPQAFLEEEVPIKNIWIKTIHGEKEQPVYYLTFKIQGRKVEAEVISSPYDYILVSPSDIPWLMKKPLQLTTLVPLQEYEERLLKQTMLTGSYKEKLQSLFLKYDALWQHWENQVGHRRIKPHHIATGTVNPRPQKQYPINPKAKASIQTVINDLLKQGVLIQQNSIMNTPVYPVPKPDGKWRMVLDYREVNKTIPLIAAQNQHSAGILSSIFRGKYKTTLDLSNGFWAHSITPESYWLTAFTWLGQQYCWTRLPQGFLNSPALFNADVVDLLKEVPNVQVYVDDIYISHDDPREHLEQLEKVFSLLLNAGYVVSLKKSEIAQHEVEFLGFNITKEGRGLTETFKQKLLNITPPRDLKQLQSILGKLNFARNFIPNFSELVKPLYNIIATAPGKYITWTTDNSQQLQNIISMLNSAENLEERNPEVRLIMKVNTSPSAGYIRFYNEFAKRPIMYLNYVYTKAEVKFTNTEKLLTTIHKGLIKALDLGMGQEILVYSPIVSMTKIQKTPLPERKALPIRWITWMSYLEDPRIQFHYDKTLPELQQVPTVTDDIIAKIKHPSEFSMVFYTDGSAIKHPNVNKSHNAGMGIAQVQFKPEFTVINTWSIPLGDHTAQLAEVAAVEFACKKALKIDGPVLIVTDSFYVAESVNKELPYWQSNGFFNNKKKPLKHVSKWKSIADCIQLKPDIIIIHEKGHQPTASTFHTEGNNLADKLATQGSYVVNAGKRTADGSEFEKRTADGSEFESPKKKAKVE

SEQ ID NO: 6383 - protein, 2095 aa, synthetic construct
MPAAKRVKLDGGDKKYSIGLDIGTNSVGWAVITDEYKVPSKKFKVLGNTDRHSIKKNLIGALLFDSGETAEATRLKRTARRRYTRRKNRICYLQEIFSNEMAKVDDSFFHRLEESFLVEEDKKHERHPIFGNIVDEVAYHEKYPTIYHLRKKLVDSTDKADLRLIYLALAHMIKFRGHFLIEGDLNPDNSDVDKLFIQLVQTYNQLFEENPINASGVDAKAILSARLSKSRRLENLIAQLPGEKKNGLFGNLIALSLGLTPNFKSNFDLAEDAKLQLSKDTYDDDLDNLLAQIGDQYADLFLAAKNLSDAILLSDILRVNTEITKAPLSASMIKRYDEHHQDLTLLKALVRQQLPEKYKEIFFDQSKNGYAGYIDGGASQEEFYKFIKPILEKMDGTEELLVKLNREDLLRKQRTFDNGSIPHQIHLGELHAILRRQEDFYPFLKDNREKIEKILTFRIPYYVGPLARGNSRFAWMTRKSEETITPWNFEEVVDKGASAQSFIERMTNFDKNLPNEKVLPKHSLLYEYFTVYNELTKVKYVTEGMRKPAFLSGEQKKAIVDLLFKTNRKVTVKQLKEDYFKKIECFDSVEISGVEDRFNASLGTYHDLLKIIKDKDFLDNEENEDILEDIVLTLTLFEDREMIEERLKTYAHLFDDKVMKQLKRRRYTGWGRLSRKLINGIRDKQSGKTILDFLKSDGFANRNFMQLIHDDSLTFKEDIQKAQVSGQGDSLHEHIANLAGSPAIKKGILQTVKVVDELVKVMGRHKPENIVIEMARENQTTQKGQKNSRERMKRIEEGIKELGSQILKEHPVENTQLQNEKLYLYYLQNGRDMYVDQELDINRLSDYDVDHIVPQSFLKDDSIDNKVLTRSDKARGKSDNVPSEEVVKKMKNYWRQLLNAKLITQRKFDNLTKAERGGLSELDKAGFIKRQLVETRQITKHVAQILDSRMNTKYDENDKLIREVKVITLKSKLVSDFRKDFQFYKVREINNYHHAHDAYLNAVVGTALIKKYPKLESEFVYGDYKVYDVRKMIAKSEQEIGKATAKYFFYSNIMNFFKTEITLANGEIRKRPLIETNGETGEIVWDKGRDFATVRKVLSMPQVNIVKKTEVQTGGFSKESILPKRNSDKLIARKKDWDPKKYGGFDSPTVAYSVLVVAKVEKGKSKKLKSVKELLGITIMERSSFEKNPIDFLEAKGYKEVKKDLIIKLPKYSLFELENGRKRMLASAGELQKGNELALPSKYVNFLYLASHYEKLKGSPEDNEQKQLFVEQHKHYLDEIIEQISEFSKRVILADANLDKVLSAYNKHRDKPIREQAENIIHLFTLTNLGAPAAFKYFDTTIDRKRYTSTKEVLDATLIHQSITGLYETRIDLSQLGGDGGEAAAKEAAAKGGTLNIEDEYRLHETSKEPDVPLGSTWLSDFPQAWAETGGMGLAVRQAPLIIPLKATSTPVSIKQYPMSQEARLGIKPHIQRLLDQGILVPCQSPWNTPLLPVKKPGTNDYRPVQDLREVNKRVEDIHPTVPNPYNLLSGLPPSHQWYTVLDLKDAFFCLRLHPTSQPLFAFEWRDPEMGISGQLTWTRLPQGFKNSPTLFNEALHRDLADFRIQHPDLILLQYVDDLLLAATSEQDCQRGTRALLQTLGNLGYRASAKKAQICQKQVKYLGYLLKEGQRWLTEARKETVMGQPTPKTPRQLREFLGKAGFCRLFIPGFAEMAAPLYPLTKPGTLFNWGPDQQKAYQEIKQALLTAPALGLPDLTKPFELFVDEKQGYAKGVLTQKLGPWRRPVAYLSKKLDPVAAGWPPCLRMVAAIAVLTKDAGKLTMGQPLVILAPHAVEALVKQPPDRWLSNARMTHYQAMLLDTDRVQFGPVVALNPATLLPLPEKEAPHDCLEILAETHGTRPDLTDQPIPDADYTWYTDGSSFLQEGQRRAGAAVTTETEVIWARALPAGTSAQRAELIALTQALKMAEGKKLNVYTDSRYAFATAHVHGEIYRRRGWLTSEGREIKNKNEILALLKALFLPKRLSIIHCPGHQKGNSAEARGNRMADQAAREAAMKAVLETSTLLAGKRTADGSEFEKRTADGSEFESPKKKAKVE

SEQ ID NO: 6384 - protein, 2102 aa, synthetic construct
MPAAKRVKLDGGDKKYSIGLDIGTNSVGWAVITDEYKVPSKKFKVLGNTDRHSIKKNLIGALLFDSGETAEATRLKRTARRRYTRRKNRICYLQEIFSNEMAKVDDSFFHRLEESFLVEEDKKHERHPIFGNIVDEVAYHEKYPTIYHLRKKLVDSTDKADLRLIYLALAHMIKFRGHFLIEGDLNPDNSDVDKLFIQLVQTYNQLFEENPINASGVDAKAILSARLSKSRRLENLIAQLPGEKKNGLFGNLIALSLGLTPNFKSNFDLAEDAKLQLSKDTYDDDLDNLLAQIGDQYADLFLAAKNLSDAILLSDILRVNTEITKAPLSASMIKRYDEHHQDLTLLKALVRQQLPEKYKEIFFDQSKNGYAGYIDGGASQEEFYKFIKPILEKMDGTEELLVKLNREDLLRKQRTFDNGSIPHQIHLGELHAILRRQEDFYPFLKDNREKIEKILTFRIPYYVGPLARGNSRFAWMTRKSEETITPWNFEEVVDKGASAQSFIERMTNFDKNLPNEKVLPKHSLLYEYFTVYNELTKVKYVTEGMRKPAFLSGEQKKAIVDLLFKTNRKVTVKQLKEDYFKKIECFDSVEISGVEDRFNASLGTYHDLLKIIKDKDFLDNEENEDILEDIVLTLTLFEDREMIEERLKTYAHLFDDKVMKQLKRRRYTGWGRLSRKLINGIRDKQSGKTILDFLKSDGFANRNFMQLIHDDSLTFKEDIQKAQVSGQGDSLHEHIANLAGSPAIKKGILQTVKVVDELVKVMGRHKPENIVIEMARENQTTQKGQKNSRERMKRIEEGIKELGSQILKEHPVENTQLQNEKLYLYYLQNGRDMYVDQELDINRLSDYDVDHIVPQSFLKDDSIDNKVLTRSDKARGKSDNVPSEEVVKKMKNYWRQLLNAKLITQRKFDNLTKAERGGLSELDKAGFIKRQLVETRQITKHVAQILDSRMNTKYDENDKLIREVKVITLKSKLVSDFRKDFQFYKVREINNYHHAHDAYLNAVVGTALIKKYPKLESEFVYGDYKVYDVRKMIAKSEQEIGKATAKYFFYSNIMNFFKTEITLANGEIRKRPLIETNGETGEIVWDKGRDFATVRKVLSMPQVNIVKKTEVQTGGFSKESILPKRNSDKLIARKKDWDPKKYGGFDSPTVAYSVLVVAKVEKGKSKKLKSVKELLGITIMERSSFEKNPIDFLEAKGYKEVKKDLIIKLPKYSLFELENGRKRMLASAGELQKGNELALPSKYVNFLYLASHYEKLKGSPEDNEQKQLFVEQHKHYLDEIIEQISEFSKRVILADANLDKVLSAYNKHRDKPIREQAENIIHLFTLTNLGAPAAFKYFDTTIDRKRYTSTKEVLDATLIHQSITGLYETRIDLSQLGGDGGEAAAKEAAAKEAAAKGGTAPLEEEYRLFLEAPIQNVTLLEQWKREIPKVWAEINPPGLASTQAPIHVQLLSTALPVRVRQYPITLEAKRSLRETIRKFRAAGILRPVHSPWNTPLLPVRKSGTSEYRMVQDLREVNKRVETIHPTVPNPYTLLSLLPPDRIWYSVLDLKDAFFCIPLAPESQLIFAFEWADAEEGESGQLTWTRLPQGFKNSPTLFNEALNRDLQGFRLDHPSVSLLQYVDDLLIAADTQAACLSATRDLLMTLAELGYRVSGKKAQLCQEEVTYLGFKIHKGSRSLSNSRTQAILQIPVPKTKRQVREFLGTIGYCRLWIPGFAELAQPLYAATRPGNDPLVWGEKEEEAFQSLKLALTQPPALALPSLDKPFQLFVEETSGAAKGVLTQALGPWKRPVAYLSKRLDPVAAGWPRCLRAIAAAALLTREASKLTFGQDIEITSSHNLESLLRSPPDKWLTNARITQYQVLLLDPPRVRFKQTAALNPATLLPETDDTLPIHHCLDTLDSLTSTRPDLTDQPLAQAEATLFTDGSSYIRDGKRYAGAAVVTLDSVIWAEPLPIGTSAQKAELIALTKALEWSKDKSVNIYTDSRYAFATLHVHGMIYRERGWLTAGGKAIKNAPEILALLTAVWLPKRVAVMHCKGHQKDDAPTSTGNRRADEVAREVAIRPLSTQATISAGKRTADGSEFEKRTADGSEFESPKKKAKVE

SEQ ID NO: 6385 - protein, 2102 aa, synthetic construct
MPAAKRVKLDGGDKKYSIGLDIGTNSVGWAVITDEYKVPSKKFKVLGNTDRHSIKKNLIGALLFDSGETAEATRLKRTARRRYTRRKNRICYLQEIFSNEMAKVDDSFFHRLEESFLVEEDKKHERHPIFGNIVDEVAYHEKYPTIYHLRKKLVDSTDKADLRLIYLALAHMIKFRGHFLIEGDLNPDNSDVDKLFIQLVQTYNQLFEENPINASGVDAKAILSARLSKSRRLENLIAQLPGEKKNGLFGNLIALSLGLTPNFKSNFDLAEDAKLQLSKDTYDDDLDNLLAQIGDQYADLFLAAKNLSDAILLSDILRVNTEITKAPLSASMIKRYDEHHQDLTLLKALVRQQLPEKYKEIFFDQSKNGYAGYIDGGASQEEFYKFIKPILEKMDGTEELLVKLNREDLLRKQRTFDNGSIPHQIHLGELHAILRRQEDFYPFLKDNREKIEKILTFRIPYYVGPLARGNSRFAWMTRKSEETITPWNFEEVVDKGASAQSFIERMTNFDKNLPNEKVLPKHSLLYEYFTVYNELTKVKYVTEGMRKPAFLSGEQKKAIVDLLFKTNRKVTVKQLKEDYFKKIECFDSVEISGVEDRFNASLGTYHDLLKIIKDKDFLDNEENEDILEDIVLTLTLFEDREMIEERLKTYAHLFDDKVMKQLKRRRYTGWGRLSRKLINGIRDKQSGKTILDFLKSDGFANRNFMQLIHDDSLTFKEDIQKAQVSGQGDSLHEHIANLAGSPAIKKGILQTVKVVDELVKVMGRHKPENIVIEMARENQTTQKGQKNSRERMKRIEEGIKELGSQILKEHPVENTQLQNEKLYLYYLQNGRDMYVDQELDINRLSDYDVDHIVPQSFLKDDSIDNKVLTRSDKARGKSDNVPSEEVVKKMKNYWRQLLNAKLITQRKFDNLTKAERGGLSELDKAGFIKRQLVETRQITKHVAQILDSRMNTKYDENDKLIREVKVITLKSKLVSDFRKDFQFYKVREINNYHHAHDAYLNAVVGTALIKKYPKLESEFVYGDYKVYDVRKMIAKSEQEIGKATAKYFFYSNIMNFFKTEITLANGEIRKRPLIETNGETGEIVWDKGRDFATVRKVLSMPQVNIVKKTEVQTGGFSKESILPKRNSDKLIARKKDWDPKKYGGFDSPTVAYSVLVVAKVEKGKSKKLKSVKELLGITIMERSSFEKNPIDFLEAKGYKEVKKDLIIKLPKYSLFELENGRKRMLASAGELQKGNELALPSKYVNFLYLASHYEKLKGSPEDNEQKQLFVEQHKHYLDEIIEQISEFSKRVILADANLDKVLSAYNKHRDKPIREQAENIIHLFTLTNLGAPAAFKYFDTTIDRKRYTSTKEVLDATLIHQSITGLYETRIDLSQLGGDGGEAAAKEAAAKEAAAKGGTAPLEEEYRLFLEAPIQNVTLLEQWKREIPKVWAEINPPGLASTQAPIHVQLLSTALPVRVRQYPITLEAKRSLRETIRKFRAAGILRPVHSPWNTPLLPVRKSGTSEYRMVQDLREVNKRVETIHPTVPNPYTLLSLLPPDRIWYSVLDLKDAFFCIPLAPESQLIFAFEWADAEEGESGQLTWTRLPQGFKNSPTLFNEALNRDLQGFRLDHPSVSLLQYVDDLLIAADTQAACLSATRDLLMTLAELGYRVSGKKAQLCQEEVTYLGFKIHKGSRSLSNSRTQAILQIPVPKTKRQVREFLGKIGYCRLFIPGFAELAQPLYAATRPGNDPLVWGEKEEEAFQSLKLALTQPPALALPSLDKPFQLFVEETSGAAKGVLTQALGPWKRPVAYLSKRLDPVAAGWPRCLRAIAAAALLTREASKLTFGQDIEITSSHNLESLLRSPPDKWLTNARITQYQVLLLDPPRVRFKQTAALNPATLLPETDDTLPIHHCLDTLDSLTSTRPDLTDQPLAQAEATLFTDGSSYIRDGKRYAGAAVVTLDSVIWAEPLPIGTSAQKAELIALTKALEWSKDKSVNIYTDSRYAFATLHVHGMIYRERGWLTAGGKAIKNAPEILALLTAVWLPKRVAVMHCKGHQKDDAPTSTGNRRADEVAREVAIRPLSTQATISAGKRTADGSEFEKRTADGSEFESPKKKAKVE

SEQ ID NO: 6386 - protein, 2106 aa, synthetic construct
MPAAKRVKLDGGDKKYSIGLDIGTNSVGWAVITDEYKVPSKKFKVLGNTDRHSIKKNLIGALLFDSGETAEATRLKRTARRRYTRRKNRICYLQEIFSNEMAKVDDSFFHRLEESFLVEEDKKHERHPIFGNIVDEVAYHEKYPTIYHLRKKLVDSTDKADLRLIYLALAHMIKFRGHFLIEGDLNPDNSDVDKLFIQLVQTYNQLFEENPINASGVDAKAILSARLSKSRRLENLIAQLPGEKKNGLFGNLIALSLGLTPNFKSNFDLAEDAKLQLSKDTYDDDLDNLLAQIGDQYADLFLAAKNLSDAILLSDILRVNTEITKAPLSASMIKRYDEHHQDLTLLKALVRQQLPEKYKEIFFDQSKNGYAGYIDGGASQEEFYKFIKPILEKMDGTEELLVKLNREDLLRKQRTFDNGSIPHQIHLGELHAILRRQEDFYPFLKDNREKIEKILTFRIPYYVGPLARGNSRFAWMTRKSEETITPWNFEEVVDKGASAQSFIERMTNFDKNLPNEKVLPKHSLLYEYFTVYNELTKVKYVTEGMRKPAFLSGEQKKAIVDLLFKTNRKVTVKQLKEDYFKKIECFDSVEISGVEDRFNASLGTYHDLLKIIKDKDFLDNEENEDILEDIVLTLTLFEDREMIEERLKTYAHLFDDKVMKQLKRRRYTGWGRLSRKLINGIRDKQSGKTILDFLKSDGFANRNFMQLIHDDSLTFKEDIQKAQVSGQGDSLHEHIANLAGSPAIKKGILQTVKVVDELVKVMGRHKPENIVIEMARENQTTQKGQKNSRERMKRIEEGIKELGSQILKEHPVENTQLQNEKLYLYYLQNGRDMYVDQELDINRLSDYDVDHIVPQSFLKDDSIDNKVLTRSDKARGKSDNVPSEEVVKKMKNYWRQLLNAKLITQRKFDNLTKAERGGLSELDKAGFIKRQLVETRQITKHVAQILDSRMNTKYDENDKLIREVKVITLKSKLVSDFRKDFQFYKVREINNYHHAHDAYLNAVVGTALIKKYPKLESEFVYGDYKVYDVRKMIAKSEQEIGKATAKYFFYSNIMNFFKTEITLANGEIRKRPLIETNGETGEIVWDKGRDFATVRKVLSMPQVNIVKKTEVQTGGFSKESILPKRNSDKLIARKKDWDPKKYGGFDSPTVAYSVLVVAKVEKGKSKKLKSVKELLGITIMERSSFEKNPIDFLEAKGYKEVKKDLIIKLPKYSLFELENGRKRMLASAGELQKGNELALPSKYVNFLYLASHYEKLKGSPEDNEQKQLFVEQHKHYLDEIIEQISEFSKRVILADANLDKVLSAYNKHRDKPIREQAENIIHLFTLTNLGAPAAFKYFDTTIDRKRYTSTKEVLDATLIHQSITGLYETRIDLSQLGGDGGEAAAKEAAAKEAAAKGGTVSLQDEHRLFDIPVTTSLPDVWLQDFPQAWAETGGLGRAKCQAPIIIDLKPTAVPVSIKQYPMSLEAHMGIRQHIIKFLELGVLRPCRSPWNTPLLPVKKPGTQDYRPVQDLREINKRTVDIHPTVPNPYNLLSTLKPDYSWYTVLDLKDAFFCLPLAPQSQELFAFEWKDPERGISGQLTWTRLPQGFKNSPTLFNEALHRDLTDFRTQHPEVTLLQYVDDLLLAAPTKKACTQGTRHLLQELGEKGYRASAKKAQICQTKVTYLGYILSEGKRWLTPGRIETVARIPPPRNPREVREFLGTAGFCRLWIPGFAELAAPLYALTKPSTPFTWQTEHQLAFEALKKALLSAPALGLPDTSKPFTLFLDERQGIAKGVLTQKLGPWKRPVAYLSKKLDPVAAGWPPCLRIMAATAMLVKDSAKLTLGQPLTVITPHTLEAIVRQPPDRWITNARLTHYQALLLDTDRVQFGPPVTLNPATLLPVPENQPSPHDCRQVLAETHGTREDLKDQELPDADHTWYTDGSSYLDSGTRRAGAAVVDGHNTIWAQSLPPGTSAQKAELIALTKALELSKGKKANIYTDSRYAFATAHTHGSIYERRGWLTSEGKEIKNKAEIIALLKALFLPQEVAIIHCPGHQKGQDPVAVGNRQADRVARQAAMAEVLTLATEPDNTSHITAGKRTADGSEFEKRTADGSEFESPKKKAKVE

SEQ ID NO: 6387 - protein, 2091 aa, synthetic construct
MPAAKRVKLDGGDKKYSIGLDIGTNSVGWAVITDEYKVPSKKFKVLGNTDRHSIKKNLIGALLFDSGETAEATRLKRTARRRYTRRKNRICYLQEIFSNEMAKVDDSFFHRLEESFLVEEDKKHERHPIFGNIVDEVAYHEKYPTIYHLRKKLVDSTDKADLRLIYLALAHMIKFRGHFLIEGDLNPDNSDVDKLFIQLVQTYNQLFEENPINASGVDAKAILSARLSKSRRLENLIAQLPGEKKNGLFGNLIALSLGLTPNFKSNFDLAEDAKLQLSKDTYDDDLDNLLAQIGDQYADLFLAAKNLSDAILLSDILRVNTEITKAPLSASMIKRYDEHHQDLTLLKALVRQQLPEKYKEIFFDQSKNGYAGYIDGGASQEEFYKFIKPILEKMDGTEELLVKLNREDLLRKQRTFDNGSIPHQIHLGELHAILRRQEDFYPFLKDNREKIEKILTFRIPYYVGPLARGNSRFAWMTRKSEETITPWNFEEVVDKGASAQSFIERMTNFDKNLPNEKVLPKHSLLYEYFTVYNELTKVKYVTEGMRKPAFLSGEQKKAIVDLLFKTNRKVTVKQLKEDYFKKIECFDSVEISGVEDRFNASLGTYHDLLKIIKDKDFLDNEENEDILEDIVLTLTLFEDREMIEERLKTYAHLFDDKVMKQLKRRRYTGWGRLSRKLINGIRDKQSGKTILDFLKSDGFANRNFMQLIHDDSLTFKEDIQKAQVSGQGDSLHEHIANLAGSPAIKKGILQTVKVVDELVKVMGRHKPENIVIEMARENQTTQKGQKNSRERMKRIEEGIKELGSQILKEHPVENTQLQNEKLYLYYLQNGRDMYVDQELDINRLSDYDVDHIVPQSFLKDDSIDNKVLTRSDKARGKSDNVPSEEVVKKMKNYWRQLLNAKLITQRKFDNLTKAERGGLSELDKAGFIKRQLVETRQITKHVAQILDSRMNTKYDENDKLIREVKVITLKSKLVSDFRKDFQFYKVREINNYHHAHDAYLNAVVGTALIKKYPKLESEFVYGDYKVYDVRKMIAKSEQEIGKATAKYFFYSNIMNFFKTEITLANGEIRKRPLIETNGETGEIVWDKGRDFATVRKVLSMPQVNIVKKTEVQTGGFSKESILPKRNSDKLIARKKDWDPKKYGGFDSPTVAYSVLVVAKVEKGKSKKLKSVKELLGITIMERSSFEKNPIDFLEAKGYKEVKKDLIIKLPKYSLFELENGRKRMLASAGELQKGNELALPSKYVNFLYLASHYEKLKGSPEDNEQKQLFVEQHKHYLDEIIEQISEFSKRVILADANLDKVLSAYNKHRDKPIREQAENIIHLFTLTNLGAPAAFKYFDTTIDRKRYTSTKEVLDATLIHQSITGLYETRIDLSQLGGDGGEAAAKEAAAKEAAAKGGVPWILKKPLELTIKLDLEEQQGTLLNNSILSKKGKEELKQLFEKYSALWQSWENQVGHRRIRPHKIATGTVKPTPQKQYHINPKAKPDIQIVINDLLKQGVLIQKESTMNTPVYPVPKPNGRWRMVLDYRAVNKVTPLIAVQNQHSYGILGSLFKGRYKTTIDLSNGFWAHPIVPEDYWITAFTWQGKQYCWTVLPQGFLNSPGLFTGDVVDLLQGIPNVEVYVDDVYISHDSEKEHLEYLDILFNRLKEAGYIISLKKSNIANSIVDFLGFQITNEGRGLTDTFKEKLENITAPTTLKQLQSILGLLNFARNFIPDFTELIAPLYALIPKSTKNYVPWQIEHSTTLETLITKLNGAEYLQGRKGDKTLIMKVNASYTTGYIRYYNEGEKKPISYVSIVFSKTELKFTELEKLLTTVHKGLLKALDLSMGQNIHVYSPIVSMQNIQKTPQTAKKALASRWLSWLSYLEDPRIRFFYDPQMPALKDLPAVDTGKDNKKHPSNFQHIFYTDGSAITSPTKEGHLNAGMGIVYFINKDGNLQKQQEWSISLGNHTAQFAEIAAFEFALKKCLPLGGNILVVTDSNYVAKAYNEELDVWASNGFVNNRKKPLKHISKWKSVADLKRLRPDVVVTHEPGHQKLDSSPHAYGNNLADQLATQASFKVHAGKRTADGSEFEKRTADGSEFESPKKKAKVE

SEQ ID NO: 6388 - protein, 2091 aa, synthetic construct
MPAAKRVKLDGGDKKYSIGLDIGTNSVGWAVITDEYKVPSKKFKVLGNTDRHSIKKNLIGALLFDSGETAEATRLKRTARRRYTRRKNRICYLQEIFSNEMAKVDDSFFHRLEESFLVEEDKKHERHPIFGNIVDEVAYHEKYPTIYHLRKKLVDSTDKADLRLIYLALAHMIKFRGHFLIEGDLNPDNSDVDKLFIQLVQTYNQLFEENPINASGVDAKAILSARLSKSRRLENLIAQLPGEKKNGLFGNLIALSLGLTPNFKSNFDLAEDAKLQLSKDTYDDDLDNLLAQIGDQYADLFLAAKNLSDAILLSDILRVNTEITKAPLSASMIKRYDEHHQDLTLLKALVRQQLPEKYKEIFFDQSKNGYAGYIDGGASQEEFYKFIKPILEKMDGTEELLVKLNREDLLRKQRTFDNGSIPHQIHLGELHAILRRQEDFYPFLKDNREKIEKILTFRIPYYVGPLARGNSRFAWMTRKSEETITPWNFEEVVDKGASAQSFIERMTNFDKNLPNEKVLPKHSLLYEYFTVYNELTKVKYVTEGMRKPAFLSGEQKKAIVDLLFKTNRKVTVKQLKEDYFKKIECFDSVEISGVEDRFNASLGTYHDLLKIIKDKDFLDNEENEDILEDIVLTLTLFEDREMIEERLKTYAHLFDDKVMKQLKRRRYTGWGRLSRKLINGIRDKQSGKTILDFLKSDGFANRNFMQLIHDDSLTFKEDIQKAQVSGQGDSLHEHIANLAGSPAIKKGILQTVKVVDELVKVMGRHKPENIVIEMARENQTTQKGQKNSRERMKRIEEGIKELGSQILKEHPVENTQLQNEKLYLYYLQNGRDMYVDQELDINRLSDYDVDHIVPQSFLKDDSIDNKVLTRSDKARGKSDNVPSEEVVKKMKNYWRQLLNAKLITQRKFDNLTKAERGGLSELDKAGFIKRQLVETRQITKHVAQILDSRMNTKYDENDKLIREVKVITLKSKLVSDFRKDFQFYKVREINNYHHAHDAYLNAVVGTALIKKYPKLESEFVYGDYKVYDVRKMIAKSEQEIGKATAKYFFYSNIMNFFKTEITLANGEIRKRPLIETNGETGEIVWDKGRDFATVRKVLSMPQVNIVKKTEVQTGGFSKESILPKRNSDKLIARKKDWDPKKYGGFDSPTVAYSVLVVAKVEKGKSKKLKSVKELLGITIMERSSFEKNPIDFLEAKGYKEVKKDLIIKLPKYSLFELENGRKRMLASAGELQKGNELALPSKYVNFLYLASHYEKLKGSPEDNEQKQLFVEQHKHYLDEIIEQISEFSKRVILADANLDKVLSAYNKHRDKPIREQAENIIHLFTLTNLGAPAAFKYFDTTIDRKRYTSTKEVLDATLIHQSITGLYETRIDLSQLGGDGGEAAAKEAAAKEAAAKGGVPWLTQQPLQLTILVPLQEYQEKILSKTALPEDQKQQLKTLFVKYDNLWQHWENQVGHRKIRPHNIATGDYPPRPQKQYPINPKAKPSIQIVIDDLLKQGVLTPQNSTMNTPVYPVPKPDGRWRMVLDYREVNKTIPLTAAQNQHSAGILATIVRQKYKTTLDLANGFWAHPITPESYWLTAFTWQGKQYCWTRLPQGFLNSPALFNADVVDLLKEIPNVQVYVDDIYLSHDDPKEHVQQLEKVFQILLQAGYVVSLKKSEIGQKTVEFLGFNITKEGRGLTDTFKTKLLNITPPKDLKQLQSILGLLNFARNFIPNFAELVQPLYNLIAPAKGKYIEWSEENTKQLNMVIEALNTASNLEERLPEQRLVIKVNTSPSAGYVRYYNETGKKPIMYLNYVFSKAELKFSMLEKLLTTMHKALIKAMDLAMGQEILVYSPIVSMTKIQKTPLPERKALPIRWITWMTYLEDPRIQFHYDKTLPELKHIPDVYTSSQSPVKHPSQYEGVFYTDGSAIKSPDPTKSNNAGMGIVHATYKPEYQVLNQWSIPLGNHTAQMAEIAAVEFACKKALKIPGPVLVITDSFYVAESANKELPYWKSNGFVNNKKKPLKHISKWKSIAECLSMKPDITIQHEKGISLQIPVFILKGNALADKLATQGSYVVNAGKRTADGSEFEKRTADGSEFESPKKKAKVE

SEQ ID NO: 6389 - protein, 2091 aa, synthetic construct
MPAAKRVKLDGGDKKYSIGLDIGTNSVGWAVITDEYKVPSKKFKVLGNTDRHSIKKNLIGALLFDSGETAEATRLKRTARRRYTRRKNRICYLQEIFSNEMAKVDDSFFHRLEESFLVEEDKKHERHPIFGNIVDEVAYHEKYPTIYHLRKKLVDSTDKADLRLIYLALAHMIKFRGHFLIEGDLNPDNSDVDKLFIQLVQTYNQLFEENPINASGVDAKAILSARLSKSRRLENLIAQLPGEKKNGLFGNLIALSLGLTPNFKSNFDLAEDAKLQLSKDTYDDDLDNLLAQIGDQYADLFLAAKNLSDAILLSDILRVNTEITKAPLSASMIKRYDEHHQDLTLLKALVRQQLPEKYKEIFFDQSKNGYAGYIDGGASQEEFYKFIKPILEKMDGTEELLVKLNREDLLRKQRTFDNGSIPHQIHLGELHAILRRQEDFYPFLKDNREKIEKILTFRIPYYVGPLARGNSRFAWMTRKSEETITPWNFEEVVDKGASAQSFIERMTNFDKNLPNEKVLPKHSLLYEYFTVYNELTKVKYVTEGMRKPAFLSGEQKKAIVDLLFKTNRKVTVKQLKEDYFKKIECFDSVEISGVEDRFNASLGTYHDLLKIIKDKDFLDNEENEDILEDIVLTLTLFEDREMIEERLKTYAHLFDDKVMKQLKRRRYTGWGRLSRKLINGIRDKQSGKTILDFLKSDGFANRNFMQLIHDDSLTFKEDIQKAQVSGQGDSLHEHIANLAGSPAIKKGILQTVKVVDELVKVMGRHKPENIVIEMARENQTTQKGQKNSRERMKRIEEGIKELGSQILKEHPVENTQLQNEKLYLYYLQNGRDMYVDQELDINRLSDYDVDHIVPQSFLKDDSIDNKVLTRSDKARGKSDNVPSEEVVKKMKNYWRQLLNAKLITQRKFDNLTKAERGGLSELDKAGFIKRQLVETRQITKHVAQILDSRMNTKYDENDKLIREVKVITLKSKLVSDFRKDFQFYKVREINNYHHAHDAYLNAVVGTALIKKYPKLESEFVYGDYKVYDVRKMIAKSEQEIGKATAKYFFYSNIMNFFKTEITLANGEIRKRPLIETNGETGEIVWDKGRDFATVRKVLSMPQVNIVKKTEVQTGGFSKESILPKRNSDKLIARKKDWDPKKYGGFDSPTVAYSVLVVAKVEKGKSKKLKSVKELLGITIMERSSFEKNPIDFLEAKGYKEVKKDLIIKLPKYSLFELENGRKRMLASAGELQKGNELALPSKYVNFLYLASHYEKLKGSPEDNEQKQLFVEQHKHYLDEIIEQISEFSKRVILADANLDKVLSAYNKHRDKPIREQAENIIHLFTLTNLGAPAAFKYFDTTIDRKRYTSTKEVLDATLIHQSITGLYETRIDLSQLGGDGGEAAAKEAAAKEAAAKGGVPWLTQQPLQLTILVPLQEYQEKILSKTALPEDQKQQLKTLFVKYDNLWQHWENQVGHRKIRPHNIATGDYPPRPQKQYPINPKAKPSIQIVIDDLLKQGVLTPQNSTMNTPVYPVPKPDGRWRMVLDYREVNKTIPLTAAQNQHSAGILATIVRQKYKTTLDLANGFWAHPITPESYWLTAFTWQGKQYCWTRLPQGFLNSPALFNADVVDLLKEIPNVQVYVDDIYLSHDDPKEHVQQLEKVFQILLQAGYVVSLKKSEIGQKTVEFLGFNITKEGRGLTDTFKTKLLNITPPKDLKQLQSILGKLNFARNFIPNFAELVQPLYNLIAPAKGKYIEWSEENTKQLNMVIEALNTASNLEERLPEQRLVIKVNTSPSAGYVRYYNETGKKPIMYLNYVFSKAELKFSMLEKLLTTMHKALIKAMDLAMGQEILVYSPIVSMTKIQKTPLPERKALPIRWITWMTYLEDPRIQFHYDKTLPELKHIPDVYTSSQSPVKHPSQYEGVFYTDGSAIKSPDPTKSNNAGMGIVHATYKPEYQVLNQWSIPLGNHTAQMAEIAAVEFACKKALKIPGPVLVITDSFYVAESANKELPYWKSNGFVNNKKKPLKHISKWKSIAECLSMKPDITIQHEKGISLQIPVFILKGNALADKLATQGSYVVNAGKRTADGSEFEKRTADGSEFESPKKKAKVE

SEQ ID NO: 6390 - protein, 2222 aa, synthetic construct
MPAAKRVKLDGGDKKYSIGLDIGTNSVGWAVITDEYKVPSKKFKVLGNTDRHSIKKNLIGALLFDSGETAEATRLKRTARRRYTRRKNRICYLQEIFSNEMAKVDDSFFHRLEESFLVEEDKKHERHPIFGNIVDEVAYHEKYPTIYHLRKKLVDSTDKADLRLIYLALAHMIKFRGHFLIEGDLNPDNSDVDKLFIQLVQTYNQLFEENPINASGVDAKAILSARLSKSRRLENLIAQLPGEKKNGLFGNLIALSLGLTPNFKSNFDLAEDAKLQLSKDTYDDDLDNLLAQIGDQYADLFLAAKNLSDAILLSDILRVNTEITKAPLSASMIKRYDEHHQDLTLLKALVRQQLPEKYKEIFFDQSKNGYAGYIDGGASQEEFYKFIKPILEKMDGTEELLVKLNREDLLRKQRTFDNGSIPHQIHLGELHAILRRQEDFYPFLKDNREKIEKILTFRIPYYVGPLARGNSRFAWMTRKSEETITPWNFEEVVDKGASAQSFIERMTNFDKNLPNEKVLPKHSLLYEYFTVYNELTKVKYVTEGMRKPAFLSGEQKKAIVDLLFKTNRKVTVKQLKEDYFKKIECFDSVEISGVEDRFNASLGTYHDLLKIIKDKDFLDNEENEDILEDIVLTLTLFEDREMIEERLKTYAHLFDDKVMKQLKRRRYTGWGRLSRKLINGIRDKQSGKTILDFLKSDGFANRNFMQLIHDDSLTFKEDIQKAQVSGQGDSLHEHIANLAGSPAIKKGILQTVKVVDELVKVMGRHKPENIVIEMARENQTTQKGQKNSRERMKRIEEGIKELGSQILKEHPVENTQLQNEKLYLYYLQNGRDMYVDQELDINRLSDYDVDHIVPQSFLKDDSIDNKVLTRSDKARGKSDNVPSEEVVKKMKNYWRQLLNAKLITQRKFDNLTKAERGGLSELDKAGFIKRQLVETRQITKHVAQILDSRMNTKYDENDKLIREVKVITLKSKLVSDFRKDFQFYKVREINNYHHAHDAYLNAVVGTALIKKYPKLESEFVYGDYKVYDVRKMIAKSEQEIGKATAKYFFYSNIMNFFKTEITLANGEIRKRPLIETNGETGEIVWDKGRDFATVRKVLSMPQVNIVKKTEVQTGGFSKESILPKRNSDKLIARKKDWDPKKYGGFDSPTVAYSVLVVAKVEKGKSKKLKSVKELLGITIMERSSFEKNPIDFLEAKGYKEVKKDLIIKLPKYSLFELENGRKRMLASAGELQKGNELALPSKYVNFLYLASHYEKLKGSPEDNEQKQLFVEQHKHYLDEIIEQISEFSKRVILADANLDKVLSAYNKHRDKPIREQAENIIHLFTLTNLGAPAAFKYFDTTIDRKRYTSTKEVLDATLIHQSITGLYETRIDLSQLGGDGGEAAAKEAAAKEAAAKGGTLGDQGSRGSDPLPEPRVTLTVEGIPTEFLVNTGAEHSVLTKPMGKMGSKRTVVAGATGSKVYPWTTKRLLKIGQKQVTHSFLVIPECPAPLLGRDLLTKLKAQIQFSTEGPQVTWEDRPAMCLVLNLEEEYRLHEKPVPPSIDPSWLQLFPMVWAEKAGMGLANQVPPVVVELKSDASPVAVRQYPMSKEAREGIRPHIQRFLDLGILVPCQSPWNTPLLPVKKPGTNDYRPVQDLREVNKRVQDIHPTVPNPYNLLSSLPPSHTWYSVLDLKDAFFCLKLHPNSQPLFAFEWRDPEKGNTGQLTWTRLPQGFKNSPTLFDEALHRDLASFRALNPQVVMLQYVDDLLVAAPTYRDCKEGTRRLLQELSKLGYRVSAKKAQLCREEVTYLGYLLKGGKRWLTPARKATVMKIPTPTTPRQVREFLGTAGFCRLWIPGFASLAAPLYPLTREKVPFTWTEAHQEAFGRIKEALLSAPALALPDLTKPFALYVDEKEGVARGVLTQTLGPWRRPVAYLSKKLDPVASGWPTCLKAIAAVALLLKDADKLTLGQNVLVIAPHNLESIVRQPPDRWMTNARMTHYQSLLLNERVSFAPPAILNPATLLPVESDDTPIHICSEILAEETGTRPDLRDQPLPGVPAWYTDGSSFIMDGRRQAGAAIVDNKRTVWASNLPEGTSAQKAELIALTQALRLAEGKSINIYTDSRYAFATAHVHGAIYKQRGLLTSAGKDIKNKEEILALLEAIHLPKRVAIIHCPGHQRGTDPVATGNRKADEAAKQAAQSTRILTETTKNAGKRTADGSEFEKRTADGSEFESPKKKAKVE

SEQ ID NO: 6391 - protein, 2131 aa, synthetic construct
MPAAKRVKLDGGDKKYSIGLDIGTNSVGWAVITDEYKVPSKKFKVLGNTDRHSIKKNLIGALLFDSGETAEATRLKRTARRRYTRRKNRICYLQEIFSNEMAKVDDSFFHRLEESFLVEEDKKHERHPIFGNIVDEVAYHEKYPTIYHLRKKLVDSTDKADLRLIYLALAHMIKFRGHFLIEGDLNPDNSDVDKLFIQLVQTYNQLFEENPINASGVDAKAILSARLSKSRRLENLIAQLPGEKKNGLFGNLIALSLGLTPNFKSNFDLAEDAKLQLSKDTYDDDLDNLLAQIGDQYADLFLAAKNLSDAILLSDILRVNTEITKAPLSASMIKRYDEHHQDLTLLKALVRQQLPEKYKEIFFDQSKNGYAGYIDGGASQEEFYKFIKPILEKMDGTEELLVKLNREDLLRKQRTFDNGSIPHQIHLGELHAILRRQEDFYPFLKDNREKIEKILTFRIPYYVGPLARGNSRFAWMTRKSEETITPWNFEEVVDKGASAQSFIERMTNFDKNLPNEKVLPKHSLLYEYFTVYNELTKVKYVTEGMRKPAFLSGEQKKAIVDLLFKTNRKVTVKQLKEDYFKKIECFDSVEISGVEDRFNASLGTYHDLLKIIKDKDFLDNEENEDILEDIVLTLTLFEDREMIEERLKTYAHLFDDKVMKQLKRRRYTGWGRLSRKLINGIRDKQSGKTILDFLKSDGFANRNFMQLIHDDSLTFKEDIQKAQVSGQGDSLHEHIANLAGSPAIKKGILQTVKVVDELVKVMGRHKPENIVIEMARENQTTQKGQKNSRERMKRIEEGIKELGSQILKEHPVENTQLQNEKLYLYYLQNGRDMYVDQELDINRLSDYDVDHIVPQSFLKDDSIDNKVLTRSDKARGKSDNVPSEEVVKKMKNYWRQLLNAKLITQRKFDNLTKAERGGLSELDKAGFIKRQLVETRQITKHVAQILDSRMNTKYDENDKLIREVKVITLKSKLVSDFRKDFQFYKVREINNYHHAHDAYLNAVVGTALIKKYPKLESEFVYGDYKVYDVRKMIAKSEQEIGKATAKYFFYSNIMNFFKTEITLANGEIRKRPLIETNGETGEIVWDKGRDFATVRKVLSMPQVNIVKKTEVQTGGFSKESILPKRNSDKLIARKKDWDPKKYGGFDSPTVAYSVLVVAKVEKGKSKKLKSVKELLGITIMERSSFEKNPIDFLEAKGYKEVKKDLIIKLPKYSLFELENGRKRMLASAGELQKGNELALPSKYVNFLYLASHYEKLKGSPEDNEQKQLFVEQHKHYLDEIIEQISEFSKRVILADANLDKVLSAYNKHRDKPIREQAENIIHLFTLTNLGAPAAFKYFDTTIDRKRYTSTKEVLDATLIHQSITGLYETRIDLSQLGGDGGEAAAKEAAAKEAAAKGGLLGRDLLTKLKAQIQFSTEGPQVTWEDRPAMCLVLNLEEEYRLHEKPVPPSIDPSWLQLFPMVWAEKAGMGLANQVPPVVVELKSDASPVAVRQYPMSKEAREGIRPHIQRFLDLGILVPCQSPWNTPLLPVKKPGTNDYRPVQDLREVNKRVQDIHPTVPNPYNLLSSLPPSHTWYSVLDLKDAFFCLKLHPNSQPLFAFEWRDPEKGNTGQLTWTRLPQGFKNSPTLFNEALHRDLASFRALNPQVVMLQYVDDLLVAAPTYRDCKEGTRRLLQELSKLGYRVSAKKAQLCREEVTYLGYLLKGGKRWLTPARKATVMKIPTPTTPRQVREFLGKAGFCRLFIPGFASLAAPLYPLTRPKVPFTWTEAHQEAFGRIKEALLSAPALALPDLTKPFALYVDEKEGVARGVLTQTLGPWRRPVAYLSKKLDPVASGWPTCLKAIAAVALLLKDADKLTLGQNVLVIAPHNLESIVRQPPDRWMTNARMTHYQSLLLNERVSFAPPAILNPATLLPVESDDTPIHICSEILAEETGTRPDLRDQPLPGVPAWYTDGSSFIMDGRRQAGAAIVDNKRTVWASNLPEGTSAQKAELIALTQALRLAEGKSINIYTDSRYAFATAHVHGAIYKQRGWLTSAGKDIKNKEEILALLEAIHLPKRVAIIHCPGHQRGTDPVATGNRKADEAAKQAAQSTRILTETTKNAGKRTADGSEFEKRTADGSEFESPKKKAKVE

SEQ ID NO: 6392 - protein, 2222 aa, synthetic construct
MPAAKRVKLDGGDKKYSIGLDIGTNSVGWAVITDEYKVPSKKFKVLGNTDRHSIKKNLIGALLFDSGETAEATRLKRTARRRYTRRKNRICYLQEIFSNEMAKVDDSFFHRLEESFLVEEDKKHERHPIFGNIVDEVAYHEKYPTIYHLRKKLVDSTDKADLRLIYLALAHMIKFRGHFLIEGDLNPDNSDVDKLFIQLVQTYNQLFEENPINASGVDAKAILSARLSKSRRLENLIAQLPGEKKNGLFGNLIALSLGLTPNFKSNFDLAEDAKLQLSKDTYDDDLDNLLAQIGDQYADLFLAAKNLSDAILLSDILRVNTEITKAPLSASMIKRYDEHHQDLTLLKALVRQQLPEKYKEIFFDQSKNGYAGYIDGGASQEEFYKFIKPILEKMDGTEELLVKLNREDLLRKQRTFDNGSIPHQIHLGELHAILRRQEDFYPFLKDNREKIEKILTFRIPYYVGPLARGNSRFAWMTRKSEETITPWNFEEVVDKGASAQSFIERMTNFDKNLPNEKVLPKHSLLYEYFTVYNELTKVKYVTEGMRKPAFLSGEQKKAIVDLLFKTNRKVTVKQLKEDYFKKIECFDSVEISGVEDRFNASLGTYHDLLKIIKDKDFLDNEENEDILEDIVLTLTLFEDREMIEERLKTYAHLFDDKVMKQLKRRRYTGWGRLSRKLINGIRDKQSGKTILDFLKSDGFANRNFMQLIHDDSLTFKEDIQKAQVSGQGDSLHEHIANLAGSPAIKKGILQTVKVVDELVKVMGRHKPENIVIEMARENQTTQKGQKNSRERMKRIEEGIKELGSQILKEHPVENTQLQNEKLYLYYLQNGRDMYVDQELDINRLSDYDVDHIVPQSFLKDDSIDNKVLTRSDKARGKSDNVPSEEVVKKMKNYWRQLLNAKLITQRKFDNLTKAERGGLSELDKAGFIKRQLVETRQITKHVAQILDSRMNTKYDENDKLIREVKVITLKSKLVSDFRKDFQFYKVREINNYHHAHDAYLNAVVGTALIKKYPKLESEFVYGDYKVYDVRKMIAKSEQEIGKATAKYFFYSNIMNFFKTEITLANGEIRKRPLIETNGETGEIVWDKGRDFATVRKVLSMPQVNIVKKTEVQTGGFSKESILPKRNSDKLIARKKDWDPKKYGGFDSPTVAYSVLVVAKVEKGKSKKLKSVKELLGITIMERSSFEKNPIDFLEAKGYKEVKKDLIIKLPKYSLFELENGRKRMLASAGELQKGNELALPSKYVNFLYLASHYEKLKGSPEDNEQKQLFVEQHKHYLDEIIEQISEFSKRVILADANLDKVLSAYNKHRDKPIREQAENIIHLFTLTNLGAPAAFKYFDTTIDRKRYTSTKEVLDATLIHQSITGLYETRIDLSQLGGDGGEAAAKEAAAKEAAAKGGTLGDQGSRGSDPLPEPRVTLTVEGIPTEFLVNTGAEHSVLTKPMGKMGSKRTVVAGATGSKVYPWTTKRLLKIGQKQVTHSFLVIPECPAPLLGRDLLTKLKAQIQFSTEGPQVTWEDRPAMCLVLNLEEEYRLHEKPVPPSIDPSWLQLFPMVWAEKAGMGLANQVPPVVVELKSDASPVAVRQYPMSKEAREGIRPHIQRFLDLGILVPCQSPWNTPLLPVKKPGTNDYRPVQDLREVNKRVQDIHPTVPNPYNLLSSLPPSHTWYSVLDLKDAFFCLKLHPNSQPLFAFEWRDPEKGNTGQLTWTRLPQGFKNSPTLFNEALHRDLASFRALNPQVVMLQYVDDLLVAAPTYRDCKEGTRRLLQELSKLGYRVSAKKAQLCREEVTYLGYLLKGGKRWLTPARKATVMKIPTPTTPRQVREFLGKAGFCRLFIPGFASLAAPLYPLTRPKVPFTWTEAHQEAFGRIKEALLSAPALALPDLTKPFALYVDEKEGVARGVLTQTLGPWRRPVAYLSKKLDPVASGWPTCLKAIAAVALLLKDADKLTLGQNVLVIAPHNLESIVRQPPDRWMTNARMTHYQSLLLNERVSFAPPAILNPATLLPVESDDTPIHICSEILAEETGTRPDLRDQPLPGVPAWYTDGSSFIMDGRRQAGAAIVDNKRTVWASNLPEGTSAQKAELIALTQALRLAEGKSINIYTDSRYAFATAHVHGAIYKQRGWLTSAGKDIKNKEEILALLEAIHLPKRVAIIHCPGHQRGTDPVATGNRKADEAAKQAAQSTRILTETTKNAGKRTADGSEFEKRTADGSEFESPKKKAKVE

SEQ ID NO: 6393 - protein, 2100 aa, synthetic construct
MPAAKRVKLDGGDKKYSIGLDIGTNSVGWAVITDEYKVPSKKFKVLGNTDRHSIKKNLIGALLFDSGETAEATRLKRTARRRYTRRKNRICYLQEIFSNEMAKVDDSFFHRLEESFLVEEDKKHERHPIFGNIVDEVAYHEKYPTIYHLRKKLVDSTDKADLRLIYLALAHMIKFRGHFLIEGDLNPDNSDVDKLFIQLVQTYNQLFEENPINASGVDAKAILSARLSKSRRLENLIAQLPGEKKNGLFGNLIALSLGLTPNFKSNFDLAEDAKLQLSKDTYDDDLDNLLAQIGDQYADLFLAAKNLSDAILLSDILRVNTEITKAPLSASMIKRYDEHHQDLTLLKALVRQQLPEKYKEIFFDQSKNGYAGYIDGGASQEEFYKFIKPILEKMDGTEELLVKLNREDLLRKQRTFDNGSIPHQIHLGELHAILRRQEDFYPFLKDNREKIEKILTFRIPYYVGPLARGNSRFAWMTRKSEETITPWNFEEVVDKGASAQSFIERMTNFDKNLPNEKVLPKHSLLYEYFTVYNELTKVKYVTEGMRKPAFLSGEQKKAIVDLLFKTNRKVTVKQLKEDYFKKIECFDSVEISGVEDRFNASLGTYHDLLKIIKDKDFLDNEENEDILEDIVLTLTLFEDREMIEERLKTYAHLFDDKVMKQLKRRRYTGWGRLSRKLINGIRDKQSGKTILDFLKSDGFANRNFMQLIHDDSLTFKEDIQKAQVSGQGDSLHEHIANLAGSPAIKKGILQTVKVVDELVKVMGRHKPENIVIEMARENQTTQKGQKNSRERMKRIEEGIKELGSQILKEHPVENTQLQNEKLYLYYLQNGRDMYVDQELDINRLSDYDVDHIVPQSFLKDDSIDNKVLTRSDKARGKSDNVPSEEVVKKMKNYWRQLLNAKLITQRKFDNLTKAERGGLSELDKAGFIKRQLVETRQITKHVAQILDSRMNTKYDENDKLIREVKVITLKSKLVSDFRKDFQFYKVREINNYHHAHDAYLNAVVGTALIKKYPKLESEFVYGDYKVYDVRKMIAKSEQEIGKATAKYFFYSNIMNFFKTEITLANGEIRKRPLIETNGETGEIVWDKGRDFATVRKVLSMPQVNIVKKTEVQTGGFSKESILPKRNSDKLIARKKDWDPKKYGGFDSPTVAYSVLVVAKVEKGKSKKLKSVKELLGITIMERSSFEKNPIDFLEAKGYKEVKKDLIIKLPKYSLFELENGRKRMLASAGELQKGNELALPSKYVNFLYLASHYEKLKGSPEDNEQKQLFVEQHKHYLDEIIEQISEFSKRVILADANLDKVLSAYNKHRDKPIREQAENIIHLFTLTNLGAPAAFKYFDTTIDRKRYTSTKEVLDATLIHQSITGLYETRIDLSQLGGDGGEAAAKEAAAKEAAAKGGLGIEDEYRLHETSTEPDVSLGSTWLSDFPQAWAETGGMGLAVRQAPLIIPLKATSTPVSIQQYPMSHEARLGIKPHIQRLLDQGILVPCQSPWNTPLLPVKKPGTNDYRPVQDLREVNKRVEDIHPTVPNPYNLLSGLPPSHQWYTVLDLKDAFFCLRLHPTSQPLFAFEWRDPGMGISGQLTWTRLPQGFKNSPTLFNEALHRDLADFRIQHPDLILLQYVDDILLAATSELDCQQGTRALLQTLGDLGYRASAKKAQICQKQVKYLGYLLREGQRWLTEARKETVMGQPVPKTPRQLREFLGKAGFCRLFIPGFAEMAAPLYPLTKPGTLFSWGPDQQKAYQEIKQALLTAPALGLPDLTKPFELFVDEKQGYAKGVLTQKLGPWRRPVAYLSKKLDPVAAGWPPCLRMVAAIAVLTKDAGKLTMGQPLVILAPHAVEALVKQPPDRWLSNARMTHYQAMLLDTDRVQFGPVVALNPATLLPLPEEGAPHDCLEILAETHGTRPDLTDQPIPDADHTWYTDGSSFLQEGQRKAGAAVTTETEVIWAGALPAGTSAQRAELIALTQALKMAEGKRLNVYTDSRYAFATAHIHGEIYRRRGWLTSEGREIKNKSEILALLKALFLPKRLSIIHCLGHQKGDSAEARGNRLADQAAREAAIKTPPDTSTLLIAGKRTADGSEFEKRTADGSEFESPKKKAKVE

SEQ ID NO: 6394 - protein, 2100 aa, synthetic construct; identical to SEQ ID NO: 6393

SEQ ID NO: 6395 - protein, 2100 aa, synthetic construct
MPAAKRVKLDGGDKKYSIGLDIGTNSVGWAVITDEYKVPSKKFKVLGNTDRHSIKKNLIGALLFDSGETAEATRLKRTARRRYTRRKNRICYLQEIFSNEMAKVDDSFFHRLEESFLVEEDKKHERHPIFGNIVDEVAYHEKYPTIYHLRKKLVDSTDKADLRLIYLALAHMIKFRGHFLIEGDLNPDNSDVDKLFIQLVQTYNQLFEENPINASGVDAKAILSARLSKSRRLENLIAQLPGEKKNGLFGNLIALSLGLTPNFKSNFDLAEDAKLQLSKDTYDDDLDNLLAQIGDQYADLFLAAKNLSDAILLSDILRVNTEITKAPLSASMIKRYDEHHQDLTLLKALVRQQLPEKYKEIFFDQSKNGYAGYIDGGASQEEFYKFIKPILEKMDGTEELLVKLNREDLLRKQRTFDNGSIPHQIHLGELHAILRRQEDFYPFLKDNREKIEKILTFRIPYYVGPLARGNSRFAWMTRKSEETITPWNFEEVVDKGASAQSFIERMTNFDKNLPNEKVLPKHSLLYEYFTVYNELTKVKYVTEGMRKPAFLSGEQKKAIVDLLFKTNRKVTVKQLKEDYFKKIECFDSVEISGVEDRFNASLGTYHDLLKIIKDKDFLDNEENEDILEDIVLTLTLFEDREMIEERLKTYAHLFDDKVMKQLKRRRYTGWGRLSRKLINGIRDKQSGKTILDFLKSDGFANRNFMQLIHDDSLTFKEDIQKAQVSGQGDSLHEHIANLAGSPAIKKGILQTVKVVDELVKVMGRHKPENIVIEMARENQTTQKGQKNSRERMKRIEEGIKELGSQILKEHPVENTQLQNEKLYLYYLQNGRDMYVDQELDINRLSDYDVDHIVPQSFLKDDSIDNKVLTRSDKARGKSDNVPSEEVVKKMKNYWRQLLNAKLITQRKFDNLTKAERGGLSELDKAGFIKRQLVETRQITKHVAQILDSRMNTKYDENDKLIREVKVITLKSKLVSDFRKDFQFYKVREINNYHHAHDAYLNAVVGTALIKKYPKLESEFVYGDYKVYDVRKMIAKSEQEIGKATAKYFFYSNIMNFFKTEITLANGEIRKRPLIETNGETGEIVWDKGRDFATVRKVLSMPQVNIVKKTEVQTGGFSKESILPKRNSDKLIARKKDWDPKKYGGFDSPTVAYSVLVVAKVEKGKSKKLKSVKELLGITIMERSSFEKNPIDFLEAKGYKEVKKDLIIKLPKYSLFELENGRKRMLASAGELQKGNELALPSKYVNFLYLASHYEKLKGSPEDNEQKQLFVEQHKHYLDEIIEQISEFSKRVILADANLDKVLSAYNKHRDKPIREQAENIIHLFTLTNLGAPAAFKYFDTTIDRKRYTSTKEVLDATLIHQSITGLYETRIDLSQLGGDGGEAAAKEAAAKEAAAKGGTLNIEDEYRLHETSKGPDVPLGSTWLSDFPQAWAETGGMGLAVRQAPLIIPLKATSTPVSIKQYPMSQEARLGIKPHIQRLLDQGILVPCQSPWNTPLLPVKKPGTNDYRPVQDLREVNKRVEDIHPTVPNPYNLLSGLPPSHQWYTVLDLKDAFFCLRLHPTSQSLFAFEWRDPEMGISGQLTWTRLPQGFKNSPTLFNEALHRDLADFRIQHPDLILLQYVDDLLLAATSELDCQQGTRALLQTLGDLGYRASAKKAQICQKQVKYLGYLLKEGQRWLTEARKETVMGQPTPKTPRQLREFLGTAGFCRLWIPGFAEMAAPLYPLTKPGTLFEWGPDQQKAYQEIKQALLTAPALGLPDLTKPFELFVDEKQGYAKGVLTQKLGPWRRPVAYLSKKLDPVAAGWPPCLRMVAAIAVLTKDAGKLTMGQPLVILAPHAVEALVKQPPDRWLSNARMTHYQALLLDTDRVQFGPIVALNPATLLPLPEEGLQHDCLDILAEAHGTRPDLTDQPLPDADHTWYTDGSSFLQEGQRKAGAAVTTETEVVWAKALPAGTSAQRAELIALTQALKMAEGKKLNVYTDSRYAFATAHIHGEIYRRRGWLTSEGKEIKNKDEILALLKALFLPKRLSIIHCPGHQKGNRAEARGNRMADQAAREVATRETPETSTLLAGKRTADGSEFEKRTADGSEFESPKKKAKVE

SEQ ID NO: 6396 - protein, 2100 aa, synthetic construct
MPAAKRVKLDGGDKKYSIGLDIGTNSVGWAVITDEYKVPSKKFKVLGNTDRHSIKKNLIGALLFDSGETAEATRLKRTARRRYTRRKNRICYLQEIFSNEMAKVDDSFFHRLEESFLVEEDKKHERHPIFGNIVDEVAYHEKYPTIYHLRKKLVDSTDKADLRLIYLALAHMIKFRGHFLIEGDLNPDNSDVDKLFIQLVQTYNQLFEENPINASGVDAKAILSARLSKSRRLENLIAQLPGEKKNGLFGNLIALSLGLTPNFKSNFDLAEDAKLQLSKDTYDDDLDNLLAQIGDQYADLFLAAKNLSDAILLSDILRVNTEITKAPLSASMIKRYDEHHQDLTLLKALVRQQLPEKYKEIFFDQSKNGYAGYIDGGASQEEFYKFIKPILEKMDGTEELLVKLNREDLLRKQRTFDNGSIPHQIHLGELHAILRRQEDFYPFLKDNREKIEKILTFRIPYYVGPLARGNSRFAWMTRKSEETITPWNFEEVVDKGASAQSFIERMTNFDKNLPNEKVLPKHSLLYEYFTVYNELTKVKYVTEGMRKPAFLSGEQKKAIVDLLFKTNRKVTVKQLKEDYFKKIECFDSVEISGVEDRFNASLGTYHDLLKIIKDKDFLDNEENEDILEDIVLTLTLFEDREMIEERLKTYAHLFDDKVMKQLKRRRYTGWGRLSRKLINGIRDKQSGKTILDFLKSDGFANRNFMQLIHDDSLTFKEDIQKAQVSGQGDSLHEHIANLAGSPAIKKGILQTVKVVDELVKVMGRHKPENIVIEMARENQTTQKGQKNSRERMKRIEEGIKELGSQILKEHPVENTQLQNEKLYLYYLQNGRDMYVDQELDINRLSDYDVDHIVPQSFLKDDSIDNKVLTRSDKARGKSDNVPSEEVVKKMKNYWRQLLNAKLITQRKFDNLTKAERGGLSELDKAGFIKRQLVETRQITKHVAQILDSRMNTKYDENDKLIREVKVITLKSKLVSDFRKDFQFYKVREINNYHHAHDAYLNAVVGTALIKKYPKLESEFVYGDYKVYDVRKMIAKSEQEIGKATAKYFFYSNIMNFFKTEITLANGEIRKRPLIETNGETGEIVWDKGRDFATVRKVLSMPQVNIVKKTEVQTGGFSKESILPKRNSDKLIARKKDWDPKKYGGFDSPTVAYSVLVVAKVEKGKSKKLKSVKELLGITIMERSSFEKNPIDFLEAKGYKEVKKDLIIKLPKYSLFELENGRKRMLASAGELQKGNELALPSKYVNFLYLASHYEKLKGSPEDNEQKQLFVEQHKHYLDEIIEQISEFSKRVILADANLDKVLSAYNKHRDKPIREQAENIIHLFTLTNLGAPAAFKYFDTTIDRKRYTSTKEVLDATLIHQSITGLYETRIDLSQLGGDGGEAAAKEAAAKEAAAKGGTLNIEDEYRLHEISTEPDVSPGSTWLSDFPQAWAETGGMGLAVRQAPLIIPLKATSTPVSIKQYPMSQEAKLGIKPHIQRLLDQGILVPCQSPWNTPLLPVKKPGTNDYRPVQGLREVNKRVEDIHPTVPNPYNLLSGLPTSHRWYTVLDLKDAFFCLRLHPTSQPLFASEWRDPGMGISGQLTWTRLPQGFKNSPTLFDEALHRGLADFRIQHPDLILLQYVDDLLLAATSELDCQQGTRALLKTLGNLGYRASAKKAQICQKQVKYLGYLLREGQRWLTEARKETVMGQPTPKTPRQLREFLGTAGFCRLWIPRFAEMAAPLYPLTKTGTLFNWGPDQQKAYHEIKQALLTAPALGLPDLTKPFELFVDEKQGYAKGVLTQKLGPWRRPVAYLSKKLDPVAAGWPPCLRMVAAIAVLTKDAGKLTMGQPLVILAPHAVEALVKQPPDRWLSNARMTHYQAMLLDTDRVQFGPVVALNPATLLPLPEEGAPHDCLEILAETHGTEPDLTDQPIPDADHTWYTDGSSFLQEGQRKAGAAVTTETEVIWARALPAGTSAQRAELIALTQALKMAEGKRLNVYTDSRYAFATAHIHGEIYKRRGLLTSEGREIKNKSEILALLKALFLPKRLSIIHCLGHQKGDSAEARGNRLADQAAREAAIKTPPDTSTLLAGKRTADGSEFEKRTADGSEFESPKKKAKVE

SEQ ID NO: 6397 - protein, 2120 aa, synthetic construct
MPAAKRVKLDGGDKKYSIGLDIGTNSVGWAVITDEYKVPSKKFKVLGNTDRHSIKKNLIGALLFDSGETAEATRLKRTARRRYTRRKNRICYLQEIFSNEMAKVDDSFFHRLEESFLVEEDKKHERHPIFGNIVDEVAYHEKYPTIYHLRKKLVDSTDKADLRLIYLALAHMIKFRGHFLIEGDLNPDNSDVDKLFIQLVQTYNQLFEENPINASGVDAKAILSARLSKSRRLENLIAQLPGEKKNGLFGNLIALSLGLTPNFKSNFDLAEDAKLQLSKDTYDDDLDNLLAQIGDQYADLFLAAKNLSDAILLSDILRVNTEITKAPLSASMIKRYDEHHQDLTLLKALVRQQLPEKYKEIFFDQSKNGYAGYIDGGASQEEFYKFIKPILEKMDGTEELLVKLNREDLLRKQRTFDNGSIPHQIHLGELHAILRRQEDFYPFLKDNREKIEKILTFRIPYYVGPLARGNSRFAWMTRKSEETITPWNFEEVVDKGASAQSFIERMTNFDKNLPNEKVLPKHSLLYEYFTVYNELTKVKYVTEGMRKPAFLSGEQKKAIVDLLFKTNRKVTVKQLKEDYFKKIECFDSVEISGVEDRFNASLGTYHDLLKIIKDKDFLDNEENEDILEDIVLTLTLFEDREMIEERLKTYAHLFDDKVMKQLKRRRYTGWGRLSRKLINGIRDKQSGKTILDFLKSDGFANRNFMQLIHDDSLTFKEDIQKAQVSGQGDSLHEHIANLAGSPAIKKGILQTVKVVDELVKVMGRHKPENIVIEMARENQTTQKGQKNSRERMKRIEEGIKELGSQILKEHPVENTQLQNEKLYLYYLQNGRDMYVDQELDINRLSDYDVDHIVPQSFLKDDSIDNKVLTRSDKARGKSDNVPSEEVVKKMKNYWRQLLNAKLITQRKFDNLTKAERGGLSELDKAGFIKRQLVETRQITKHVAQILDSRMNTKYDENDKLIREVKVITLKSKLVSDFRKDFQFYKVREINNYHHAHDAYLNAVVGTALIKKYPKLESEFVYGDYKVYDVRKMIAKSEQEIGKATAKYFFYSNIMNFFKTEITLANGEIRKRPLIETNGETGEIVWDKGRDFATVRKVLSMPQVNIVKKTEVQTGGFSKESILPKRNSDKLIARKKDWDPKKYGGFDSPTVAYSVLVVAKVEKGKSKKLKSVKELLGITIMERSSFEKNPIDFLEAKGYKEVKKDLIIKLPKYSLFELENGRKRMLASAGELQKGNELALPSKYVNFLYLASHYEKLKGSPEDNEQKQLFVEQHKHYLDEIIEQISEFSKRVILADANLDKVLSAYNKHRDKPIREQAENIIHLFTLTNLGAPAAFKYFDTTIDRKRYTSTKEVLDATLIHQSITGLYETRIDLSQLGGDGGEAAAKEAAAKEAAAKGGVQEISDSRPMLHIYLNGRRFLGLLDTGADKTCIAGRDWPANWPIHQTESSLQGLGMACGVARSSQPLRWQHEDKSGIIHPFVIPTLPFTLWGRDIMKDIKVRLMTDSPDDSQDLMIGAIESNLFADQISWKSDQPVWLNQWPLKQEKLQALQQLVTEQLQLGHLEESNSPWNTPVFVIKKKSGKWRLLQDLRAVNATMHDMGALQPGLPSPVAVPKGWEIIIIDLQDCFFNIKLHPEDCKRFAFSVPSPNFKRPYQRFQWKVLPQGMKNSPTLCQKFVDKAILTVRDKYQDSYIVHYMDDILLAHPSRSIVDEILTSMIQALNKHGLVVSTEKIQKYDNLKYLGTHIQGDSVSYQKLQIRTDKLRTLNDFQKLLGNINWIRPFLKLTTGELKPLFEILNGDSNPISTRKLTPEACKALQLMNERLSTARVKRLDLSQPWSLCILKTEYTPTACLWQDGVVEWIHLPHISPKVITPYDIFCTQLIIKGRHRSKELFSKDPDYIVVPYTKVQFDLLLQEKEDWPISLLGFLGEVHFHLPKDPLLTFTLQTAIIFPHMTSTTPLEKGIVIFTDGSANGRSVTYIQGREPIIKENTQNTAQQAEIVAVITAFEEVSQPFNLYTDSKYVTGLFPEIETATLSPRTKIYTELKHLQRLIHKRQEKFYIGHIRGHTGLPGPLAQGNAYADSLTRILTAAGKRTADGSEFEKRTADGSEFESPKKKAKVE

SEQ ID NO: 6398 - protein, 2091 aa, synthetic construct
MPAAKRVKLDGGDKKYSIGLDIGTNSVGWAVITDEYKVPSKKFKVLGNTDRHSIKKNLIGALLFDSGETAEATRLKRTARRRYTRRKNRICYLQEIFSNEMAKVDDSFFHRLEESFLVEEDKKHERHPIFGNIVDEVAYHEKYPTIYHLRKKLVDSTDKADLRLIYLALAHMIKFRGHFLIEGDLNPDNSDVDKLFIQLVQTYNQLFEENPINASGVDAKAILSARLSKSRRLENLIAQLPGEKKNGLFGNLIALSLGLTPNFKSNFDLAEDAKLQLSKDTYDDDLDNLLAQIGDQYADLFLAAKNLSDAILLSDILRVNTEITKAPLSASMIKRYDEHHQDLTLLKALVRQQLPEKYKEIFFDQSKNGYAGYIDGGASQEEFYKFIKPILEKMDGTEELLVKLNREDLLRKQRTFDNGSIPHQIHLGELHAILRRQEDFYPFLKDNREKIEKILTFRIPYYVGPLARGNSRFAWMTRKSEETITPWNFEEVVDKGASAQSFIERMTNFDKNLPNEKVLPKHSLLYEYFTVYNELTKVKYVTEGMRKPAFLSGEQKKAIVDLLFKTNRKVTVKQLKEDYFKKIECFDSVEISGVEDRFNASLGTYHDLLKIIKDKDFLDNEENEDILEDIVLTLTLFEDREMIEERLKTYAHLFDDKVMKQLKRRRYTGWGRLSRKLINGIRDKQSGKTILDFLKSDGFANRNFMQLIHDDSLTFKEDIQKAQVSGQGDSLHEHIANLAGSPAIKKGILQTVKVVDELVKVMGRHKPENIVIEMARENQTTQKGQKNSRERMKRIEEGIKELGSQILKEHPVENTQLQNEKLYLYYLQNGRDMYVDQELDINRLSDYDVDHIVPQSFLKDDSIDNKVLTRSDKARGKSDNVPSEEVVKKMKNYWRQLLNAKLITQRKFDNLTKAERGGLSELDKAGFIKRQLVETRQITKHVAQILDSRMNTKYDENDKLIREVKVITLKSKLVSDFRKDFQFYKVREINNYHHAHDAYLNAVVGTALIKKYPKLESEFVYGDYKVYDVRKMIAKSEQEIGKATAKYFFYSNIMNFFKTEITLANGEIRKRPLIETNGETGEIVWDKGRDFATVRKVLSMPQVNIVKKTEVQTGGFSKESILPKRNSDKLIARKKDWDPKKYGGFDSPTVAYSVLVVAKVEKGKSKKLKSVKELLGITIMERSSFEKNPIDFLEAKGYKEVKKDLIIKLPKYSLFELENGRKRMLASAGELQKGNELALPSKYVNFLYLASHYEKLKGSPEDNEQKQLFVEQHKHYLDEIIEQISEFSKRVILADANLDKVLSAYNKHRDKPIREQAENIIHLFTLTNLGAPAAFKYFDTTIDRKRYTSTKEVLDATLIHQSITGLYETRIDLSQLGGDGGEAAAKEAAAKEAAAKGGIPWLMKKPLQLTTLVPLQEYEERLLKQTMLTGSYKEKLQSLFLKYDALWQHWENQVGHRRIKPHHIATGTVNPRPQKQYPINPKAKASIQTVINDLLKQGVLIQQNSIMNTPVYPVPKPDGKWRMVLDYREVNKTIPLIAAQNQHSAGILSSIFRGKYKTTLDLSNGFWAHSITPESYWLTAFTWLGQQYCWTRLPQGFLNSPALFNADVVDLLKEVPNVQVYVDDIYISHDDPREHLEQLEKVFSLLLNAGYVVSLKKSEIAQHEVEFLGFNITKEGRGLTETFKQKLLNITPPRDLKQLQSILGKLNFARNFIPNFSELVKPLYNIIATAPGKYITWTTDNSQQLQNIISMLNSAENLEERNPEVRLIMKVNTSPSAGYIRFYNEFAKRPIMYLNYVYTKAEVKFTNTEKLLTTIHKGLIKALDLGMGQEILVYSPIVSMTKIQKTPLPERKALPIRWITWMSYLEDPRIQFHYDKTLPELQQVPTVTDDIIAKIKHPSEFSMVFYTDGSAIKHPNVNKSHNAGMGIAQVQFKPEFTVINTWSIPLGDHTAQLAEVAAVEFACKKALKIDGPVLIVTDSFYVAESVNKELPYWQSNGFFNNKKKPLKHVSKWKSIADCIQLKPDIIIIHEKGHQPTASTFHTEGNNLADKLATQGSYVVNAGKRTADGSEFEKRTADGSEFESPKKKAKVE

SEQ ID NO: 6399 - protein, 2180 aa, synthetic construct
MPAAKRVKLDGGDKKYSIGLDIGTNSVGWAVITDEYKVPSKKFKVLGNTDRHSIKKNLIGALLFDSGETAEATRLKRTARRRYTRRKNRICYLQEIFSNEMAKVDDSFFHRLEESFLVEEDKKHERHPIFGNIVDEVAYHEKYPTIYHLRKKLVDSTDKADLRLIYLALAHMIKFRGHFLIEGDLNPDNSDVDKLFIQLVQTYNQLFEENPINASGVDAKAILSARLSKSRRLENLIAQLPGEKKNGLFGNLIALSLGLTPNFKSNFDLAEDAKLQLSKDTYDDDLDNLLAQIGDQYADLFLAAKNLSDAILLSDILRVNTEITKAPLSASMIKRYDEHHQDLTLLKALVRQQLPEKYKEIFFDQSKNGYAGYIDGGASQEEFYKFIKPILEKMDGTEELLVKLNREDLLRKQRTFDNGSIPHQIHLGELHAILRRQEDFYPFLKDNREKIEKILTFRIPYYVGPLARGNSRFAWMTRKSEETITPWNFEEVVDKGASAQSFIERMTNFDKNLPNEKVLPKHSLLYEYFTVYNELTKVKYVTEGMRKPAFLSGEQKKAIVDLLFKTNRKVTVKQLKEDYFKKIECFDSVEISGVEDRFNASLGTYHDLLKIIKDKDFLDNEENEDILEDIVLTLTLFEDREMIEERLKTYAHLFDDKVMKQLKRRRYTGWGRLSRKLINGIRDKQSGKTILDFLKSDGFANRNFMQLIHDDSLTFKEDIQKAQVSGQGDSLHEHIANLAGSPAIKKGILQTVKVVDELVKVMGRHKPENIVIEMARENQTTQKGQKNSRERMKRIEEGIKELGSQILKEHPVENTQLQNEKLYLYYLQNGRDMYVDQELDINRLSDYDVDHIVPQSFLKDDSIDNKVLTRSDKARGKSDNVPSEEVVKKMKNYWRQLLNAKLITQRKFDNLTKAERGGLSELDKAGFIKRQLVETRQITKHVAQILDSRMNTKYDENDKLIREVKVITLKSKLVSDFRKDFQFYKVREINNYHHAHDAYLNAVVGTALIKKYPKLESEFVYGDYKVYDVRKMIAKSEQEIGKATAKYFFYSNIMNFFKTEITLANGEIRKRPLIETNGETGEIVWDKGRDFATVRKVLSMPQVNIVKKTEVQTGGFSKESILPKRNSDKLIARKKDWDPKKYGGFDSPTVAYSVLVVAKVEKGKSKKLKSVKELLGITIMERSSFEKNPIDFLEAKGYKEVKKDLIIKLPKYSLFELENGRKRMLASAGELQKGNELALPSKYVNFLYLASHYEKLKGSPEDNEQKQLFVEQHKHYLDEIIEQISEFSKRVILADANLDKVLSAYNKHRDKPIREQAENIIHLFTLTNLGAPAAFKYFDTTIDRKRYTSTKEVLDATLIHQSITGLYETRIDLSQLGGDGGEAAAKEAAAKEAAAKGGMDPLQLLQPLEAEIKGTKLKAHWNSGATITCVPQAFLEEEVPIKNIWIKTIHGEKEQPVYYLTFKIQGRKVEAEVISSPYDYILVSPSDIPWLMKKPLQLTTLVPLQEYEERLLKQTMLTGSYKEKLQSLFLKYDALWQHWENQVGHRRIKPHHIATGTVNPRPQKQYPINPKAKASIQTVINDLLKQGVLIQQNSIMNTPVYPVPKPDGKWRMVLDYREVNKTIPLIAAQNQHSAGILSSIFRGKYKTTLDLSNGFWAHSITPESYWLTAFTWLGQQYCWTRLPQGFLNSPALFNADVVDLLKEVPNVQVYVDDIYISHDDPREHLEQLEKVFSLLLNAGYVVSLKKSEIAQHEVEFLGFNITKEGRGLTETFKQKLLNITPPRDLKQLQSILGKLNFARNFIPNFSELVKPLYNIIATAPGKYITWTTDNSQQLQNIISMLNSAENLEERNPEVRLIMKVNTSPSAGYIRFYNEFAKRPIMYLNYVYTKAEVKFTNTEKLLTTIHKGLIKALDLGMGQEILVYSPIVSMTKIQKTPLPERKALPIRWITWMSYLEDPRIQFHYDKTLPELQQVPTVTDDIIAKIKHPSEFSMVFYTDGSAIKHPNVNKSHNAGMGIAQVQFKPEFTVINTWSIPLGDHTAQLAEVAAVEFACKKALKIDGPVLIVTDSFYVAESVNKELPYWQSNGFFNNKKKPLKHVSKWKSIADCIQLKPDIIIIHEKGHQPTASTFHTEGNNLADKLATQGSYVVNAGKRTADGSEFEKRTADGSEFESPKKKAKVE

SEQ ID NO: 6400 - protein, 2180 aa, synthetic construct
MPAAKRVKLDGGDKKYSIGLDIGTNSVGWAVITDEYKVPSKKFKVLGNTDRHSIKKNLIGALLFDSGETAEATRLKRTARRRYTRRKNRICYLQEIFSNEMAKVDDSFFHRLEESFLVEEDKKHERHPIFGNIVDEVAYHEKYPTIYHLRKKLVDSTDKADLRLIYLALAHMIKFRGHFLIEGDLNPDNSDVDKLFIQLVQTYNQLFEENPINASGVDAKAILSARLSKSRRLENLIAQLPGEKKNGLFGNLIALSLGLTPNFKSNFDLAEDAKLQLSKDTYDDDLDNLLAQIGDQYADLFLAAKNLSDAILLSDILRVNTEITKAPLSASMIKRYDEHHQDLTLLKALVRQQLPEKYKEIFFDQSKNGYAGYIDGGASQEEFYKFIKPILEKMDGTEELLVKLNREDLLRKQRTFDNGSIPHQIHLGELHAILRRQEDFYPFLKDNREKIEKILTFRIPYYVGPLARGNSRFAWMTRKSEETITPWNFEEVVDKGASAQSFIERMTNFDKNLPNEKVLPKHSLLYEYFTVYNELTKVKYVTEGMRKPAFLSGEQKKAIVDLLFKTNRKVTVKQLKEDYFKKIECFDSVEISGVEDRFNASLGTYHDLLKIIKDKDFLDNEENEDILEDIVLTLTLFEDREMIEERLKTYAHLFDDKVMKQLKRRRYTGWGRLSRKLINGIRDKQSGKTILDFLKSDGFANRNFMQLIHDDSLTFKEDIQKAQVSGQGDSLHEHIANLAGSPAIKKGILQTVKVVDELVKVMGRHKPENIVIEMARENQTTQKGQKNSRERMKRIEEGIKELGSQILKEHPVENTQLQNEKLYLYYLQNGRDMYVDQELDINRLSDYDVDHIVPQSFLKDDSIDNKVLTRSDKARGKSDNVPSEEVVKKMKNYWRQLLNAKLITQRKFDNLTKAERGGLSELDKAGFIKRQLVETRQITKHVAQILDSRMNTKYDENDKLIREVKVITLKSKLVSDFRKDFQFYKVREINNYHHAHDAYLNAVVGTALIKKYPKLESEFVYGDYKVYDVRKMIAKSEQEIGKATAKYFFYSNIMNFFKTEITLANGEIRKRPLIETNGETGEIVWDKGRDFATVRKVLSMPQVNIVKKTEVQTGGFSKESILPKRNSDKLIARKKDWDPKKYGGFDSPTVAYSVLVVAKVEKGKSKKLKSVKELLGITIMERSSFEKNPIDFLEAKGYKEVKKDLIIKLPKYSLFELENGRKRMLASAGELQKGNELALPSKYVNFLYLASHYEKLKGSPEDNEQKQLFVEQHKHYLDEIIEQISEFSKRVILADANLDKVLSAYNKHRDKPIREQAENIIHLFTLTNLGAPAAFKYFDTTIDRKRYTSTKEVLDATLIHQSITGLYETRIDLSQLGGDGGEAAAKEAAAKEAAAKGGMNPLQLLQPLPAEVKGTKLLAHWNSGATITCIPESFLEDEQPIKQTLIKTIHGEKQQNVYYLTFKVKGRKVEAEVIASPYEYILLSPTDVPWLTQQPLQLTILVPLQEYQDRILNKTALPEEQKQQLKALFTKYDNLWQHWENQVGHRKIRPHNIATGDYPPRPQKQYPINPKAKPSIQIVIDDLLKQGVLTPQNSTMNTPVYPVPKPDGRWRMVLDYREVNKTIPLTAAQNQHSAGILATIVRQKYKTTLDLANGFWAHPITPDSYWLTAFTWQGKQYCWTRLPQGFLNSPALFTADAVDLLKEVPNVQVYVDDIYLSHDNPHEHIQQLEKVFQILLQAGYVVSLKKSEIGQRTVEFLGFNITKEGRGLTDTFKTKLLNVTPPKDLKQLQSILGLLNFARNFIPNFAELVQTLYNLIASSKGKYIEWTEDNTKQLNKVIEALNTASNLEERLPDQRLVIKVNTSPSAGYVRYYNESGKKPIMYLNYVFSKAELKFSMLEKLLTTMHKALIKAMDLAMGQEILVYSPIVSMTKIQKTPLPERKALPIRWITWMTYLEDPRIQFHYDKTLPELKHIPDVYTSSIPPLKHPSQYEGVFCTDGSAIKSPDPTKSNNAGMGIVHAIYNPEYKILNQWSIPLGHHTAQMAEIAAVEFACKKALKVPGPVLVITDSFYVAESANKELPYWKSNGFVNNKKEPLKHISKWKSIAECLSIKPDITIQHEKGHQPINTSIHTEGNALADKLATQGSYVVNAGKRTADGSEFEKRTADGSEFESPKKKAKVE

SEQ ID NO: 6401 - protein, 2098 aa, synthetic construct
MPAAKRVKLDGGDKKYSIGLDIGTNSVGWAVITDEYKVPSKKFKVLGNTDRHSIKKNLIGALLFDSGETAEATRLKRTARRRYTRRKNRICYLQEIFSNEMAKVDDSFFHRLEESFLVEEDKKHERHPIFGNIVDEVAYHEKYPTIYHLRKKLVDSTDKADLRLIYLALAHMIKFRGHFLIEGDLNPDNSDVDKLFIQLVQTYNQLFEENPINASGVDAKAILSARLSKSRRLENLIAQLPGEKKNGLFGNLIALSLGLTPNFKSNFDLAEDAKLQLSKDTYDDDLDNLLAQIGDQYADLFLAAKNLSDAILLSDILRVNTEITKAPLSASMIKRYDEHHQDLTLLKALVRQQLPEKYKEIFFDQSKNGYAGYIDGGASQEEFYKFIKPILEKMDGTEELLVKLNREDLLRKQRTFDNGSIPHQIHLGELHAILRRQEDFYPFLKDNREKIEKILTFRIPYYVGPLARGNSRFAWMTRKSEETITPWNFEEVVDKGASAQSFIERMTNFDKNLPNEKVLPKHSLLYEYFTVYNELTKVKYVTEGMRKPAFLSGEQKKAIVDLLFKTNRKVTVKQLKEDYFKKIECFDSVEISGVEDRFNASLGTYHDLLKIIKDKDFLDNEENEDILEDIVLTLTLFEDREMIEERLKTYAHLFDDKVMKQLKRRRYTGWGRLSRKLINGIRDKQSGKTILDFLKSDGFANRNFMQLIHDDSLTFKEDIQKAQVSGQGDSLHEHIANLAGSPAIKKGILQTVKVVDELVKVMGRHKPENIVIEMARENQTTQKGQKNSRERMKRIEEGIKELGSQILKEHPVENTQLQNEKLYLYYLQNGRDMYVDQELDINRLSDYDVDHIVPQSFLKDDSIDNKVLTRSDKARGKSDNVPSEEVVKKMKNYWRQLLNAKLITQRKFDNLTKAERGGLSELDKAGFIKRQLVETRQITKHVAQILDSRMNTKYDENDKLIREVKVITLKSKLVSDFRKDFQFYKVREINNYHHAHDAYLNAVVGTALIKKYPKLESEFVYGDYKVYDVRKMIAKSEQEIGKATAKYFFYSNIMNFFKTEITLANGEIRKRPLIETNGETGEIVWDKGRDFATVRKVLSMPQVNIVKKTEVQTGGFSKESILPKRNSDKLIARKKDWDPKKYGGFDSPTVAYSVLVVAKVEKGKSKKLKSVKELLGITIMERSSFEKNPIDFLEAKGYKEVKKDLIIKLPKYSLFELENGRKRMLASAGELQKGNELALPSKYVNFLYLASHYEKLKGSPEDNEQKQLFVEQHKHYLDEIIEQISEFSKRVILADANLDKVLSAYNKHRDKPIREQAENIIHLFTLTNLGAPAAFKYFDTTIDRKRYTSTKEVLDATLIHQSITGLYETRIDLSQLGGDGGEAAAKEAAAKEAAAKGGVLNLEEEYRLHEKPVPSSIDPSWLQLFPTVWAERAGMGLANQVPPVVVELRSGASPVAVRQYPMSKEAREGIRPHIQRFLDLGVLVPCQSPWNTPLLPVKKPGTNDYRPVQDLREINKRVQDIHPTVPNPYNLLSSLPPSHTWYSVLDLKDAFFCLKLHPNSQPLFAFEWRDPEKGNTGQLTWTRLPQGFKNSPTLFNEALHRDLAPFRALNPQVVLLQYVDDLLVAAPTYRDCKEGTQKLLQELSKLGYRVSAKKAQLCQKEVTYLGYLLKEGKRWLTPARKATVMKIPPPTTPRQVREFLGTAGFCRLWIPGFASLAAPLYPLTKPSIPFIWTEEHQKAFDRIKEALLSAPALALPDLTKPFTLYVDERAGVARGVLTQTLGPWRRPVAYLSKKLDPVASGWPTCLKAVAAVALLLKDADKLTLGQNVTVIASHSLESIVRQPPDRWMTNARMTHYQSLLLNERVSFAPPAVLNPATLLPVESEATPVHRCSEILAEETGTRRDLKDQPLPGVPAWYTDGSSFIAEGKRRAGAAIVDGKRTVWASSLPEGTSAQKAELVALTQALRLAEGKDINIYTDSRYAFATAHIHGAIYKQRGWLTSAGKDIKNKEEILALLEAIHLPKRVAIIHCPGHQKGNDPVATGNRRADEAAKQAALSTRVLAETTKPAGKRTADGSEFEKRTADGSEFESPKKKAKVE

SEQ ID NO: 6402 - protein, 2100 aa, synthetic construct; identical to SEQ ID NO: 4506

SEQ ID NO: 6403 - protein, 2107 aa, synthetic construct
MPAAKRVKLDGGDKKYSIGLDIGTNSVGWAVITDEYKVPSKKFKVLGNTDRHSIKKNLIGALLFDSGETAEATRLKRTARRRYTRRKNRICYLQEIFSNEMAKVDDSFFHRLEESFLVEEDKKHERHPIFGNIVDEVAYHEKYPTIYHLRKKLVDSTDKADLRLIYLALAHMIKFRGHFLIEGDLNPDNSDVDKLFIQLVQTYNQLFEENPINASGVDAKAILSARLSKSRRLENLIAQLPGEKKNGLFGNLIALSLGLTPNFKSNFDLAEDAKLQLSKDTYDDDLDNLLAQIGDQYADLFLAAKNLSDAILLSDILRVNTEITKAPLSASMIKRYDEHHQDLTLLKALVRQQLPEKYKEIFFDQSKNGYAGYIDGGASQEEFYKFIKPILEKMDGTEELLVKLNREDLLRKQRTFDNGSIPHQIHLGELHAILRRQEDFYPFLKDNREKIEKILTFRIPYYVGPLARGNSRFAWMTRKSEETITPWNFEEVVDKGASAQSFIERMTNFDKNLPNEKVLPKHSLLYEYFTVYNELTKVKYVTEGMRKPAFLSGEQKKAIVDLLFKTNRKVTVKQLKEDYFKKIECFDSVEISGVEDRFNASLGTYHDLLKIIKDKDFLDNEENEDILEDIVLTLTLFEDREMIEERLKTYAHLFDDKVMKQLKRRRYTGWGRLSRKLINGIRDKQSGKTILDFLKSDGFANRNFMQLIHDDSLTFKEDIQKAQVSGQGDSLHEHIANLAGSPAIKKGILQTVKVVDELVKVMGRHKPENIVIEMARENQTTQKGQKNSRERMKRIEEGIKELGSQILKEHPVENTQLQNEKLYLYYLQNGRDMYVDQELDINRLSDYDVDHIVPQSFLKDDSIDNKVLTRSDKARGKSDNVPSEEVVKKMKNYWRQLLNAKLITQRKFDNLTKAERGGLSELDKAGFIKRQLVETRQITKHVAQILDSRMNTKYDENDKLIREVKVITLKSKLVSDFRKDFQFYKVREINNYHHAHDAYLNAVVGTALIKKYPKLESEFVYGDYKVYDVRKMIAKSEQEIGKATAKYFFYSNIMNFFKTEITLANGEIRKRPLIETNGETGEIVWDKGRDFATVRKVLSMPQVNIVKKTEVQTGGFSKESILPKRNSDKLIARKKDWDPKKYGGFDSPTVAYSVLVVAKVEKGKSKKLKSVKELLGITIMERSSFEKNPIDFLEAKGYKEVKKDLIIKLPKYSLFELENGRKRMLASAGELQKGNELALPSKYVNFLYLASHYEKLKGSPEDNEQKQLFVEQHKHYLDEIIEQISEFSKRVILADANLDKVLSAYNKHRDKPIREQAENIIHLFTLTNLGAPAAFKYFDTTIDRKRYTSTKEVLDATLIHQSITGLYETRIDLSQLGGDGGEAAAKEAAAKEAAAKEAAAKGGTAPLEEEYRLFLEAPIQNVTLLEQWKREIPKVWAEINPPGLASTQAPIHVQLLSTALPVRVRQYPITLEAKRSLRETIRKFRAAGILRPVHSPWNTPLLPVRKSGTSEYRMVQDLREVNKRVETIHPTVPNPYTLLSLLPPDRIWYSVLDLKDAFFCIPLAPESQLIFAFEWADAEEGESGQLTWTRLPQGFKNSPTLFDEALNRDLQGFRLDHPSVSLLQYVDDLLIAADTQAACLSATRDLLMTLAELGYRVSGKKAQLCQEEVTYLGFKIHKGSRSLSNSRTQAILQIPVPKTKRQVREFLGTIGYCRLWIPGFAELAQPLYAATRGGNDPLVWGEKEEEAFQSLKLALTQPPALALPSLDKPFQLFVEETSGAAKGVLTQALGPWKRPVAYLSKRLDPVAAGWPRCLRAIAAAALLTREASKLTFGQDIEITSSHNLESLLRSPPDKWLTNARITQYQVLLLDPPRVRFKQTAALNPATLLPETDDTLPIHHCLDTLDSLTSTRPDLTDQPLAQAEATLFTDGSSYIRDGKRYAGAAVVTLDSVIWAEPLPIGTSAQKAELIALTKALEWSKDKSVNIYTDSRYAFATLHVHGMIYRERGLLTAGGKAIKNAPEILALLTAVWLPKRVAVMHCKGHQKDDAPTSTGNRRADEVAREVAIRPLSTQATISAGKRTADGSEFEKRTADGSEFESPKKKAKVE

SEQ ID NO: 6404 - protein, 2107 aa, synthetic construct
MPAAKRVKLDGGDKKYSIGLDIGTNSVGWAVITDEYKVPSKKFKVLGNTDRHSIKKNLIGALLFDSGETAEATRLKRTARRRYTRRKNRICYLQEIFSNEMAKVDDSFFHRLEESFLVEEDKKHERHPIFGNIVDEVAYHEKYPTIYHLRKKLVDSTDKADLRLIYLALAHMIKFRGHFLIEGDLNPDNSDVDKLFIQLVQTYNQLFEENPINASGVDAKAILSARLSKSRRLENLIAQLPGEKKNGLFGNLIALSLGLTPNFKSNFDLAEDAKLQLSKDTYDDDLDNLLAQIGDQYADLFLAAKNLSDAILLSDILRVNTEITKAPLSASMIKRYDEHHQDLTLLKALVRQQLPEKYKEIFFDQSKNGYAGYIDGGASQEEFYKFIKPILEKMDGTEELLVKLNREDLLRKQRTFDNGSIPHQIHLGELHAILRRQEDFYPFLKDNREKIEKILTFRIPYYVGPLARGNSRFAWMTRKSEETITPWNFEEVVDKGASAQSFIERMTNFDKNLPNEKVLPKHSLLYEYFTVYNELTKVKYVTEGMRKPAFLSGEQKKAIVDLLFKTNRKVTVKQLKEDYFKKIECFDSVEISGVEDRFNASLGTYHDLLKIIKDKDFLDNEENEDILEDIVLTLTLFEDREMIEERLKTYAHLFDDKVMKQLKRRRYTGWGRLSRKLINGIRDKQSGKTILDFLKSDGFANRNFMQLIHDDSLTFKEDIQKAQVSGQGDSLHEHIANLAGSPAIKKGILQTVKVVDELVKVMGRHKPENIVIEMARENQTTQKGQKNSRERMKRIEEGIKELGSQILKEHPVENTQLQNEKLYLYYLQNGRDMYVDQELDINRLSDYDVDHIVPQSFLKDDSIDNKVLTRSDKARGKSDNVPSEEVVKKMKNYWRQLLNAKLITQRKFDNLTKAERGGLSELDKAGFIKRQLVETRQITKHVAQILDSRMNTKYDENDKLIREVKVITLKSKLVSDFRKDFQFYKVREINNYHHAHDAYLNAVVGTALIKKYPKLESEFVYGDYKVYDVRKMIAKSEQEIGKATAKYFFYSNIMNFFKTEITLANGEIRKRPLIETNGETGEIVWDKGRDFATVRKVLSMPQVNIVKKTEVQTGGFSKESILPKRNSDKLIARKKDWDPKKYGGFDSPTVAYSVLVVAKVEKGKSKKLKSVKELLGITIMERSSFEKNPIDFLEAKGYKEVKKDLIIKLPKYSLFELENGRKRMLASAGELQKGNELALPSKYVNFLYLASHYEKLKGSPEDNEQKQLFVEQHKHYLDEIIEQISEFSKRVILADANLDKVLSAYNKHRDKPIREQAENIIHLFTLTNLGAPAAFKYFDTTIDRKRYTSTKEVLDATLIHQSITGLYETRIDLSQLGGDGGEAAAKEAAAKEAAAKEAAAKGGTAPLEEEYRLFLEAPIQNVTLLEQWKREIPKVWAEINPPGLASTQAPIHVQLLSTALPVRVRQYPITLEAKRSLRETIRKFRAAGILRPVHSPWNTPLLPVRKSGTSEYRMVQDLREVNKRVETIHPTVPNPYTLLSLLPPDRIWYSVLDLKDAFFCIPLAPESQLIFAFEWADAEEGESGQLTWTRLPQGFKNSPTLFNEALNRDLQGFRLDHPSVSLLQYVDDLLIAADTQAACLSATRDLLMTLAELGYRVSGKKAQLCQEEVTYLGFKIHKGSRSLSNSRTQAILQIPVPKTKRQVREFLGKIGYCRLFIPGFAELAQPLYAATRPGNDPLVWGEKEEEAFQSLKLALTQPPALALPSLDKPFQLFVEETSGAAKGVLTQALGPWKRPVAYLSKRLDPVAAGWPRCLRAIAAAALLTREASKLTFGQDIEITSSHNLESLLRSPPDKWLTNARITQYQVLLLDPPRVRFKQTAALNPATLLPETDDTLPIHHCLDTLDSLTSTRPDLTDQPLAQAEATLFTDGSSYIRDGKRYAGAAVVTLDSVIWAEPLPIGTSAQKAELIALTKALEWSKDKSVNIYTDSRYAFATLHVHGMIYRERGWLTAGGKAIKNAPEILALLTAVWLPKRVAVMHCKGHQKDDAPTSTGNRRADEVAREVAIRPLSTQATISAGKRTADGSEFEKRTADGSEFESPKKKAKVE

SEQ ID NO: 6405 - protein, 2096 aa, synthetic construct
MPAAKRVKLDGGDKKYSIGLDIGTNSVGWAVITDEYKVPSKKFKVLGNTDRHSIKKNLIGALLFDSGETAEATRLKRTARRRYTRRKNRICYLQEIFSNEMAKVDDSFFHRLEESFLVEEDKKHERHPIFGNIVDEVAYHEKYPTIYHLRKKLVDSTDKADLRLIYLALAHMIKFRGHFLIEGDLNPDNSDVDKLFIQLVQTYNQLFEENPINASGVDAKAILSARLSKSRRLENLIAQLPGEKKNGLFGNLIALSLGLTPNFKSNFDLAEDAKLQLSKDTYDDDLDNLLAQIGDQYADLFLAAKNLSDAILLSDILRVNTEITKAPLSASMIKRYDEHHQDLTLLKALVRQQLPEKYKEIFFDQSKNGYAGYIDGGASQEEFYKFIKPILEKMDGTEELLVKLNREDLLRKQRTFDNGSIPHQIHLGELHAILRRQEDFYPFLKDNREKIEKILTFRIPYYVGPLARGNSRFAWMTRKSEETITPWNFEEVVDKGASAQSFIERMTNFDKNLPNEKVLPKHSLLYEYFTVYNELTKVKYVTEGMRKPAFLSGEQKKAIVDLLFKTNRKVTVKQLKEDYFKKIECFDSVEISGVEDRFNASLGTYHDLLKIIKDKDFLDNEENEDILEDIVLTLTLFEDREMIEERLKTYAHLFDDKVMKQLKRRRYTGWGRLSRKLINGIRDKQSGKTILDFLKSDGFANRNFMQLIHDDSLTFKEDIQKAQVSGQGDSLHEHIANLAGSPAIKKGILQTVKVVDELVKVMGRHKPENIVIEMARENQTTQKGQKNSRERMKRIEEGIKELGSQILKEHPVENTQLQNEKLYLYYLQNGRDMYVDQELDINRLSDYDVDHIVPQSFLKDDSIDNKVLTRSDKARGKSDNVPSEEVVKKMKNYWRQLLNAKLITQRKFDNLTKAERGGLSELDKAGFIKRQLVETRQITKHVAQILDSRMNTKYDENDKLIREVKVITLKSKLVSDFRKDFQFYKVREINNYHHAHDAYLNAVVGTALIKKYPKLESEFVYGDYKVYDVRKMIAKSEQEIGKATAKYFFYSNIMNFFKTEITLANGEIRKRPLIETNGETGEIVWDKGRDFATVRKVLSMPQVNIVKKTEVQTGGFSKESILPKRNSDKLIARKKDWDPKKYGGFDSPTVAYSVLVVAKVEKGKSKKLKSVKELLGITIMERSSFEKNPIDFLEAKGYKEVKKDLIIKLPKYSLFELENGRKRMLASAGELQKGNELALPSKYVNFLYLASHYEKLKGSPEDNEQKQLFVEQHKHYLDEIIEQISEFSKRVILADANLDKVLSAYNKHRDKPIREQAENIIHLFTLTNLGAPAAFKYFDTTIDRKRYTSTKEVLDATLIHQSITGLYETRIDLSQLGGDGGEAAAKEAAAKEAAAKEAAAKGGVPWILKKPLELTIKLDLEEQQGTLLNNSILSKKGKEELKQLFEKYSALWQSWENQVGHRRIRPHKIATGTVKPTPQKQYHINPKAKPDIQIVINDLLKQGVLIQKESTMNTPVYPVPKPNGRWRMVLDYRAVNKVTPLIAVQNQHSYGILGSLFKGRYKTTIDLSNGFWAHPIVPEDYWITAFTWQGKQYCWTVLPQGFLNSPGLFNGDVVDLLQGIPNVEVYVDDVYISHDSEKEHLEYLDILFNRLKEAGYIISLKKSNIANSIVDFLGFQITNEGRGLTDTFKEKLENITAPTTLKQLQSILGLLNFARNFIPDFTELIAPLYALIPKSPKNYVPWQIEHSTTLETLITKLNGAEYLQGRKGDKTLIMKVNASYTTGYIRYYNEGEKKPISYVSIVFSKTELKFTELEKLLTTVHKGLLKALDLSMGQNIHVYSPIVSMQNIQKTPQTAKKALASRWLSWLSYLEDPRIRFFYDPQMPALKDLPAVDTGKDNKKHPSNFQHIFYTDGSAITSPTKEGHLNAGMGIVYFINKDGNLQKQQEWSISLGNHTAQFAEIAAFEFALKKCLPLGGNILVVTDSNYVAKAYNEELDVWASNGFVNNRKKPLKHISKWKSVADLKRLRPDVVVTHEPGHQKLDSSPHAYGNNLADQLATQASFKVHAGKRTADGSEFEKRTADGSEFESPKKKAKVE

SEQ ID NO: 6406 - protein, 2185 aa, synthetic construct
MPAAKRVKLDGGDKKYSIGLDIGTNSVGWAVITDEYKVPSKKFKVLGNTDRHSIKKNLIGALLFDSGETAEATRLKRTARRRYTRRKNRICYLQEIFSNEMAKVDDSFFHRLEESFLVEEDKKHERHPIFGNIVDEVAYHEKYPTIYHLRKKLVDSTDKADLRLIYLALAHMIKFRGHFLIEGDLNPDNSDVDKLFIQLVQTYNQLFEENPINASGVDAKAILSARLSKSRRLENLIAQLPGEKKNGLFGNLIALSLGLTPNFKSNFDLAEDAKLQLSKDTYDDDLDNLLAQIGDQYADLFLAAKNLSDAILLSDILRVNTEITKAPLSASMIKRYDEHHQDLTLLKALVRQQLPEKYKEIFFDQSKNGYAGYIDGGASQEEFYKFIKPILEKMDGTEELLVKLNREDLLRKQRTFDNGSIPHQIHLGELHAILRRQEDFYPFLKDNREKIEKILTFRIPYYVGPLARGNSRFAWMTRKSEETITPWNFEEVVDKGASAQSFIERMTNFDKNLPNEKVLPKHSLLYEYFTVYNELTKVKYVTEGMRKPAFLSGEQKKAIVDLLFKTNRKVTVKQLKEDYFKKIECFDSVEISGVEDRFNASLGTYHDLLKIIKDKDFLDNEENEDILEDIVLTLTLFEDREMIEERLKTYAHLFDDKVMKQLKRRRYTGWGRLSRKLINGIRDKQSGKTILDFLKSDGFANRNFMQLIHDDSLTFKEDIQKAQVSGQGDSLHEHIANLAGSPAIKKGILQTVKVVDELVKVMGRHKPENIVIEMARENQTTQKGQKNSRERMKRIEEGIKELGSQILKEHPVENTQLQNEKLYLYYLQNGRDMYVDQELDINRLSDYDVDHIVPQSFLKDDSIDNKVLTRSDKARGKSDNVPSEEVVKKMKNYWRQLLNAKLITQRKFDNLTKAERGGLSELDKAGFIKRQLVETRQITKHVAQILDSRMNTKYDENDKLIREVKVITLKSKLVSDFRKDFQFYKVREINNYHHAHDAYLNAVVGTALIKKYPKLESEFVYGDYKVYDVRKMIAKSEQEIGKATAKYFFYSNIMNFFKTEITLANGEIRKRPLIETNGETGEIVWDKGRDFATVRKVLSMPQVNIVKKTEVQTGGFSKESILPKRNSDKLIARKKDWDPKKYGGFDSPTVAYSVLVVAKVEKGKSKKLKSVKELLGITIMERSSFEKNPIDFLEAKGYKEVKKDLIIKLPKYSLFELENGRKRMLASAGELQKGNELALPSKYVNFLYLASHYEKLKGSPEDNEQKQLFVEQHKHYLDEIIEQISEFSKRVILADANLDKVLSAYNKHRDKPIREQAENIIHLFTLTNLGAPAAFKYFDTTIDRKRYTSTKEVLDATLIHQSITGLYETRIDLSQLGGDGGEAAAKEAAAKEAAAKEAAAKGGMNPLQLLQPLPAEIKGTKLLAHWNSGATITCIPESFLEDEQPIKKTLIKTIHGEKQQNVYYVTFKVKGRKVEAEVIASPYEYILLSPTDVPWLTQQPLQLTILVPLQEYQEKILSKTALPEDQKQQLKTLFVKYDNLWQHWENQVGHRKIRPHNIATGDYPPRPQKQYPINPKAKPSIQIVIDDLLKQGVLTPQNSTMNTPVYPVPKPDGRWRMVLDYREVNKTIPLTAAQNQHSAGILATIVRQKYKTTLDLANGFWAHPITPESYWLTAFTWQGKQYCWTRLPQGFLNSPALFTADVVDLLKEIPNVQVYVDDIYLSHDDPKEHVQQLEKVFQILLQAGYVVSLKKSEIGQKTVEFLGFNITKEGRGLTDTFKTKLLNITPPKDLKQLQSILGLLNFARNFIPNFAELVQPLYNLIASAKGKYIEWSEENTKQLNMVIEALNTASNLEERLPEQRLVIKVNTSPSAGYVRYYNETGKKPIMYLNYVFSKAELKFSMLEKLLTTMHKALIKAMDLAMGQEILVYSPIVSMTKIQKTPLPERKALPIRWITWMTYLEDPRIQFHYDKTLPELKHIPDVYTSSQSPVKHPSQYEGVFYTDGSAIKSPDPTKSNNAGMGIVHATYKPEYQVLNQWSIPLGNHTAQMAEIAAVEFACKKALKIPGPVLVITDSFYVAESANKELPYWKSNGFVNNKKKPLKHISKWKSIAECLSMKPDITIQHEKGISLQIPVFILKGNALADKLATQGSYVVNAGKRTADGSEFEKRTADGSEFESPKKKAKVE

SEQ ID NO: 6407 - protein, 2103 aa, synthetic construct
MPAAKRVKLDGGDKKYSIGLDIGTNSVGWAVITDEYKVPSKKFKVLGNTDRHSIKKNLIGALLFDSGETAEATRLKRTARRRYTRRKNRICYLQEIFSNEMAKVDDSFFHRLEESFLVEEDKKHERHPIFGNIVDEVAYHEKYPTIYHLRKKLVDSTDKADLRLIYLALAHMIKFRGHFLIEGDLNPDNSDVDKLFIQLVQTYNQLFEENPINASGVDAKAILSARLSKSRRLENLIAQLPGEKKNGLFGNLIALSLGLTPNFKSNFDLAEDAKLQLSKDTYDDDLDNLLAQIGDQYADLFLAAKNLSDAILLSDILRVNTEITKAPLSASMIKRYDEHHQDLTLLKALVRQQLPEKYKEIFFDQSKNGYAGYIDGGASQEEFYKFIKPILEKMDGTEELLVKLNREDLLRKQRTFDNGSIPHQIHLGELHAILRRQEDFYPFLKDNREKIEKILTFRIPYYVGPLARGNSRFAWMTRKSEETITPWNFEEVVDKGASAQSFIERMTNFDKNLPNEKVLPKHSLLYEYFTVYNELTKVKYVTEGMRKPAFLSGEQKKAIVDLLFKTNRKVTVKQLKEDYFKKIECFDSVEISGVEDRFNASLGTYHDLLKIIKDKDFLDNEENEDILEDIVLTLTLFEDREMIEERLKTYAHLFDDKVMKQLKRRRYTGWGRLSRKLINGIRDKQSGKTILDFLKSDGFANRNFMQLIHDDSLTFKEDIQKAQVSGQGDSLHEHIANLAGSPAIKKGILQTVKVVDELVKVMGRHKPENIVIEMARENQTTQKGQKNSRERMKRIEEGIKELGSQILKEHPVENTQLQNEKLYLYYLQNGRDMYVDQELDINRLSDYDVDHIVPQSFLKDDSIDNKVLTRSDKARGKSDNVPSEEVVKKMKNYWRQLLNAKLITQRKFDNLTKAERGGLSELDKAGFIKRQLVETRQITKHVAQILDSRMNTKYDENDKLIREVKVITLKSKLVSDFRKDFQFYKVREINNYHHAHDAYLNAVVGTALIKKYPKLESEFVYGDYKVYDVRKMIAKSEQEIGKATAKYFFYSNIMNFFKTEITLANGEIRKRPLIETNGETGEIVWDKGRDFATVRKVLSMPQVNIVKKTEVQTGGFSKESILPKRNSDKLIARKKDWDPKKYGGFDSPTVAYSVLVVAKVEKGKSKKLKSVKELLGITIMERSSFEKNPIDFLEAKGYKEVKKDLIIKLPKYSLFELENGRKRMLASAGELQKGNELALPSKYVNFLYLASHYEKLKGSPEDNEQKQLFVEQHKHYLDEIIEQISEFSKRVILADANLDKVLSAYNKHRDKPIREQAENIIHLFTLTNLGAPAAFKYFDTTIDRKRYTSTKEVLDATLIHQSITGLYETRIDLSQLGGDGGEAAAKEAAAKEAAAKEAAAKGGVLNLEEEYRLHEKPVPSSIDPSWLQLFPTVWAERAGMGLANQVPPVVVELRSGASPVAVRQYPMSKEAREGIRPHIQKFLDLGVLVPCRSPWNTPLLPVKKPGTNDYRPVQDLREINKRVQDIHPTVPNPYNLLSSLPPSYTWYSVLDLKDAFFCLRLHPNSQPLFAFEWKDPEKGNTGQLTWTRLPQGFKNSPTLFNEALHRDLAPFRALNPQVVLLQYVDDLLVAAPTYEDCKKGTQKLLQELSKLGYRVSAKKAQLCQREVTYLGYLLKEGKRWLTPARKATVMKIPVPTTPRQVREFLGKAGFCRLFIPGFASLAAPLYPLTKPSIPFIWTEEHQQAFDHIKKALLSAPALALPDLTKPFTLYIDERAGVARGVLTQTLGPWRRPVAYLSKKLDPVASGWPTCLKAVAAVALLLKDADKLTLGQNVTVIASHSLESIVRQPPDRWMTNARMTHYQSLLLNERVSFAPPAVLNPATLLPVESEATPVHRCSEILAEETGTRRDLEDQPLPGVPTWYTDGSSFITEGKRRAGAPIVDGKRTVWASSLPEGTSAQKAELVALTQALRLAEGKNINIYTDSRYAFATAHIHGAIYKQRGWLTSAGKDIKNKEEILALLEAIHLPRRVAIIHCPGHQRGSNPVATGNRRADEAAKQAALSTRVLAGTTKPAGKRTADGSEFEKRTADGSEFESPKKKAKVE

SEQ ID NO: 6408 - protein, 2136 aa, synthetic construct
MPAAKRVKLDGGDKKYSIGLDIGTNSVGWAVITDEYKVPSKKFKVLGNTDRHSIKKNLIGALLFDSGETAEATRLKRTARRRYTRRKNRICYLQEIFSNEMAKVDDSFFHRLEESFLVEEDKKHERHPIFGNIVDEVAYHEKYPTIYHLRKKLVDSTDKADLRLIYLALAHMIKFRGHFLIEGDLNPDNSDVDKLFIQLVQTYNQLFEENPINASGVDAKAILSARLSKSRRLENLIAQLPGEKKNGLFGNLIALSLGLTPNFKSNFDLAEDAKLQLSKDTYDDDLDNLLAQIGDQYADLFLAAKNLSDAILLSDILRVNTEITKAPLSASMIKRYDEHHQDLTLLKALVRQQLPEKYKEIFFDQSKNGYAGYIDGGASQEEFYKFIKPILEKMDGTEELLVKLNREDLLRKQRTFDNGSIPHQIHLGELHAILRRQEDFYPFLKDNREKIEKILTFRIPYYVGPLARGNSRFAWMTRKSEETITPWNFEEVVDKGASAQSFIERMTNFDKNLPNEKVLPKHSLLYEYFTVYNELTKVKYVTEGMRKPAFLSGEQKKAIVDLLFKTNRKVTVKQLKEDYFKKIECFDSVEISGVEDRFNASLGTYHDLLKIIKDKDFLDNEENEDILEDIVLTLTLFEDREMIEERLKTYAHLFDDKVMKQLKRRRYTGWGRLSRKLINGIRDKQSGKTILDFLKSDGFANRNFMQLIHDDSLTFKEDIQKAQVSGQGDSLHEHIANLAGSPAIKKGILQTVKVVDELVKVMGRHKPENIVIEMARENQTTQKGQKNSRERMKRIEEGIKELGSQILKEHPVENTQLQNEKLYLYYLQNGRDMYVDQELDINRLSDYDVDHIVPQSFLKDDSIDNKVLTRSDKARGKSDNVPSEEVVKKMKNYWRQLLNAKLITQRKFDNLTKAERGGLSELDKAGFIKRQLVETRQITKHVAQILDSRMNTKYDENDKLIREVKVITLKSKLVSDFRKDFQFYKVREINNYHHAHDAYLNAVVGTALIKKYPKLESEFVYGDYKVYDVRKMIAKSEQEIGKATAKYFFYSNIMNFFKTEITLANGEIRKRPLIETNGETGEIVWDKGRDFATVRKVLSMPQVNIVKKTEVQTGGFSKESILPKRNSDKLIARKKDWDPKKYGGFDSPTVAYSVLVVAKVEKGKSKKLKSVKELLGITIMERSSFEKNPIDFLEAKGYKEVKKDLIIKLPKYSLFELENGRKRMLASAGELQKGNELALPSKYVNFLYLASHYEKLKGSPEDNEQKQLFVEQHKHYLDEIIEQISEFSKRVILADANLDKVLSAYNKHRDKPIREQAENIIHLFTLTNLGAPAAFKYFDTTIDRKRYTSTKEVLDATLIHQSITGLYETRIDLSQLGGDGGEAAAKEAAAKEAAAKEAAAKGGLLGRDLLTKLKAQIQFSTEGPQVTWEDRPAMCLVLNLEEEYRLHEKPVPPSIDPSWLQLFPMVWAEKAGMGLANQVPPVVVELKSDASPVAVRQYPMSKEAREGIRPHIQRFLDLGILVPCQSPWNTPLLPVKKPGTNDYRPVQDLREVNKRVQDIHPTVPNPYNLLSSLPPSHTWYSVLDLKDAFFCLKLHPNSQPLFAFEWRDPEKGNTGQLTWTRLPQGFKNSPTLFDEALHRDLASFRALNPQVVMLQYVDDLLVAAPTYRDCKEGTRRLLQELSKLGYRVSAKKAQLCREEVTYLGYLLKGGKRWLTPARKATVMKIPTPTTPRQVREFLGTAGFCRLWIPGFASLAAPLYPLTREKVPFTWTEAHQEAFGRIKEALLSAPALALPDLTKPFALYVDEKEGVARGVLTQTLGPWRRPVAYLSKKLDPVASGWPTCLKAIAAVALLLKDADKLTLGQNVLVIAPHNLESIVRQPPDRWMTNARMTHYQSLLLNERVSFAPPAILNPATLLPVESDDTPIHICSEILAEETGTRPDLRDQPLPGVPAWYTDGSSFIMDGRRQAGAAIVDNKRTVWASNLPEGTSAQKAELIALTQALRLAEGKSINIYTDSRYAFATAHVHGAIYKQRGLLTSAGKDIKNKEEILALLEAIHLPKRVAIIHCPGHQRGTDPVATGNRKADEAAKQAAQSTRILTETTKNAGKRTADGSEFEKRTADGSEFESPKKKAKVE

SEQ ID NO: 6409 - protein, 2136 aa, synthetic construct
MPAAKRVKLDGGDKKYSIGLDIGTNSVGWAVITDEYKVPSKKFKVLGNTDRHSIKKNLIGALLFDSGETAEATRLKRTARRRYTRRKNRICYLQEIFSNEMAKVDDSFFHRLEESFLVEEDKKHERHPIFGNIVDEVAYHEKYPTIYHLRKKLVDSTDKADLRLIYLALAHMIKFRGHFLIEGDLNPDNSDVDKLFIQLVQTYNQLFEENPINASGVDAKAILSARLSKSRRLENLIAQLPGEKKNGLFGNLIALSLGLTPNFKSNFDLAEDAKLQLSKDTYDDDLDNLLAQIGDQYADLFLAAKNLSDAILLSDILRVNTEITKAPLSASMIKRYDEHHQDLTLLKALVRQQLPEKYKEIFFDQSKNGYAGYIDGGASQEEFYKFIKPILEKMDGTEELLVKLNREDLLRKQRTFDNGSIPHQIHLGELHAILRRQEDFYPFLKDNREKIEKILTFRIPYYVGPLARGNSRFAWMTRKSEETITPWNFEEVVDKGASAQSFIERMTNFDKNLPNEKVLPKHSLLYEYFTVYNELTKVKYVTEGMRKPAFLSGEQKKAIVDLLFKTNRKVTVKQLKEDYFKKIECFDSVEISGVEDRFNASLGTYHDLLKIIKDKDFLDNEENEDILEDIVLTLTLFEDREMIEERLKTYAHLFDDKVMKQLKRRRYTGWGRLSRKLINGIRDKQSGKTILDFLKSDGFANRNFMQLIHDDSLTFKEDIQKAQVSGQGDSLHEHIANLAGSPAIKKGILQTVKVVDELVKVMGRHKPENIVIEMARENQTTQKGQKNSRERMKRIEEGIKELGSQILKEHPVENTQLQNEKLYLYYLQNGRDMYVDQELDINRLSDYDVDHIVPQSFLKDDSIDNKVLTRSDKARGKSDNVPSEEVVKKMKNYWRQLLNAKLITQRKFDNLTKAERGGLSELDKAGFIKRQLVETRQITKHVAQILDSRMNTKYDENDKLIREVKVITLKSKLVSDFRKDFQFYKVREINNYHHAHDAYLNAVVGTALIKKYPKLESEFVYGDYKVYDVRKMIAKSEQEIGKATAKYFFYSNIMNFFKTEITLANGEIRKRPLIETNGETGEIVWDKGRDFATVRKVLSMPQVNIVKKTEVQTGGFSKESILPKRNSDKLIARKKDWDPKKYGGFDSPTVAYSVLVVAKVEKGKSKKLKSVKELLGITIMERSSFEKNPIDFLEAKGYKEVKKDLIIKLPKYSLFELENGRKRMLASAGELQKGNELALPSKYVNFLYLASHYEKLKGSPEDNEQKQLFVEQHKHYLDEIIEQISEFSKRVILADANLDKVLSAYNKHRDKPIREQAENIIHLFTLTNLGAPAAFKYFDTTIDRKRYTSTKEVLDATLIHQSITGLYETRIDLSQLGGDGGEAAAKEAAAKEAAAKEAAAKGGLLGRDLLTKLKAQIQFSTEGPQVTWEDRPAMCLVLNLEEEYRLHEKPVPPSIDPSWLQLFPMVWAEKAGMGLANQVPPVVVELKSDASPVAVRQYPMSKEAREGIRPHIQRFLDLGILVPCQSPWNTPLLPVKKPGTNDYRPVQDLREVNKRVQDIHPTVPNPYNLLSSLPPSHTWYSVLDLKDAFFCLKLHPNSQPLFAFEWRDPEKGNTGQLTWTRLPQGFKNSPTLFNEALHRDLASFRALNPQVVMLQYVDDLLVAAPTYRDCKEGTRRLLQELSKLGYRVSAKKAQLCREEVTYLGYLLKGGKRWLTPARKATVMKIPTPTTPRQVREFLGTAGFCRLWIPGFASLAAPLYPLTRPKVPFTWTEAHQEAFGRIKEALLSAPALALPDLTKPFALYVDEKEGVARGVLTQTLGPWRRPVAYLSKKLDPVASGWPTCLKAIAAVALLLKDADKLTLGQNVLVIAPHNLESIVRQPPDRWMTNARMTHYQSLLLNERVSFAPPAILNPATLLPVESDDTPIHICSEILAEETGTRPDLRDQPLPGVPAWYTDGSSFIMDGRRQAGAAIVDNKRTVWASNLPEGTSAQKAELIALTQALRLAEGKSINIYTDSRYAFATAHVHGAIYKQRGWLTSAGKDIKNKEEILALLEAIHLPKRVAIIHCPGHQRGTDPVATGNRKADEAAKQAAQSTRILTETTKNAGKRTADGSEFEKRTADGSEFESPKKKAKVE

SEQ ID NO: 6410 - protein, 2227 aa, synthetic construct
MPAAKRVKLDGGDKKYSIGLDIGTNSVGWAVITDEYKVPSKKFKVLGNTDRHSIKKNLIGALLFDSGETAEATRLKRTARRRYTRRKNRICYLQEIFSNEMAKVDDSFFHRLEESFLVEEDKKHERHPIFGNIVDEVAYHEKYPTIYHLRKKLVDSTDKADLRLIYLALAHMIKFRGHFLIEGDLNPDNSDVDKLFIQLVQTYNQLFEENPINASGVDAKAILSARLSKSRRLENLIAQLPGEKKNGLFGNLIALSLGLTPNFKSNFDLAEDAKLQLSKDTYDDDLDNLLAQIGDQYADLFLAAKNLSDAILLSDILRVNTEITKAPLSASMIKRYDEHHQDLTLLKALVRQQLPEKYKEIFFDQSKNGYAGYIDGGASQEEFYKFIKPILEKMDGTEELLVKLNREDLLRKQRTFDNGSIPHQIHLGELHAILRRQEDFYPFLKDNREKIEKILTFRIPYYVGPLARGNSRFAWMTRKSEETITPWNFEEVVDKGASAQSFIERMTNFDKNLPNEKVLPKHSLLYEYFTVYNELTKVKYVTEGMRKPAFLSGEQKKAIVDLLFKTNRKVTVKQLKEDYFKKIECFDSVEISGVEDRFNASLGTYHDLLKIIKDKDFLDNEENEDILEDIVLTLTLFEDREMIEERLKTYAHLFDDKVMKQLKRRRYTGWGRLSRKLINGIRDKQSGKTILDFLKSDGFANRNFMQLIHDDSLTFKEDIQKAQVSGQGDSLHEHIANLAGSPAIKKGILQTVKVVDELVKVMGRHKPENIVIEMARENQTTQKGQKNSRERMKRIEEGIKELGSQILKEHPVENTQLQNEKLYLYYLQNGRDMYVDQELDINRLSDYDVDHIVPQSFLKDDSIDNKVLTRSDKARGKSDNVPSEEVVKKMKNYWRQLLNAKLITQRKFDNLTKAERGGLSELDKAGFIKRQLVETRQITKHVAQILDSRMNTKYDENDKLIREVKVITLKSKLVSDFRKDFQFYKVREINNYHHAHDAYLNAVVGTALIKKYPKLESEFVYGDYKVYDVRKMIAKSEQEIGKATAKYFFYSNIMNFFKTEITLANGEIRKRPLIETNGETGEIVWDKGRDFATVRKVLSMPQVNIVKKTEVQTGGFSKESILPKRNSDKLIARKKDWDPKKYGGFDSPTVAYSVLVVAKVEKGKSKKLKSVKELLGITIMERSSFEKNPIDFLEAKGYKEVKKDLIIKLPKYSLFELENGRKRMLASAGELQKGNELALPSKYVNFLYLASHYEKLKGSPEDNEQKQLFVEQHKHYLDEIIEQISEFSKRVILADANLDKVLSAYNKHRDKPIREQAENIIHLFTLTNLGAPAAFKYFDTTIDRKRYTSTKEVLDATLIHQSITGLYETRIDLSQLGGDGGEAAAKEAAAKEAAAKEAAAKGGTLGDQGSRGSDPLPEPRVTLTVEGIPTEFLVNTGAEHSVLTKPMGKMGSKRTVVAGATGSKVYPWTTKRLLKIGQKQVTHSFLVIPECPAPLLGRDLLTKLKAQIQFSTEGPQVTWEDRPAMCLVLNLEEEYRLHEKPVPPSIDPSWLQLFPMVWAEKAGMGLANQVPPVVVELKSDASPVAVRQYPMSKEAREGIRPHIQRFLDLGILVPCQSPWNTPLLPVKKPGTNDYRPVQDLREVNKRVQDIHPTVPNPYNLLSSLPPSHTWYSVLDLKDAFFCLKLHPNSQPLFAFEWRDPEKGNTGQLTWTRLPQGFKNSPTLFNEALHRDLASFRALNPQVVMLQYVDDLLVAAPTYRDCKEGTRRLLQELSKLGYRVSAKKAQLCREEVTYLGYLLKGGKRWLTPARKATVMKIPTPTTPRQVREFLGTAGFCRLWIPGFASLAAPLYPLTRPKVPFTWTEAHQEAFGRIKEALLSAPALALPDLTKPFALYVDEKEGVARGVLTQTLGPWRRPVAYLSKKLDPVASGWPTCLKAIAAVALLLKDADKLTLGQNVLVIAPHNLESIVRQPPDRWMTNARMTHYQSLLLNERVSFAPPAILNPATLLPVESDDTPIHICSEILAEETGTRPDLRDQPLPGVPAWYTDGSSFIMDGRRQAGAAIVDNKRTVWASNLPEGTSAQKAELIALTQALRLAEGKSINIYTDSRYAFATAHVHGAIYKQRGWLTSAGKDIKNKEEILALLEAIHLPKRVAIIHCPGHQRGTDPVATGNRKADEAAKQAAQSTRILTETTKNAGKRTADGSEFEKRTADGSEFESPKKKAKVE

SEQ ID NO: 6411 - protein, 2105 aa, synthetic construct
MPAAKRVKLDGGDKKYSIGLDIGTNSVGWAVITDEYKVPSKKFKVLGNTDRHSIKKNLIGALLFDSGETAEATRLKRTARRRYTRRKNRICYLQEIFSNEMAKVDDSFFHRLEESFLVEEDKKHERHPIFGNIVDEVAYHEKYPTIYHLRKKLVDSTDKADLRLIYLALAHMIKFRGHFLIEGDLNPDNSDVDKLFIQLVQTYNQLFEENPINASGVDAKAILSARLSKSRRLENLIAQLPGEKKNGLFGNLIALSLGLTPNFKSNFDLAEDAKLQLSKDTYDDDLDNLLAQIGDQYADLFLAAKNLSDAILLSDILRVNTEITKAPLSASMIKRYDEHHQDLTLLKALVRQQLPEKYKEIFFDQSKNGYAGYIDGGASQEEFYKFIKPILEKMDGTEELLVKLNREDLLRKQRTFDNGSIPHQIHLGELHAILRRQEDFYPFLKDNREKIEKILTFRIPYYVGPLARGNSRFAWMTRKSEETITPWNFEEVVDKGASAQSFIERMTNFDKNLPNEKVLPKHSLLYEYFTVYNELTKVKYVTEGMRKPAFLSGEQKKAIVDLLFKTNRKVTVKQLKEDYFKKIECFDSVEISGVEDRFNASLGTYHDLLKIIKDKDFLDNEENEDILEDIVLTLTLFEDREMIEERLKTYAHLFDDKVMKQLKRRRYTGWGRLSRKLINGIRDKQSGKTILDFLKSDGFANRNFMQLIHDDSLTFKEDIQKAQVSGQGDSLHEHIANLAGSPAIKKGILQTVKVVDELVKVMGRHKPENIVIEMARENQTTQKGQKNSRERMKRIEEGIKELGSQILKEHPVENTQLQNEKLYLYYLQNGRDMYVDQELDINRLSDYDVDHIVPQSFLKDDSIDNKVLTRSDKARGKSDNVPSEEVVKKMKNYWRQLLNAKLITQRKFDNLTKAERGGLSELDKAGFIKRQLVETRQITKHVAQILDSRMNTKYDENDKLIREVKVITLKSKLVSDFRKDFQFYKVREINNYHHAHDAYLNAVVGTALIKKYPKLESEFVYGDYKVYDVRKMIAKSEQEIGKATAKYFFYSNIMNFFKTEITLANGEIRKRPLIETNGETGEIVWDKGRDFATVRKVLSMPQVNIVKKTEVQTGGFSKESILPKRNSDKLIARKKDWDPKKYGGFDSPTVAYSVLVVAKVEKGKSKKLKSVKELLGITIMERSSFEKNPIDFLEAKGYKEVKKDLIIKLPKYSLFELENGRKRMLASAGELQKGNELALPSKYVNFLYLASHYEKLKGSPEDNEQKQLFVEQHKHYLDEIIEQISEFSKRVILADANLDKVLSAYNKHRDKPIREQAENIIHLFTLTNLGAPAAFKYFDTTIDRKRYTSTKEVLDATLIHQSITGLYETRIDLSQLGGDGGEAAAKEAAAKEAAAKEAAAKGGTLNIEDEHRLHETSKEPDVSLGSTWLSDFPQAWAETGGMGLAVRQAPLIIPLKATSTPVSIKQYPMSQEARLGIKPHIQRLLDQGILVPCQSPWNTPLLPVKKPGTNDYRPVQDLREVNKRVEDIHPTVPNPYNLLSGLPPSHQWYTVLDLKDAFFCLRLHPTSQPLFAFEWRDPEMGISGQLTWTRLPQGFKNSPTLFDEALHRDLADFRIQHPDLILLQYVDDLLLAATSELDCQQGTRALLQTLGNLGYRASAKKAQICQKQVKYLGYLLKEGQRWLTEARKETVMGQPTPKTPRQLREFLGTAGFCRLWIPGFAEMAAPLYPLTKTGTLFNWGPDQQKAYQEIKQALLTAPALGLPDLTKPFELFVDEKQGYAKGVLTQKLGPWRRPVAYLSKKLDPVAAGWPPCLRMVAAIAVLTKDAGKLTMGQPLVILAPHAVEALVKQPPDRWLSNARMTHYQALLLDTDRVQFGPVVALNPATLLPLPEEGLQHNCLDILAEAHGTRPDLTDQPLPDADHTWYTDGSSLLQEGQRKAGAAVTTETEVIWAKALPAGTSAQRAELIALTQALKMAEGKKLNVYTDSRYAFATAHIHGEIYRRRGLLTSEGKEIKNKDEILALLKALFLPKRLSIIHCPGHQKGHSAEARGNRMADQAARKAAITETPDTSTLLAGKRTADGSEFEKRTADGSEFESPKKKAKVE

SEQ ID NO: 6412 - protein, 2099 aa, synthetic construct
MPAAKRVKLDGGDKKYSIGLDIGTNSVGWAVITDEYKVPSKKFKVLGNTDRHSIKKNLIGALLFDSGETAEATRLKRTARRRYTRRKNRICYLQEIFSNEMAKVDDSFFHRLEESFLVEEDKKHERHPIFGNIVDEVAYHEKYPTIYHLRKKLVDSTDKADLRLIYLALAHMIKFRGHFLIEGDLNPDNSDVDKLFIQLVQTYNQLFEENPINASGVDAKAILSARLSKSRRLENLIAQLPGEKKNGLFGNLIALSLGLTPNFKSNFDLAEDAKLQLSKDTYDDDLDNLLAQIGDQYADLFLAAKNLSDAILLSDILRVNTEITKAPLSASMIKRYDEHHQDLTLLKALVRQQLPEKYKEIFFDQSKNGYAGYIDGGASQEEFYKFIKPILEKMDGTEELLVKLNREDLLRKQRTFDNGSIPHQIHLGELHAILRRQEDFYPFLKDNREKIEKILTFRIPYYVGPLARGNSRFAWMTRKSEETITPWNFEEVVDKGASAQSFIERMTNFDKNLPNEKVLPKHSLLYEYFTVYNELTKVKYVTEGMRKPAFLSGEQKKAIVDLLFKTNRKVTVKQLKEDYFKKIECFDSVEISGVEDRFNASLGTYHDLLKIIKDKDFLDNEENEDILEDIVLTLTLFEDREMIEERLKTYAHLFDDKVMKQLKRRRYTGWGRLSRKLINGIRDKQSGKTILDFLKSDGFANRNFMQLIHDDSLTFKEDIQKAQVSGQGDSLHEHIANLAGSPAIKKGILQTVKVVDELVKVMGRHKPENIVIEMARENQTTQKGQKNSRERMKRIEEGIKELGSQILKEHPVENTQLQNEKLYLYYLQNGRDMYVDQELDINRLSDYDVDHIVPQSFLKDDSIDNKVLTRSDKARGKSDNVPSEEVVKKMKNYWRQLLNAKLITQRKFDNLTKAERGGLSELDKAGFIKRQLVETRQITKHVAQILDSRMNTKYDENDKLIREVKVITLKSKLVSDFRKDFQFYKVREINNYHHAHDAYLNAVVGTALIKKYPKLESEFVYGDYKVYDVRKMIAKSEQEIGKATAKYFFYSNIMNFFKTEITLANGEIRKRPLIETNGETGEIVWDKGRDFATVRKVLSMPQVNIVKKTEVQTGGFSKESILPKRNSDKLIARKKDWDPKKYGGFDSPTVAYSVLVVAKVEKGKSKKLKSVKELLGITIMERSSFEKNPIDFLEAKGYKEVKKDLIIKLPKYSLFELENGRKRMLASAGELQKGNELALPSKYVNFLYLASHYEKLKGSPEDNEQKQLFVEQHKHYLDEIIEQISEFSKRVILADANLDKVLSAYNKHRDKPIREQAENIIHLFTLTNLGAPAAFKYFDTTIDRKRYTSTKEVLDATLIHQSITGLYETRIDLSQLGGDGGEAAAKEAAAKEAAAKEAAAKGGTLQLDDEYRLYSPLVKPDQNIQFWLEQFPQAWAETAGMGLAKQVPPQVIQLKASATPVSVRQYPLSKEAQEGIRPHVQRLIQQGILVPVQSPWNTPLLPVRKPGTNDYRPVQDLREVNKRVQDIHPTVPNPYNLLCALPPQRSWYTVLDLKDAFFCLRLHPTSQPLFAFEWRDPGTGRTGQLTWTRLPQGFKNSPTIFDEALHRDLANFRIQHPQVTLLQYVDDLLLAGATKQDCLEGTKALLLELSDLGYRASAKKAQICRREVTYLGYSLRDGQRWLTEARKKTVVQIPAPTTAKQVREFLGTAGFCRLWIPGFATLAAPLYPLTKEKGEFSWAPEHQKAFDAIKKALLSAPALALPDVTKPFTLYVDERKGVARGVLTQTLGPWRRPVAYLSKKLDPVASGWPVCLKAIAAVAILVKDADKLTLGQNITVIAPHALENIVRQPPDRWMTNARMTHYQSLLLTERVTFAPPAALNPATLLPEETDEPVTHDCHQLLIEETGVRKDLTDIPLTGEVLTWFTDGSSYVVEGKRMAGAAVVDGTRTIWASSLPEGTSAQKAELMALTQALRLAEGKSINIYTDSRYAFATAHVHGAIYKQRGLLTSAGREIKNKEEILSLLEALHLPKRLAIIHCPGHQKAKDPISRGNQMADRVAKQAAQGVNLLAGKRTADGSEFEKRTADGSEFESPKKKAKVE

SEQ ID NO: 6413 - protein, 2099 aa, synthetic construct; identical to SEQ ID NO: 6412

SEQ ID NO: 6414 - protein, 2096 aa, synthetic construct
MPAAKRVKLDGGDKKYSIGLDIGTNSVGWAVITDEYKVPSKKFKVLGNTDRHSIKKNLIGALLFDSGETAEATRLKRTARRRYTRRKNRICYLQEIFSNEMAKVDDSFFHRLEESFLVEEDKKHERHPIFGNIVDEVAYHEKYPTIYHLRKKLVDSTDKADLRLIYLALAHMIKFRGHFLIEGDLNPDNSDVDKLFIQLVQTYNQLFEENPINASGVDAKAILSARLSKSRRLENLIAQLPGEKKNGLFGNLIALSLGLTPNFKSNFDLAEDAKLQLSKDTYDDDLDNLLAQIGDQYADLFLAAKNLSDAILLSDILRVNTEITKAPLSASMIKRYDEHHQDLTLLKALVRQQLPEKYKEIFFDQSKNGYAGYIDGGASQEEFYKFIKPILEKMDGTEELLVKLNREDLLRKQRTFDNGSIPHQIHLGELHAILRRQEDFYPFLKDNREKIEKILTFRIPYYVGPLARGNSRFAWMTRKSEETITPWNFEEVVDKGASAQSFIERMTNFDKNLPNEKVLPKHSLLYEYFTVYNELTKVKYVTEGMRKPAFLSGEQKKAIVDLLFKTNRKVTVKQLKEDYFKKIECFDSVEISGVEDRFNASLGTYHDLLKIIKDKDFLDNEENEDILEDIVLTLTLFEDREMIEERLKTYAHLFDDKVMKQLKRRRYTGWGRLSRKLINGIRDKQSGKTILDFLKSDGFANRNFMQLIHDDSLTFKEDIQKAQVSGQGDSLHEHIANLAGSPAIKKGILQTVKVVDELVKVMGRHKPENIVIEMARENQTTQKGQKNSRERMKRIEEGIKELGSQILKEHPVENTQLQNEKLYLYYLQNGRDMYVDQELDINRLSDYDVDHIVPQSFLKDDSIDNKVLTRSDKARGKSDNVPSEEVVKKMKNYWRQLLNAKLITQRKFDNLTKAERGGLSELDKAGFIKRQLVETRQITKHVAQILDSRMNTKYDENDKLIREVKVITLKSKLVSDFRKDFQFYKVREINNYHHAHDAYLNAVVGTALIKKYPKLESEFVYGDYKVYDVRKMIAKSEQEIGKATAKYFFYSNIMNFFKTEITLANGEIRKRPLIETNGETGEIVWDKGRDFATVRKVLSMPQVNIVKKTEVQTGGFSKESILPKRNSDKLIARKKDWDPKKYGGFDSPTVAYSVLVVAKVEKGKSKKLKSVKELLGITIMERSSFEKNPIDFLEAKGYKEVKKDLIIKLPKYSLFELENGRKRMLASAGELQKGNELALPSKYVNFLYLASHYEKLKGSPEDNEQKQLFVEQHKHYLDEIIEQISEFSKRVILADANLDKVLSAYNKHRDKPIREQAENIIHLFTLTNLGAPAAFKYFDTTIDRKRYTSTKEVLDATLIHQSITGLYETRIDLSQLGGDGGEAAAKEAAAKEAAAKEAAAKGGVPWLMKKPLQLTVLVPLHEYQERLLQQTALPKEQKELLQKLFLKYDALWQHWENQVGHRRIKPHNIATGTLAPRPQKQYPINPKAKPSIQIVIDDLLKQGVLIQQNSTMNTPVYPVPKPDGKWRMVLDYREVNKTIPLIAAQNQHSAGILSSIYRGKYKTTLDLTNGFWAHPITPESYWLTAFTWQGKQYCWTRLPQGFLNSPALFNADVVDLLKEIPNVQAYVDDIYISHDDPQEHLEQLEKIFSILLNAGYVVSLKKSEIAQREVEFLGFNITKEGRGLTDTFKQKLLNITPPKDLKQLQSILGKLNFARNFIPNYSELVKPLYTIVAPANGKFISWTEDNSNQLQHIISVLNQADNLEERNPETRLIIKVNSSPSAGYIRYYNEGSKRPIMYVNYIFSKAEAKFTQTEKLLTTMHKGLIKAMDLAMGQEILVYSPIVSMTKIQRTPLPERKALPVRWITWMTYLEDPRIQFHYDKSLPELQQIPNVTEDVIAKTKHPSEFAMVFYTDGSAIKHPDVNKSHSAGMGIAQVQFIPEYKIVHQWSIPLGDHTAQLAEIAAVEFACKKALKISGPVLIVTDSFYVAESANKELPYWKSNGFLNNKKKPLRHVSKWKSIAECLQLKPDIIIMHEKGHQQPMTTLHTEGNNLADKLATQGSYVVHAGKRTADGSEFEKRTADGSEFESPKKKAKVE

SEQ ID NO: 6415 - protein, 2185 aa, synthetic construct
MPAAKRVKLDGGDKKYSIGLDIGTNSVGWAVITDEYKVPSKKFKVLGNTDRHSIKKNLIGALLFDSGETAEATRLKRTARRRYTRRKNRICYLQEIFSNEMAKVDDSFFHRLEESFLVEEDKKHERHPIFGNIVDEVAYHEKYPTIYHLRKKLVDSTDKADLRLIYLALAHMIKFRGHFLIEGDLNPDNSDVDKLFIQLVQTYNQLFEENPINASGVDAKAILSARLSKSRRLENLIAQLPGEKKNGLFGNLIALSLGLTPNFKSNFDLAEDAKLQLSKDTYDDDLDNLLAQIGDQYADLFLAAKNLSDAILLSDILRVNTEITKAPLSASMIKRYDEHHQDLTLLKALVRQQLPEKYKEIFFDQSKNGYAGYIDGGASQEEFYKFIKPILEKMDGTEELLVKLNREDLLRKQRTFDNGSIPHQIHLGELHAILRRQEDFYPFLKDNREKIEKILTFRIPYYVGPLARGNSRFAWMTRKSEETITPWNFEEVVDKGASAQSFIERMTNFDKNLPNEKVLPKHSLLYEYFTVYNELTKVKYVTEGMRKPAFLSGEQKKAIVDLLFKTNRKVTVKQLKEDYFKKIECFDSVEISGVEDRFNASLGTYHDLLKIIKDKDFLDNEENEDILEDIVLTLTLFEDREMIEERLKTYAHLFDDKVMKQLKRRRYTGWGRLSRKLINGIRDKQSGKTILDFLKSDGFANRNFMQLIHDDSLTFKEDIQKAQVSGQGDSLHEHIANLAGSPAIKKGILQTVKVVDELVKVMGRHKPENIVIEMARENQTTQKGQKNSRERMKRIEEGIKELGSQILKEHPVENTQLQNEKLYLYYLQNGRDMYVDQELDINRLSDYDVDHIVPQSFLKDDSIDNKVLTRSDKARGKSDNVPSEEVVKKMKNYWRQLLNAKLITQRKFDNLTKAERGGLSELDKAGFIKRQLVETRQITKHVAQILDSRMNTKYDENDKLIREVKVITLKSKLVSDFRKDFQFYKVREINNYHHAHDAYLNAVVGTALIKKYPKLESEFVYGDYKVYDVRKMIAKSEQEIGKATAKYFFYSNIMNFFKTEITLANGEIRKRPLIETNGETGEIVWDKGRDFATVRKVLSMPQVNIVKKTEVQTGGFSKESILPKRNSDKLIARKKDWDPKKYGGFDSPTVAYSVLVVAKVEKGKSKKLKSVKELLGITIMERSSFEKNPIDFLEAKGYKEVKKDLIIKLPKYSLFELENGRKRMLASAGELQKGNELALPSKYVNFLYLASHYEKLKGSPEDNEQKQLFVEQHKHYLDEIIEQISEFSKRVILADANLDKVLSAYNKHRDKPIREQAENIIHLFTLTNLGAPAAFKYFDTTIDRKRYTSTKEVLDATLIHQSITGLYETRIDLSQLGGDGGEAAAKEAAAKEAAAKEAAAKGGMDPLQLLQPLEAEIKGTKLKAHWNSGATITCVPEAFLEDERPIQTMLIKTIHGEKQQDVYYLTFKVQGRKVEAEVLASPYDYILLNPSDVPWLMKKPLQLTVLVPLHEYQERLLQQTALPKEQKELLQKLFLKYDALWQHWENQVGHRRIKPHNIATGTLAPRPQKQYPINPKAKPSIQIVIDDLLKQGVLIQQNSTMNTPVYPVPKPDGKWRMVLDYREVNKTIPLIAAQNQHSAGILSSIYRGKYKTTLDLTNGFWAHPITPESYWLTAFTWQGKQYCWTRLPQGFLNSPALFNADVVDLLKEIPNVQAYVDDIYISHDDPQEHLEQLEKIFSILLNAGYVVSLKKSEIAQREVEFLGFNITKEGRGLTDTFKQKLLNITPPKDLKQLQSILGLLNFARNFIPNYSELVKPLYTIVAPANGKFISWTEDNSNQLQHIISVLNQADNLEERNPETRLIIKVNSSPSAGYIRYYNEGSKRPIMYVNYIFSKAEAKFTQTEKLLTTMHKGLIKAMDLAMGQEILVYSPIVSMTKIQRTPLPERKALPVRWITWMTYLEDPRIQFHYDKSLPELQQIPNVTEDVIAKTKHPSEFAMVFYTDGSAIKHPDVNKSHSAGMGIAQVQFIPEYKIVHQWSIPLGDHTAQLAEIAAVEFACKKALKISGPVLIVTDSFYVAESANKELPYWKSNGFLNNKKKPLRHVSKWKSIAECLQLKPDIIIMHEKGHQQPMTTLHTEGNNLADKLATQGSYVVHAGKRTADGSEFEKRTADGSEFESPKKKAKVE

SEQ ID NO: 6416 - protein, 2185 aa, synthetic construct
MPAAKRVKLDGGDKKYSIGLDIGTNSVGWAVITDEYKVPSKKFKVLGNTDRHSIKKNLIGALLFDSGETAEATRLKRTARRRYTRRKNRICYLQEIFSNEMAKVDDSFFHRLEESFLVEEDKKHERHPIFGNIVDEVAYHEKYPTIYHLRKKLVDSTDKADLRLIYLALAHMIKFRGHFLIEGDLNPDNSDVDKLFIQLVQTYNQLFEENPINASGVDAKAILSARLSKSRRLENLIAQLPGEKKNGLFGNLIALSLGLTPNFKSNFDLAEDAKLQLSKDTYDDDLDNLLAQIGDQYADLFLAAKNLSDAILLSDILRVNTEITKAPLSASMIKRYDEHHQDLTLLKALVRQQLPEKYKEIFFDQSKNGYAGYIDGGASQEEFYKFIKPILEKMDGTEELLVKLNREDLLRKQRTFDNGSIPHQIHLGELHAILRRQEDFYPFLKDNREKIEKILTFRIPYYVGPLARGNSRFAWMTRKSEETITPWNFEEVVDKGASAQSFIERMTNFDKNLPNEKVLPKHSLLYEYFTVYNELTKVKYVTEGMRKPAFLSGEQKKAIVDLLFKTNRKVTVKQLKEDYFKKIECFDSVEISGVEDRFNASLGTYHDLLKIIKDKDFLDNEENEDILEDIVLTLTLFEDREMIEERLKTYAHLFDDKVMKQLKRRRYTGWGRLSRKLINGIRDKQSGKTILDFLKSDGFANRNFMQLIHDDSLTFKEDIQKAQVSGQGDSLHEHIANLAGSPAIKKGILQTVKVVDELVKVMGRHKPENIVIEMARENQTTQKGQKNSRERMKRIEEGIKELGSQILKEHPVENTQLQNEKLYLYYLQNGRDMYVDQELDINRLSDYDVDHIVPQSFLKDDSIDNKVLTRSDKARGKSDNVPSEEVVKKMKNYWRQLLNAKLITQRKFDNLTKAERGGLSELDKAGFIKRQLVETRQITKHVAQILDSRMNTKYDENDKLIREVKVITLKSKLVSDFRKDFQFYKVREINNYHHAHDAYLNAVVGTALIKKYPKLESEFVYGDYKVYDVRKMIAKSEQEIGKATAKYFFYSNIMNFFKTEITLANGEIRKRPLIETNGETGEIVWDKGRDFATVRKVLSMPQVNIVKKTEVQTGGFSKESILPKRNSDKLIARKKDWDPKKYGGFDSPTVAYSVLVVAKVEKGKSKKLKSVKELLGITIMERSSFEKNPIDFLEAKGYKEVKKDLIIKLPKYSLFELENGRKRMLASAGELQKGNELALPSKYVNFLYLASHYEKLKGSPEDNEQKQLFVEQHKHYLDEIIEQISEFSKRVILADANLDKVLSAYNKHRDKPIREQAENIIHLFTLTNLGAPAAFKYFDTTIDRKRYTSTKEVLDATLIHQSITGLYETRIDLSQLGGDGGEAAAKEAAAKEAAAKEAAAKGGMDPLQLLQPLEAEIKGTKLKAHWNSGATITCVPEAFLEDERPIQTMLIKTIHGEKQQDVYYLTFKVQGRKVEAEVLASPYDYILLNPSDVPWLMKKPLQLTVLVPLHEYQERLLQQTALPKEQKELLQKLFLKYDALWQHWENQVGHRRIKPHNIATGTLAPRPQKQYPINPKAKPSIQIVIDDLLKQGVLIQQNSTMNTPVYPVPKPDGKWRMVLDYREVNKTIPLIAAQNQHSAGILSSIYRGKYKTTLDLTNGFWAHPITPESYWLTAFTWQGKQYCWTRLPQGFLNSPALFNADVVDLLKEIPNVQAYVDDIYISHDDPQEHLEQLEKIFSILLNAGYVVSLKKSEIAQREVEFLGFNITKEGRGLTDTFKQKLLNITPPKDLKQLQSILGKLNFARNFIPNYSELVKPLYTIVAPANGKFISWTEDNSNQLQHIISVLNQADNLEERNPETRLIIKVNSSPSAGYIRYYNEGSKRPIMYVNYIFSKAEAKFTQTEKLLTTMHKGLIKAMDLAMGQEILVYSPIVSMTKIQRTPLPERKALPVRWITWMTYLEDPRIQFHYDKSLPELQQIPNVTEDVIAKTKHPSEFAMVFYTDGSAIKHPDVNKSHSAGMGIAQVQFIPEYKIVHQWSIPLGDHTAQLAEIAAVEFACKKALKISGPVLIVTDSFYVAESANKELPYWKSNGFLNNKKKPLRHVSKWKSIAECLQLKPDIIIMHEKGHQQPMTTLHTEGNNLADKLATQGSYVVHAGKRTADGSEFEKRTADGSEFESPKKKAKVE

SEQ ID NO: 6417 - protein, 2185 aa, synthetic construct
MPAAKRVKLDGGDKKYSIGLDIGTNSVGWAVITDEYKVPSKKFKVLGNTDRHSIKKNLIGALLFDSGETAEATRLKRTARRRYTRRKNRICYLQEIFSNEMAKVDDSFFHRLEESFLVEEDKKHERHPIFGNIVDEVAYHEKYPTIYHLRKKLVDSTDKADLRLIYLALAHMIKFRGHFLIEGDLNPDNSDVDKLFIQLVQTYNQLFEENPINASGVDAKAILSARLSKSRRLENLIAQLPGEKKNGLFGNLIALSLGLTPNFKSNFDLAEDAKLQLSKDTYDDDLDNLLAQIGDQYADLFLAAKNLSDAILLSDILRVNTEITKAPLSASMIKRYDEHHQDLTLLKALVRQQLPEKYKEIFFDQSKNGYAGYIDGGASQEEFYKFIKPILEKMDGTEELLVKLNREDLLRKQRTFDNGSIPHQIHLGELHAILRRQEDFYPFLKDNREKIEKILTFRIPYYVGPLARGNSRFAWMTRKSEETITPWNFEEVVDKGASAQSFIERMTNFDKNLPNEKVLPKHSLLYEYFTVYNELTKVKYVTEGMRKPAFLSGEQKKAIVDLLFKTNRKVTVKQLKEDYFKKIECFDSVEISGVEDRFNASLGTYHDLLKIIKDKDFLDNEENEDILEDIVLTLTLFEDREMIEERLKTYAHLFDDKVMKQLKRRRYTGWGRLSRKLINGIRDKQSGKTILDFLKSDGFANRNFMQLIHDDSLTFKEDIQKAQVSGQGDSLHEHIANLAGSPAIKKGILQTVKVVDELVKVMGRHKPENIVIEMARENQTTQKGQKNSRERMKRIEEGIKELGSQILKEHPVENTQLQNEKLYLYYLQNGRDMYVDQELDINRLSDYDVDHIVPQSFLKDDSIDNKVLTRSDKARGKSDNVPSEEVVKKMKNYWRQLLNAKLITQRKFDNLTKAERGGLSELDKAGFIKRQLVETRQITKHVAQILDSRMNTKYDENDKLIREVKVITLKSKLVSDFRKDFQFYKVREINNYHHAHDAYLNAVVGTALIKKYPKLESEFVYGDYKVYDVRKMIAKSEQEIGKATAKYFFYSNIMNFFKTEITLANGEIRKRPLIETNGETGEIVWDKGRDFATVRKVLSMPQVNIVKKTEVQTGGFSKESILPKRNSDKLIARKKDWDPKKYGGFDSPTVAYSVLVVAKVEKGKSKKLKSVKELLGITIMERSSFEKNPIDFLEAKGYKEVKKDLIIKLPKYSLFELENGRKRMLASAGELQKGNELALPSKYVNFLYLASHYEKLKGSPEDNEQKQLFVEQHKHYLDEIIEQISEFSKRVILADANLDKVLSAYNKHRDKPIREQAENIIHLFTLTNLGAPAAFKYFDTTIDRKRYTSTKEVLDATLIHQSITGLYETRIDLSQLGGDGGEAAAKEAAAKEAAAKEAAAKGGMDPLQLLQPLEAEIKGTKLKAHWNSGATITCVPQAFLEEEVPIKNIWIKTIHGEKEQPVYYLTFKIQGRKVEAEVISSPYDYILVSPSDIPWLMKKPLQLTTLVPLQEYEERLLKQTMLTGSYKEKLQSLFLKYDALWQHWENQVGHRRIKPHHIATGTVNPRPQKQYPINPKAKASIQTVINDLLKQGVLIQQNSIMNTPVYPVPKPDGKWRMVLDYREVNKTIPLIAAQNQHSAGILSSIFRGKYKTTLDLSNGFWAHSITPESYWLTAFTWLGQQYCWTRLPQGFLNSPALFNADVVDLLKEVPNVQVYVDDIYISHDDPREHLEQLEKVFSLLLNAGYVVSLKKSEIAQHEVEFLGFNITKEGRGLTETFKQKLLNITPPRDLKQLQSILGLLNFARNFIPNFSELVKPLYNIIATAPGKYITWTTDNSQQLQNIISMLNSAENLEERNPEVRLIMKVNTSPSAGYIRFYNEFAKRPIMYLNYVYTKAEVKFTNTEKLLTTIHKGLIKALDLGMGQEILVYSPIVSMTKIQKTPLPERKALPIRWITWMSYLEDPRIQFHYDKTLPELQQVPTVTDDIIAKIKHPSEFSMVFYTDGSAIKHPNVNKSHNAGMGIAQVQFKPEFTVINTWSIPLGDHTAQLAEVAAVEFACKKALKIDGPVLIVTDSFYVAESVNKELPYWQSNGFFNNKKKPLKHVSKWKSIADCIQLKPDIIIIHEKGHQPTASTFHTEGNNLADKLATQGSYVVNAGKRTADGSEFEKRTADGSEFESPKKKAKVE

SEQ ID NO: 6418 - protein, 2185 aa, synthetic construct
MPAAKRVKLDGGDKKYSIGLDIGTNSVGWAVITDEYKVPSKKFKVLGNTDRHSIKKNLIGALLFDSGETAEATRLKRTARRRYTRRKNRICYLQEIFSNEMAKVDDSFFHRLEESFLVEEDKKHERHPIFGNIVDEVAYHEKYPTIYHLRKKLVDSTDKADLRLIYLALAHMIKFRGHFLIEGDLNPDNSDVDKLFIQLVQTYNQLFEENPINASGVDAKAILSARLSKSRRLENLIAQLPGEKKNGLFGNLIALSLGLTPNFKSNFDLAEDAKLQLSKDTYDDDLDNLLAQIGDQYADLFLAAKNLSDAILLSDILRVNTEITKAPLSASMIKRYDEHHQDLTLLKALVRQQLPEKYKEIFFDQSKNGYAGYIDGGASQEEFYKFIKPILEKMDGTEELLVKLNREDLLRKQRTFDNGSIPHQIHLGELHAILRRQEDFYPFLKDNREKIEKILTFRIPYYVGPLARGNSRFAWMTRKSEETITPWNFEEVVDKGASAQSFIERMTNFDKNLPNEKVLPKHSLLYEYFTVYNELTKVKYVTEGMRKPAFLSGEQKKAIVDLLFKTNRKVTVKQLKEDYFKKIECFDSVEISGVEDRFNASLGTYHDLLKIIKDKDFLDNEENEDILEDIVLTLTLFEDREMIEERLKTYAHLFDDKVMKQLKRRRYTGWGRLSRKLINGIRDKQSGKTILDFLKSDGFANRNFMQLIHDDSLTFKEDIQKAQVSGQGDSLHEHIANLAGSPAIKKGILQTVKVVDELVKVMGRHKPENIVIEMARENQTTQKGQKNSRERMKRIEEGIKELGSQILKEHPVENTQLQNEKLYLYYLQNGRDMYVDQELDINRLSDYDVDHIVPQSFLKDDSIDNKVLTRSDKARGKSDNVPSEEVVKKMKNYWRQLLNAKLITQRKFDNLTKAERGGLSELDKAGFIKRQLVETRQITKHVAQILDSRMNTKYDENDKLIREVKVITLKSKLVSDFRKDFQFYKVREINNYHHAHDAYLNAVVGTALIKKYPKLESEFVYGDYKVYDVRKMIAKSEQEIGKATAKYFFYSNIMNFFKTEITLANGEIRKRPLIETNGETGEIVWDKGRDFATVRKVLSMPQVNIVKKTEVQTGGFSKESILPKRNSDKLIARKKDWDPKKYGGFDSPTVAYSVLVVAKVEKGKSKKLKSVKELLGITIMERSSFEKNPIDFLEAKGYKEVKKDLIIKLPKYSLFELENGRKRMLASAGELQKGNELALPSKYVNFLYLASHYEKLKGSPEDNEQKQLFVEQHKHYLDEIIEQISEFSKRVILADANLDKVLSAYNKHRDKPIREQAENIIHLFTLTNLGAPAAFKYFDTTIDRKRYTSTKEVLDATLIHQSITGLYETRIDLSQLGGDGGEAAAKEAAAKEAAAKEAAAKGGMDPLQLLQPLEAEIKGTKLKAHWNSGATITCVPQAFLEEEVPIKNIWIKTIHGEKEQPVYYLTFKIQGRKVEAEVISSPYDYILVSPSDIPWLMKKPLQLTTLVPLQEYEERLLKQTMLTGSYKEKLQSLFLKYDALWQHWENQVGHRRIKPHHIATGTVNPRPQKQYPINPKAKASIQTVINDLLKQGVLIQQNSIMNTPVYPVPKPDGKWRMVLDYREVNKTIPLIAAQNQHSAGILSSIFRGKYKTTLDLSNGFWAHSITPESYWLTAFTWLGQQYCWTRLPQGFLNSPALFNADVVDLLKEVPNVQVYVDDIYISHDDPREHLEQLEKVFSLLLNAGYVVSLKKSEIAQHEVEFLGFNITKEGRGLTETFKQKLLNITPPRDLKQLQSILGKLNFARNFIPNFSELVKPLYNIIATAPGKYITWTTDNSQQLQNIISMLNSAENLEERNPEVRLIMKVNTSPSAGYIRFYNEFAKRPIMYLNYVYTKAEVKFTNTEKLLTTIHKGLIKALDLGMGQEILVYSPIVSMTKIQKTPLPERKALPIRWITWMSYLEDPRIQFHYDKTLPELQQVPTVTDDIIAKIKHPSEFSMVFYTDGSAIKHPNVNKSHNAGMGIAQVQFKPEFTVINTWSIPLGDHTAQLAEVAAVEFACKKALKIDGPVLIVTDSFYVAESVNKELPYWQSNGFFNNKKKPLKHVSKWKSIADCIQLKPDIIIIHEKGHQPTASTFHTEGNNLADKLATQGSYVVNAGKRTADGSEFEKRTADGSEFESPKKKAKVE

SEQ ID NO: 6419 - protein, 2105 aa, synthetic construct
MPAAKRVKLDGGDKKYSIGLDIGTNSVGWAVITDEYKVPSKKFKVLGNTDRHSIKKNLIGALLFDSGETAEATRLKRTARRRYTRRKNRICYLQEIFSNEMAKVDDSFFHRLEESFLVEEDKKHERHPIFGNIVDEVAYHEKYPTIYHLRKKLVDSTDKADLRLIYLALAHMIKFRGHFLIEGDLNPDNSDVDKLFIQLVQTYNQLFEENPINASGVDAKAILSARLSKSRRLENLIAQLPGEKKNGLFGNLIALSLGLTPNFKSNFDLAEDAKLQLSKDTYDDDLDNLLAQIGDQYADLFLAAKNLSDAILLSDILRVNTEITKAPLSASMIKRYDEHHQDLTLLKALVRQQLPEKYKEIFFDQSKNGYAGYIDGGASQEEFYKFIKPILEKMDGTEELLVKLNREDLLRKQRTFDNGSIPHQIHLGELHAILRRQEDFYPFLKDNREKIEKILTFRIPYYVGPLARGNSRFAWMTRKSEETITPWNFEEVVDKGASAQSFIERMTNFDKNLPNEKVLPKHSLLYEYFTVYNELTKVKYVTEGMRKPAFLSGEQKKAIVDLLFKTNRKVTVKQLKEDYFKKIECFDSVEISGVEDRFNASLGTYHDLLKIIKDKDFLDNEENEDILEDIVLTLTLFEDREMIEERLKTYAHLFDDKVMKQLKRRRYTGWGRLSRKLINGIRDKQSGKTILDFLKSDGFANRNFMQLIHDDSLTFKEDIQKAQVSGQGDSLHEHIANLAGSPAIKKGILQTVKVVDELVKVMGRHKPENIVIEMARENQTTQKGQKNSRERMKRIEEGIKELGSQILKEHPVENTQLQNEKLYLYYLQNGRDMYVDQELDINRLSDYDVDHIVPQSFLKDDSIDNKVLTRSDKARGKSDNVPSEEVVKKMKNYWRQLLNAKLITQRKFDNLTKAERGGLSELDKAGFIKRQLVETRQITKHVAQILDSRMNTKYDENDKLIREVKVITLKSKLVSDFRKDFQFYKVREINNYHHAHDAYLNAVVGTALIKKYPKLESEFVYGDYKVYDVRKMIAKSEQEIGKATAKYFFYSNIMNFFKTEITLANGEIRKRPLIETNGETGEIVWDKGRDFATVRKVLSMPQVNIVKKTEVQTGGFSKESILPKRNSDKLIARKKDWDPKKYGGFDSPTVAYSVLVVAKVEKGKSKKLKSVKELLGITIMERSSFEKNPIDFLEAKGYKEVKKDLIIKLPKYSLFELENGRKRMLASAGELQKGNELALPSKYVNFLYLASHYEKLKGSPEDNEQKQLFVEQHKHYLDEIIEQISEFSKRVILADANLDKVLSAYNKHRDKPIREQAENIIHLFTLTNLGAPAAFKYFDTTIDRKRYTSTKEVLDATLIHQSITGLYETRIDLSQLGGDGGEAAAKEAAAKEAAAKEAAAKGGTLNIEDEYRLHETSKEPDVPLGSTWLSDFPQAWAETGGMGLAVRQAPLIIPLKATSTPVSIKQYPMSQEARLGIKPHIQRLLDQGILVPCQSPWNTPLLPVKKPGTNDYRPVQDLREVNKRVEDIHPTVPNPYNLLSGLPPSHQWYTVLDLKDAFFCLRLHPTSQPLFAFEWRDPEMGISGQLTWTRLPQGFKNSPTLFDEALHRDLADFRIQHPDLILLQYVDDLLLAATSEQDCQRGTRALLQTLGNLGYRASAKKAQICQKQVKYLGYLLKEGQRWLTEARKETVMGQPTPKTPRQLREFLGTAGFCRLWIPGFAEMAAPLYPLTKTGTLFNWGPDQQKAYQEIKQALLTAPALGLPDLTKPFELFVDEKQGYAKGVLTQKLGPWRRPVAYLSKKLDPVAAGWPPCLRMVAAIAVLTKDAGKLTMGQPLVILAPHAVEALVKQPPDRWLSNARMTHYQAMLLDTDRVQFGPVVALNPATLLPLPEKEAPHDCLEILAETHGTRPDLTDQPIPDADYTWYTDGSSFLQEGQRRAGAAVTTETEVIWARALPAGTSAQRAELIALTQALKMAEGKKLNVYTDSRYAFATAHVHGEIYRRRGLLTSEGREIKNKNEILALLKALFLPKRLSIIHCPGHQKGNSAEARGNRMADQAAREAAMKAVLETSTLLAGKRTADGSEFEKRTADGSEFESPKKKAKVE

SEQ ID NO: 6420 - protein, 2112 aa, synthetic construct
MPAAKRVKLDGGDKKYSIGLDIGTNSVGWAVITDEYKVPSKKFKVLGNTDRHSIKKNLIGALLFDSGETAEATRLKRTARRRYTRRKNRICYLQEIFSNEMAKVDDSFFHRLEESFLVEEDKKHERHPIFGNIVDEVAYHEKYPTIYHLRKKLVDSTDKADLRLIYLALAHMIKFRGHFLIEGDLNPDNSDVDKLFIQLVQTYNQLFEENPINASGVDAKAILSARLSKSRRLENLIAQLPGEKKNGLFGNLIALSLGLTPNFKSNFDLAEDAKLQLSKDTYDDDLDNLLAQIGDQYADLFLAAKNLSDAILLSDILRVNTEITKAPLSASMIKRYDEHHQDLTLLKALVRQQLPEKYKEIFFDQSKNGYAGYIDGGASQEEFYKFIKPILEKMDGTEELLVKLNREDLLRKQRTFDNGSIPHQIHLGELHAILRRQEDFYPFLKDNREKIEKILTFRIPYYVGPLARGNSRFAWMTRKSEETITPWNFEEVVDKGASAQSFIERMTNFDKNLPNEKVLPKHSLLYEYFTVYNELTKVKYVTEGMRKPAFLSGEQKKAIVDLLFKTNRKVTVKQLKEDYFKKIECFDSVEISGVEDRFNASLGTYHDLLKIIKDKDFLDNEENEDILEDIVLTLTLFEDREMIEERLKTYAHLFDDKVMKQLKRRRYTGWGRLSRKLINGIRDKQSGKTILDFLKSDGFANRNFMQLIHDDSLTFKEDIQKAQVSGQGDSLHEHIANLAGSPAIKKGILQTVKVVDELVKVMGRHKPENIVIEMARENQTTQKGQKNSRERMKRIEEGIKELGSQILKEHPVENTQLQNEKLYLYYLQNGRDMYVDQELDINRLSDYDVDHIVPQSFLKDDSIDNKVLTRSDKARGKSDNVPSEEVVKKMKNYWRQLLNAKLITQRKFDNLTKAERGGLSELDKAGFIKRQLVETRQITKHVAQILDSRMNTKYDENDKLIREVKVITLKSKLVSDFRKDFQFYKVREINNYHHAHDAYLNAVVGTALIKKYPKLESEFVYGDYKVYDVRKMIAKSEQEIGKATAKYFFYSNIMNFFKTEITLANGEIRKRPLIETNGETGEIVWDKGRDFATVRKVLSMPQVNIVKKTEVQTGGFSKESILPKRNSDKLIARKKDWDPKKYGGFDSPTVAYSVLVVAKVEKGKSKKLKSVKELLGITIMERSSFEKNPIDFLEAKGYKEVKKDLIIKLPKYSLFELENGRKRMLASAGELQKGNELALPSKYVNFLYLASHYEKLKGSPEDNEQKQLFVEQHKHYLDEIIEQISEFSKRVILADANLDKVLSAYNKHRDKPIREQAENIIHLFTLTNLGAPAAFKYFDTTIDRKRYTSTKEVLDATLIHQSITGLYETRIDLSQLGGDGGEAAAKEAAAKEAAAKEAAAKEAAAKGGTAPLEEEYRLFLEAPIQNVTLLEQWKREIPKVWAEINPPGLASTQAPIHVQLLSTALPVRVRQYPITLEAKRSLRETIRKFRAAGILRPVHSPWNTPLLPVRKSGTSEYRMVQDLREVNKRVETIHPTVPNPYTLLSLLPPDRIWYSVLDLKDAFFCIPLAPESQLIFAFEWADAEEGESGQLTWTRLPQGFKNSPTLFDEALNRDLQGFRLDHPSVSLLQYVDDLLIAADTQAACLSATRDLLMTLAELGYRVSGKKAQLCQEEVTYLGFKIHKGSRSLSNSRTQAILQIPVPKTKRQVREFLGTIGYCRLWIPGFAELAQPLYAATRGGNDPLVWGEKEEEAFQSLKLALTQPPALALPSLDKPFQLFVEETSGAAKGVLTQALGPWKRPVAYLSKRLDPVAAGWPRCLRAIAAAALLTREASKLTFGQDIEITSSHNLESLLRSPPDKWLTNARITQYQVLLLDPPRVRFKQTAALNPATLLPETDDTLPIHHCLDTLDSLTSTRPDLTDQPLAQAEATLFTDGSSYIRDGKRYAGAAVVTLDSVIWAEPLPIGTSAQKAELIALTKALEWSKDKSVNIYTDSRYAFATLHVHGMIYRERGLLTAGGKAIKNAPEILALLTAVWLPKRVAVMHCKGHQKDDAPTSTGNRRADEVAREVAIRPLSTQATISAGKRTADGSEFEKRTADGSEFESPKKKAKVE

SEQ ID NO: 6421 - protein, 2112 aa, synthetic construct
MPAAKRVKLDGGDKKYSIGLDIGTNSVGWAVITDEYKVPSKKFKVLGNTDRHSIKKNLIGALLFDSGETAEATRLKRTARRRYTRRKNRICYLQEIFSNEMAKVDDSFFHRLEESFLVEEDKKHERHPIFGNIVDEVAYHEKYPTIYHLRKKLVDSTDKADLRLIYLALAHMIKFRGHFLIEGDLNPDNSDVDKLFIQLVQTYNQLFEENPINASGVDAKAILSARLSKSRRLENLIAQLPGEKKNGLFGNLIALSLGLTPNFKSNFDLAEDAKLQLSKDTYDDDLDNLLAQIGDQYADLFLAAKNLSDAILLSDILRVNTEITKAPLSASMIKRYDEHHQDLTLLKALVRQQLPEKYKEIFFDQSKNGYAGYIDGGASQEEFYKFIKPILEKMDGTEELLVKLNREDLLRKQRTFDNGSIPHQIHLGELHAILRRQEDFYPFLKDNREKIEKILTFRIPYYVGPLARGNSRFAWMTRKSEETITPWNFEEVVDKGASAQSFIERMTNFDKNLPNEKVLPKHSLLYEYFTVYNELTKVKYVTEGMRKPAFLSGEQKKAIVDLLFKTNRKVTVKQLKEDYFKKIECFDSVEISGVEDRFNASLGTYHDLLKIIKDKDFLDNEENEDILEDIVLTLTLFEDREMIEERLKTYAHLFDDKVMKQLKRRRYTGWGRLSRKLINGIRDKQSGKTILDFLKSDGFANRNFMQLIHDDSLTFKEDIQKAQVSGQGDSLHEHIANLAGSPAIKKGILQTVKVVDELVKVMGRHKPENIVIEMARENQTTQKGQKNSRERMKRIEEGIKELGSQILKEHPVENTQLQNEKLYLYYLQNGRDMYVDQELDINRLSDYDVDHIVPQSFLKDDSIDNKVLTRSDKARGKSDNVPSEEVVKKMKNYWRQLLNAKLITQRKFDNLTKAERGGLSELDKAGFIKRQLVETRQITKHVAQILDSRMNTKYDENDKLIREVKVITLKSKLVSDFRKDFQFYKVREINNYHHAHDAYLNAVVGTALIKKYPKLESEFVYGDYKVYDVRKMIAKSEQEIGKATAKYFFYSNIMNFFKTEITLANGEIRKRPLIETNGETGEIVWDKGRDFATVRKVLSMPQVNIVKKTEVQTGGFSKESILPKRNSDKLIARKKDWDPKKYGGFDSPTVAYSVLVVAKVEKGKSKKLKSVKELLGITIMERSSFEKNPIDFLEAKGYKEVKKDLIIKLPKYSLFELENGRKRMLASAGELQKGNELALPSKYVNFLYLASHYEKLKGSPEDNEQKQLFVEQHKHYLDEIIEQISEFSKRVILADANLDKVLSAYNKHRDKPIREQAENIIHLFTLTNLGAPAAFKYFDTTIDRKRYTSTKEVLDATLIHQSITGLYETRIDLSQLGGDGGEAAAKEAAAKEAAAKEAAAKEAAAKGGTAPLEEEYRLFLEAPIQNVTLLEQWKREIPKVWAEINPPGLASTQAPIHVQLLSTALPVRVRQYPITLEAKRSLRETIRKFRAAGILRPVHSPWNTPLLPVRKSGTSEYRMVQDLREVNKRVETIHPTVPNPYTLLSLLPPDRIWYSVLDLKDAFFCIPLAPESQLIFAFEWADAEEGESGQLTWTRLPQGFKNSPTLFNEALNRDLQGFRLDHPSVSLLQYVDDLLIAADTQAACLSATRDLLMTLAELGYRVSGKKAQLCQEEVTYLGFKIHKGSRSLSNSRTQAILQIPVPKTKRQVREFLGTIGYCRLWIPGFAELAQPLYAATRPGNDPLVWGEKEEEAFQSLKLALTQPPALALPSLDKPFQLFVEETSGAAKGVLTQALGPWKRPVAYLSKRLDPVAAGWPRCLRAIAAAALLTREASKLTFGQDIEITSSHNLESLLRSPPDKWLTNARITQYQVLLLDPPRVRFKQTAALNPATLLPETDDTLPIHHCLDTLDSLTSTRPDLTDQPLAQAEATLFTDGSSYIRDGKRYAGAAVVTLDSVIWAEPLPIGTSAQKAELIALTKALEWSKDKSVNIYTDSRYAFATLHVHGMIYRERGWLTAGGKAIKNAPEILALLTAVWLPKRVAVMHCKGHQKDDAPTSTGNRRADEVAREVAIRPLSTQATISAGKRTADGSEFEKRTADGSEFESPKKKAKVE

SEQ ID NO: 6422 - protein, 2187 aa, synthetic construct
MPAAKRVKLDGGDKKYSIGLDIGTNSVGWAVITDEYKVPSKKFKVLGNTDRHSIKKNLIGALLFDSGETAEATRLKRTARRRYTRRKNRICYLQEIFSNEMAKVDDSFFHRLEESFLVEEDKKHERHPIFGNIVDEVAYHEKYPTIYHLRKKLVDSTDKADLRLIYLALAHMIKFRGHFLIEGDLNPDNSDVDKLFIQLVQTYNQLFEENPINASGVDAKAILSARLSKSRRLENLIAQLPGEKKNGLFGNLIALSLGLTPNFKSNFDLAEDAKLQLSKDTYDDDLDNLLAQIGDQYADLFLAAKNLSDAILLSDILRVNTEITKAPLSASMIKRYDEHHQDLTLLKALVRQQLPEKYKEIFFDQSKNGYAGYIDGGASQEEFYKFIKPILEKMDGTEELLVKLNREDLLRKQRTFDNGSIPHQIHLGELHAILRRQEDFYPFLKDNREKIEKILTFRIPYYVGPLARGNSRFAWMTRKSEETITPWNFEEVVDKGASAQSFIERMTNFDKNLPNEKVLPKHSLLYEYFTVYNELTKVKYVTEGMRKPAFLSGEQKKAIVDLLFKTNRKVTVKQLKEDYFKKIECFDSVEISGVEDRFNASLGTYHDLLKIIKDKDFLDNEENEDILEDIVLTLTLFEDREMIEERLKTYAHLFDDKVMKQLKRRRYTGWGRLSRKLINGIRDKQSGKTILDFLKSDGFANRNFMQLIHDDSLTFKEDIQKAQVSGQGDSLHEHIANLAGSPAIKKGILQTVKVVDELVKVMGRHKPENIVIEMARENQTTQKGQKNSRERMKRIEEGIKELGSQILKEHPVENTQLQNEKLYLYYLQNGRDMYVDQELDINRLSDYDVDHIVPQSFLKDDSIDNKVLTRSDKARGKSDNVPSEEVVKKMKNYWRQLLNAKLITQRKFDNLTKAERGGLSELDKAGFIKRQLVETRQITKHVAQILDSRMNTKYDENDKLIREVKVITLKSKLVSDFRKDFQFYKVREINNYHHAHDAYLNAVVGTALIKKYPKLESEFVYGDYKVYDVRKMIAKSEQEIGKATAKYFFYSNIMNFFKTEITLANGEIRKRPLIETNGETGEIVWDKGRDFATVRKVLSMPQVNIVKKTEVQTGGFSKESILPKRNSDKLIARKKDWDPKKYGGFDSPTVAYSVLVVAKVEKGKSKKLKSVKELLGITIMERSSFEKNPIDFLEAKGYKEVKKDLIIKLPKYSLFELENGRKRMLASAGELQKGNELALPSKYVNFLYLASHYEKLKGSPEDNEQKQLFVEQHKHYLDEIIEQISEFSKRVILADANLDKVLSAYNKHRDKPIREQAENIIHLFTLTNLGAPAAFKYFDTTIDRKRYTSTKEVLDATLIHQSITGLYETRIDLSQLGGDGGEAAAKEAAAKEAAAKEAAAKEAAAKGGMDLLKPLTVERKGVKIKGYWNSQADITCVPKDLLQGEEPVRQQNVTTIHGTQEGDVYYVNLKIDGRRINTEVIGTTLDYAIITPGDVPWILKKPLELTIKLDLEEQQGTLLNNSILSKKGKEELKQLFEKYSALWQSWENQVGHRRIRPHKIATGTVKPTPQKQYHINPKAKPDIQIVINDLLKQGVLIQKESTMNTPVYPVPKPNGRWRMVLDYRAVNKVTPLIAVQNQHSYGILGSLFKGRYKTTIDLSNGFWAHPIVPEDYWITAFTWQGKQYCWTVLPQGFLNSPGLFTGDVVDLLQGIPNVEVYVDDVYISHDSEKEHLEYLDILFNRLKEAGYIISLKKSNIANSIVDFLGFQITNEGRGLTDTFKEKLENITAPTTLKQLQSILGLLNFARNFIPDFTELIAPLYALIPKSTKNYVPWQIEHSTTLETLITKLNGAEYLQGRKGDKTLIMKVNASYTTGYIRYYNEGEKKPISYVSIVFSKTELKFTELEKLLTTVHKGLLKALDLSMGQNIHVYSPIVSMQNIQKTPQTAKKALASRWLSWLSYLEDPRIRFFYDPQMPALKDLPAVDTGKDNKKHPSNFQHIFYTDGSAITSPTKEGHLNAGMGIVYFINKDGNLQKQQEWSISLGNHTAQFAEIAAFEFALKKCLPLGGNILVVTDSNYVAKAYNEELDVWASNGFVNNRKKPLKHISKWKSVADLKRLRPDVVVTHEPGHQKLDSSPHAYGNNLADQLATQASFKVHAGKRTADGSEFEKRTADGSEFESPKKKAKVE

SEQ ID NO: 6423 - protein, 2101 aa, synthetic construct
MPAAKRVKLDGGDKKYSIGLDIGTNSVGWAVITDEYKVPSKKFKVLGNTDRHSIKKNLIGALLFDSGETAEATRLKRTARRRYTRRKNRICYLQEIFSNEMAKVDDSFFHRLEESFLVEEDKKHERHPIFGNIVDEVAYHEKYPTIYHLRKKLVDSTDKADLRLIYLALAHMIKFRGHFLIEGDLNPDNSDVDKLFIQLVQTYNQLFEENPINASGVDAKAILSARLSKSRRLENLIAQLPGEKKNGLFGNLIALSLGLTPNFKSNFDLAEDAKLQLSKDTYDDDLDNLLAQIGDQYADLFLAAKNLSDAILLSDILRVNTEITKAPLSASMIKRYDEHHQDLTLLKALVRQQLPEKYKEIFFDQSKNGYAGYIDGGASQEEFYKFIKPILEKMDGTEELLVKLNREDLLRKQRTFDNGSIPHQIHLGELHAILRRQEDFYPFLKDNREKIEKILTFRIPYYVGPLARGNSRFAWMTRKSEETITPWNFEEVVDKGASAQSFIERMTNFDKNLPNEKVLPKHSLLYEYFTVYNELTKVKYVTEGMRKPAFLSGEQKKAIVDLLFKTNRKVTVKQLKEDYFKKIECFDSVEISGVEDRFNASLGTYHDLLKIIKDKDFLDNEENEDILEDIVLTLTLFEDREMIEERLKTYAHLFDDKVMKQLKRRRYTGWGRLSRKLINGIRDKQSGKTILDFLKSDGFANRNFMQLIHDDSLTFKEDIQKAQVSGQGDSLHEHIANLAGSPAIKKGILQTVKVVDELVKVMGRHKPENIVIEMARENQTTQKGQKNSRERMKRIEEGIKELGSQILKEHPVENTQLQNEKLYLYYLQNGRDMYVDQELDINRLSDYDVDHIVPQSFLKDDSIDNKVLTRSDKARGKSDNVPSEEVVKKMKNYWRQLLNAKLITQRKFDNLTKAERGGLSELDKAGFIKRQLVETRQITKHVAQILDSRMNTKYDENDKLIREVKVITLKSKLVSDFRKDFQFYKVREINNYHHAHDAYLNAVVGTALIKKYPKLESEFVYGDYKVYDVRKMIAKSEQEIGKATAKYFFYSNIMNFFKTEITLANGEIRKRPLIETNGETGEIVWDKGRDFATVRKVLSMPQVNIVKKTEVQTGGFSKESILPKRNSDKLIARKKDWDPKKYGGFDSPTVAYSVLVVAKVEKGKSKKLKSVKELLGITIMERSSFEKNPIDFLEAKGYKEVKKDLIIKLPKYSLFELENGRKRMLASAGELQKGNELALPSKYVNFLYLASHYEKLKGSPEDNEQKQLFVEQHKHYLDEIIEQISEFSKRVILADANLDKVLSAYNKHRDKPIREQAENIIHLFTLTNLGAPAAFKYFDTTIDRKRYTSTKEVLDATLIHQSITGLYETRIDLSQLGGDGGEAAAKEAAAKEAAAKEAAAKEAAAKGGVPWILKKPLELTIKLDLEEQQGTLLNNSILSKKGKEELKQLFEKYSALWQSWENQVGHRRIRPHKIATGTVKPTPQKQYHINPKAKPDIQIVINDLLKQGVLIQKESTMNTPVYPVPKPNGRWRMVLDYRAVNKVTPLIAVQNQHSYGILGSLFKGRYKTTIDLSNGFWAHPIVPEDYWITAFTWQGKQYCWTVLPQGFLNSPGLFTGDVVDLLQGIPNVEVYVDDVYISHDSEKEHLEYLDILFNRLKEAGYIISLKKSNIANSIVDFLGFQITNEGRGLTDTFKEKLENITAPTTLKQLQSILGLLNFARNFIPDFTELIAPLYALIPKSTKNYVPWQIEHSTTLETLITKLNGAEYLQGRKGDKTLIMKVNASYTTGYIRYYNEGEKKPISYVSIVFSKTELKFTELEKLLTTVHKGLLKALDLSMGQNIHVYSPIVSMQNIQKTPQTAKKALASRWLSWLSYLEDPRIRFFYDPQMPALKDLPAVDTGKDNKKHPSNFQHIFYTDGSAITSPTKEGHLNAGMGIVYFINKDGNLQKQQEWSISLGNHTAQFAEIAAFEFALKKCLPLGGNILVVTDSNYVAKAYNEELDVWASNGFVNNRKKPLKHISKWKSVADLKRLRPDVVVTHEPGHQKLDSSPHAYGNNLADQLATQASFKVHAGKRTADGSEFEKRTADGSEFESPKKKAKVE

SEQ ID NO: 6424 - protein, 2101 aa, synthetic construct
MPAAKRVKLDGGDKKYSIGLDIGTNSVGWAVITDEYKVPSKKFKVLGNTDRHSIKKNLIGALLFDSGETAEATRLKRTARRRYTRRKNRICYLQEIFSNEMAKVDDSFFHRLEESFLVEEDKKHERHPIFGNIVDEVAYHEKYPTIYHLRKKLVDSTDKADLRLIYLALAHMIKFRGHFLIEGDLNPDNSDVDKLFIQLVQTYNQLFEENPINASGVDAKAILSARLSKSRRLENLIAQLPGEKKNGLFGNLIALSLGLTPNFKSNFDLAEDAKLQLSKDTYDDDLDNLLAQIGDQYADLFLAAKNLSDAILLSDILRVNTEITKAPLSASMIKRYDEHHQDLTLLKALVRQQLPEKYKEIFFDQSKNGYAGYIDGGASQEEFYKFIKPILEKMDGTEELLVKLNREDLLRKQRTFDNGSIPHQIHLGELHAILRRQEDFYPFLKDNREKIEKILTFRIPYYVGPLARGNSRFAWMTRKSEETITPWNFEEVVDKGASAQSFIERMTNFDKNLPNEKVLPKHSLLYEYFTVYNELTKVKYVTEGMRKPAFLSGEQKKAIVDLLFKTNRKVTVKQLKEDYFKKIECFDSVEISGVEDRFNASLGTYHDLLKIIKDKDFLDNEENEDILEDIVLTLTLFEDREMIEERLKTYAHLFDDKVMKQLKRRRYTGWGRLSRKLINGIRDKQSGKTILDFLKSDGFANRNFMQLIHDDSLTFKEDIQKAQVSGQGDSLHEHIANLAGSPAIKKGILQTVKVVDELVKVMGRHKPENIVIEMARENQTTQKGQKNSRERMKRIEEGIKELGSQILKEHPVENTQLQNEKLYLYYLQNGRDMYVDQELDINRLSDYDVDHIVPQSFLKDDSIDNKVLTRSDKARGKSDNVPSEEVVKKMKNYWRQLLNAKLITQRKFDNLTKAERGGLSELDKAGFIKRQLVETRQITKHVAQILDSRMNTKYDENDKLIREVKVITLKSKLVSDFRKDFQFYKVREINNYHHAHDAYLNAVVGTALIKKYPKLESEFVYGDYKVYDVRKMIAKSEQEIGKATAKYFFYSNIMNFFKTEITLANGEIRKRPLIETNGETGEIVWDKGRDFATVRKVLSMPQVNIVKKTEVQTGGFSKESILPKRNSDKLIARKKDWDPKKYGGFDSPTVAYSVLVVAKVEKGKSKKLKSVKELLGITIMERSSFEKNPIDFLEAKGYKEVKKDLIIKLPKYSLFELENGRKRMLASAGELQKGNELALPSKYVNFLYLASHYEKLKGSPEDNEQKQLFVEQHKHYLDEIIEQISEFSKRVILADANLDKVLSAYNKHRDKPIREQAENIIHLFTLTNLGAPAAFKYFDTTIDRKRYTSTKEVLDATLIHQSITGLYETRIDLSQLGGDGGEAAAKEAAAKEAAAKEAAAKEAAAKGGVPWILKKPLELTIKLDLEEQQGTLLNNSILSKKGKEELKQLFEKYSALWQSWENQVGHRRIRPHKIATGTVKPTPQKQYHINPKAKPDIQIVINDLLKQGVLIQKESTMNTPVYPVPKPNGRWRMVLDYRAVNKVTPLIAVQNQHSYGILGSLFKGRYKTTIDLSNGFWAHPIVPEDYWITAFTWQGKQYCWTVLPQGFLNSPGLFNGDVVDLLQGIPNVEVYVDDVYISHDSEKEHLEYLDILFNRLKEAGYIISLKKSNIANSIVDFLGFQITNEGRGLTDTFKEKLENITAPTTLKQLQSILGLLNFARNFIPDFTELIAPLYALIPKSPKNYVPWQIEHSTTLETLITKLNGAEYLQGRKGDKTLIMKVNASYTTGYIRYYNEGEKKPISYVSIVFSKTELKFTELEKLLTTVHKGLLKALDLSMGQNIHVYSPIVSMQNIQKTPQTAKKALASRWLSWLSYLEDPRIRFFYDPQMPALKDLPAVDTGKDNKKHPSNFQHIFYTDGSAITSPTKEGHLNAGMGIVYFINKDGNLQKQQEWSISLGNHTAQFAEIAAFEFALKKCLPLGGNILVVTDSNYVAKAYNEELDVWASNGFVNNRKKPLKHISKWKSVADLKRLRPDVVVTHEPGHQKLDSSPHAYGNNLADQLATQASFKVHAGKRTADGSEFEKRTADGSEFESPKKKAKVE

SEQ ID NO: 6425 - protein, 2109 aa, synthetic construct
MPAAKRVKLDGGDKKYSIGLDIGTNSVGWAVITDEYKVPSKKFKVLGNTDRHSIKKNLIGALLFDSGETAEATRLKRTARRRYTRRKNRICYLQEIFSNEMAKVDDSFFHRLEESFLVEEDKKHERHPIFGNIVDEVAYHEKYPTIYHLRKKLVDSTDKADLRLIYLALAHMIKFRGHFLIEGDLNPDNSDVDKLFIQLVQTYNQLFEENPINASGVDAKAILSARLSKSRRLENLIAQLPGEKKNGLFGNLIALSLGLTPNFKSNFDLAEDAKLQLSKDTYDDDLDNLLAQIGDQYADLFLAAKNLSDAILLSDILRVNTEITKAPLSASMIKRYDEHHQDLTLLKALVRQQLPEKYKEIFFDQSKNGYAGYIDGGASQEEFYKFIKPILEKMDGTEELLVKLNREDLLRKQRTFDNGSIPHQIHLGELHAILRRQEDFYPFLKDNREKIEKILTFRIPYYVGPLARGNSRFAWMTRKSEETITPWNFEEVVDKGASAQSFIERMTNFDKNLPNEKVLPKHSLLYEYFTVYNELTKVKYVTEGMRKPAFLSGEQKKAIVDLLFKTNRKVTVKQLKEDYFKKIECFDSVEISGVEDRFNASLGTYHDLLKIIKDKDFLDNEENEDILEDIVLTLTLFEDREMIEERLKTYAHLFDDKVMKQLKRRRYTGWGRLSRKLINGIRDKQSGKTILDFLKSDGFANRNFMQLIHDDSLTFKEDIQKAQVSGQGDSLHEHIANLAGSPAIKKGILQTVKVVDELVKVMGRHKPENIVIEMARENQTTQKGQKNSRERMKRIEEGIKELGSQILKEHPVENTQLQNEKLYLYYLQNGRDMYVDQELDINRLSDYDVDHIVPQSFLKDDSIDNKVLTRSDKARGKSDNVPSEEVVKKMKNYWRQLLNAKLITQRKFDNLTKAERGGLSELDKAGFIKRQLVETRQITKHVAQILDSRMNTKYDENDKLIREVKVITLKSKLVSDFRKDFQFYKVREINNYHHAHDAYLNAVVGTALIKKYPKLESEFVYGDYKVYDVRKMIAKSEQEIGKATAKYFFYSNIMNFFKTEITLANGEIRKRPLIETNGETGEIVWDKGRDFATVRKVLSMPQVNIVKKTEVQTGGFSKESILPKRNSDKLIARKKDWDPKKYGGFDSPTVAYSVLVVAKVEKGKSKKLKSVKELLGITIMERSSFEKNPIDFLEAKGYKEVKKDLIIKLPKYSLFELENGRKRMLASAGELQKGNELALPSKYVNFLYLASHYEKLKGSPEDNEQKQLFVEQHKHYLDEIIEQISEFSKRVILADANLDKVLSAYNKHRDKPIREQAENIIHLFTLTNLGAPAAFKYFDTTIDRKRYTSTKEVLDATLIHQSITGLYETRIDLSQLGGDGGEAAAKEAAAKEAAAKEAAAKEAAAKGGTLQLEEEYRLFEPESTQKQEMDIWLKNFPQAWAETGGMGTAHCQAPVLIQLKATATPISIRQYPMPHEAYQGIKPHIRRMLDQGILKPCQSPWNTPLLPVKKPGTEDYRPVQDLREVNKRVEDIHPTVPNPYNLLSTLPPSHPWYTVLDLKDAFFCLRLHSESQLLFAFEWRDPEIGLSGQLTWTRLPQGFKNSPTLFNEALHSDLADFRVRYPALVLLQYVDDLLLAAATRTECLEGTKALLETLGNKGYRASAKKAQICLQEVTYLGYSLKDGQRWLTKARKEAILSIPVPKNSRQVREFLGKAGYCRLFIPGFAELAAPLYPLTRPGTLFQWGTEQQLAFEDIKKALLSSPALGLPDITKPFELFIDENSGFAKGVLVQKLGPWKRPVAYLSKKLDTVASGWPPCLRMVAAIAILVKDAGKLTLGQPLTILTSHPVEALVRQPPNKWLSNARMTHYQAMLLDAERVHFGPTVSLNPATLLPLPSGGNHHDCLQILAETHGTRPDLTDQPLPDADLTWYTDGSSFIRNGEREAGAAVTTESEVIWAAPLPPGTSAQRAELIALTQALKMAEGKKLTVYTDSRYAFATTHVHGEIYRRRGWLTSEGKEIKNKNEILALLEALFLPKRLSIIHCPGHQKGDSPQAKGNRLADDTAKKAATETHSSLTVLPAGKRTADGSEFEKRTADGSEFESPKKKAKVE

SEQ ID NO: 6426 - protein, 2101 aa, synthetic construct
MPAAKRVKLDGGDKKYSIGLDIGTNSVGWAVITDEYKVPSKKFKVLGNTDRHSIKKNLIGALLFDSGETAEATRLKRTARRRYTRRKNRICYLQEIFSNEMAKVDDSFFHRLEESFLVEEDKKHERHPIFGNIVDEVAYHEKYPTIYHLRKKLVDSTDKADLRLIYLALAHMIKFRGHFLIEGDLNPDNSDVDKLFIQLVQTYNQLFEENPINASGVDAKAILSARLSKSRRLENLIAQLPGEKKNGLFGNLIALSLGLTPNFKSNFDLAEDAKLQLSKDTYDDDLDNLLAQIGDQYADLFLAAKNLSDAILLSDILRVNTEITKAPLSASMIKRYDEHHQDLTLLKALVRQQLPEKYKEIFFDQSKNGYAGYIDGGASQEEFYKFIKPILEKMDGTEELLVKLNREDLLRKQRTFDNGSIPHQIHLGELHAILRRQEDFYPFLKDNREKIEKILTFRIPYYVGPLARGNSRFAWMTRKSEETITPWNFEEVVDKGASAQSFIERMTNFDKNLPNEKVLPKHSLLYEYFTVYNELTKVKYVTEGMRKPAFLSGEQKKAIVDLLFKTNRKVTVKQLKEDYFKKIECFDSVEISGVEDRFNASLGTYHDLLKIIKDKDFLDNEENEDILEDIVLTLTLFEDREMIEERLKTYAHLFDDKVMKQLKRRRYTGWGRLSRKLINGIRDKQSGKTILDFLKSDGFANRNFMQLIHDDSLTFKEDIQKAQVSGQGDSLHEHIANLAGSPAIKKGILQTVKVVDELVKVMGRHKPENIVIEMARENQTTQKGQKNSRERMKRIEEGIKELGSQILKEHPVENTQLQNEKLYLYYLQNGRDMYVDQELDINRLSDYDVDHIVPQSFLKDDSIDNKVLTRSDKARGKSDNVPSEEVVKKMKNYWRQLLNAKLITQRKFDNLTKAERGGLSELDKAGFIKRQLVETRQITKHVAQILDSRMNTKYDENDKLIREVKVITLKSKLVSDFRKDFQFYKVREINNYHHAHDAYLNAVVGTALIKKYPKLESEFVYGDYKVYDVRKMIAKSEQEIGKATAKYFFYSNIMNFFKTEITLANGEIRKRPLIETNGETGEIVWDKGRDFATVRKVLSMPQVNIVKKTEVQTGGFSKESILPKRNSDKLIARKKDWDPKKYGGFDSPTVAYSVLVVAKVEKGKSKKLKSVKELLGITIMERSSFEKNPIDFLEAKGYKEVKKDLIIKLPKYSLFELENGRKRMLASAGELQKGNELALPSKYVNFLYLASHYEKLKGSPEDNEQKQLFVEQHKHYLDEIIEQISEFSKRVILADANLDKVLSAYNKHRDKPIREQAENIIHLFTLTNLGAPAAFKYFDTTIDRKRYTSTKEVLDATLIHQSITGLYETRIDLSQLGGDGGEAAAKEAAAKEAAAKEAAAKEAAAKGGVPWLTQQPLQLTILVPLQEYQEKILSKTALPEDQKQQLKTLFVKYDNLWQHWENQVGHRKIRPHNIATGDYPPRPQKQYPINPKAKPSIQIVIDDLLKQGVLTPQNSTMNTPVYPVPKPDGRWRMVLDYREVNKTIPLTAAQNQHSAGILATIVRQKYKTTLDLANGFWAHPITPESYWLTAFTWQGKQYCWTRLPQGFLNSPALFNADVVDLLKEIPNVQVYVDDIYLSHDDPKEHVQQLEKVFQILLQAGYVVSLKKSEIGQKTVEFLGFNITKEGRGLTDTFKTKLLNITPPKDLKQLQSILGLLNFARNFIPNFAELVQPLYNLIAPAKGKYIEWSEENTKQLNMVIEALNTASNLEERLPEQRLVIKVNTSPSAGYVRYYNETGKKPIMYLNYVFSKAELKFSMLEKLLTTMHKALIKAMDLAMGQEILVYSPIVSMTKIQKTPLPERKALPIRWITWMTYLEDPRIQFHYDKTLPELKHIPDVYTSSQSPVKHPSQYEGVFYTDGSAIKSPDPTKSNNAGMGIVHATYKPEYQVLNQWSIPLGNHTAQMAEIAAVEFACKKALKIPGPVLVITDSFYVAESANKELPYWKSNGFVNNKKKPLKHISKWKSIAECLSMKPDITIQHEKGISLQIPVFILKGNALADKLATQGSYVVNAGKRTADGSEFEKRTADGSEFESPKKKAKVE

SEQ ID NO: 6427 - protein, 2101 aa, synthetic construct
MPAAKRVKLDGGDKKYSIGLDIGTNSVGWAVITDEYKVPSKKFKVLGNTDRHSIKKNLIGALLFDSGETAEATRLKRTARRRYTRRKNRICYLQEIFSNEMAKVDDSFFHRLEESFLVEEDKKHERHPIFGNIVDEVAYHEKYPTIYHLRKKLVDSTDKADLRLIYLALAHMIKFRGHFLIEGDLNPDNSDVDKLFIQLVQTYNQLFEENPINASGVDAKAILSARLSKSRRLENLIAQLPGEKKNGLFGNLIALSLGLTPNFKSNFDLAEDAKLQLSKDTYDDDLDNLLAQIGDQYADLFLAAKNLSDAILLSDILRVNTEITKAPLSASMIKRYDEHHQDLTLLKALVRQQLPEKYKEIFFDQSKNGYAGYIDGGASQEEFYKFIKPILEKMDGTEELLVKLNREDLLRKQRTFDNGSIPHQIHLGELHAILRRQEDFYPFLKDNREKIEKILTFRIPYYVGPLARGNSRFAWMTRKSEETITPWNFEEVVDKGASAQSFIERMTNFDKNLPNEKVLPKHSLLYEYFTVYNELTKVKYVTEGMRKPAFLSGEQKKAIVDLLFKTNRKVTVKQLKEDYFKKIECFDSVEISGVEDRFNASLGTYHDLLKIIKDKDFLDNEENEDILEDIVLTLTLFEDREMIEERLKTYAHLFDDKVMKQLKRRRYTGWGRLSRKLINGIRDKQSGKTILDFLKSDGFANRNFMQLIHDDSLTFKEDIQKAQVSGQGDSLHEHIANLAGSPAIKKGILQTVKVVDELVKVMGRHKPENIVIEMARENQTTQKGQKNSRERMKRIEEGIKELGSQILKEHPVENTQLQNEKLYLYYLQNGRDMYVDQELDINRLSDYDVDHIVPQSFLKDDSIDNKVLTRSDKARGKSDNVPSEEVVKKMKNYWRQLLNAKLITQRKFDNLTKAERGGLSELDKAGFIKRQLVETRQITKHVAQILDSRMNTKYDENDKLIREVKVITLKSKLVSDFRKDFQFYKVREINNYHHAHDAYLNAVVGTALIKKYPKLESEFVYGDYKVYDVRKMIAKSEQEIGKATAKYFFYSNIMNFFKTEITLANGEIRKRPLIETNGETGEIVWDKGRDFATVRKVLSMPQVNIVKKTEVQTGGFSKESILPKRNSDKLIARKKDWDPKKYGGFDSPTVAYSVLVVAKVEKGKSKKLKSVKELLGITIMERSSFEKNPIDFLEAKGYKEVKKDLIIKLPKYSLFELENGRKRMLASAGELQKGNELALPSKYVNFLYLASHYEKLKGSPEDNEQKQLFVEQHKHYLDEIIEQISEFSKRVILADANLDKVLSAYNKHRDKPIREQAENIIHLFTLTNLGAPAAFKYFDTTIDRKRYTSTKEVLDATLIHQSITGLYETRIDLSQLGGDGGEAAAKEAAAKEAAAKEAAAKEAAAKGGVPWLTQQPLQLTILVPLQEYQEKILSKTALPEDQKQQLKTLFVKYDNLWQHWENQVGHRKIRPHNIATGDYPPRPQKQYPINPKAKPSIQIVIDDLLKQGVLTPQNSTMNTPVYPVPKPDGRWRMVLDYREVNKTIPLTAAQNQHSAGILATIVRQKYKTTLDLANGFWAHPITPESYWLTAFTWQGKQYCWTRLPQGFLNSPALFNADVVDLLKEIPNVQVYVDDIYLSHDDPKEHVQQLEKVFQILLQAGYVVSLKKSEIGQKTVEFLGFNITKEGRGLTDTFKTKLLNITPPKDLKQLQSILGKLNFARNFIPNFAELVQPLYNLIAPAKGKYIEWSEENTKQLNMVIEALNTASNLEERLPEQRLVIKVNTSPSAGYVRYYNETGKKPIMYLNYVFSKAELKFSMLEKLLTTMHKALIKAMDLAMGQEILVYSPIVSMTKIQKTPLPERKALPIRWITWMTYLEDPRIQFHYDKTLPELKHIPDVYTSSQSPVKHPSQYEGVFYTDGSAIKSPDPTKSNNAGMGIVHATYKPEYQVLNQWSIPLGNHTAQMAEIAAVEFACKKALKIPGPVLVITDSFYVAESANKELPYWKSNGFVNNKKKPLKHISKWKSIAECLSMKPDITIQHEKGISLQIPVFILKGNALADKLATQGSYVVNAGKRTADGSEFEKRTADGSEFESPKKKAKVE

SEQ ID NO: 6428 - protein, 2190 aa, synthetic construct
MPAAKRVKLDGGDKKYSIGLDIGTNSVGWAVITDEYKVPSKKFKVLGNTDRHSIKKNLIGALLFDSGETAEATRLKRTARRRYTRRKNRICYLQEIFSNEMAKVDDSFFHRLEESFLVEEDKKHERHPIFGNIVDEVAYHEKYPTIYHLRKKLVDSTDKADLRLIYLALAHMIKFRGHFLIEGDLNPDNSDVDKLFIQLVQTYNQLFEENPINASGVDAKAILSARLSKSRRLENLIAQLPGEKKNGLFGNLIALSLGLTPNFKSNFDLAEDAKLQLSKDTYDDDLDNLLAQIGDQYADLFLAAKNLSDAILLSDILRVNTEITKAPLSASMIKRYDEHHQDLTLLKALVRQQLPEKYKEIFFDQSKNGYAGYIDGGASQEEFYKFIKPILEKMDGTEELLVKLNREDLLRKQRTFDNGSIPHQIHLGELHAILRRQEDFYPFLKDNREKIEKILTFRIPYYVGPLARGNSRFAWMTRKSEETITPWNFEEVVDKGASAQSFIERMTNFDKNLPNEKVLPKHSLLYEYFTVYNELTKVKYVTEGMRKPAFLSGEQKKAIVDLLFKTNRKVTVKQLKEDYFKKIECFDSVEISGVEDRFNASLGTYHDLLKIIKDKDFLDNEENEDILEDIVLTLTLFEDREMIEERLKTYAHLFDDKVMKQLKRRRYTGWGRLSRKLINGIRDKQSGKTILDFLKSDGFANRNFMQLIHDDSLTFKEDIQKAQVSGQGDSLHEHIANLAGSPAIKKGILQTVKVVDELVKVMGRHKPENIVIEMARENQTTQKGQKNSRERMKRIEEGIKELGSQILKEHPVENTQLQNEKLYLYYLQNGRDMYVDQELDINRLSDYDVDHIVPQSFLKDDSIDNKVLTRSDKARGKSDNVPSEEVVKKMKNYWRQLLNAKLITQRKFDNLTKAERGGLSELDKAGFIKRQLVETRQITKHVAQILDSRMNTKYDENDKLIREVKVITLKSKLVSDFRKDFQFYKVREINNYHHAHDAYLNAVVGTALIKKYPKLESEFVYGDYKVYDVRKMIAKSEQEIGKATAKYFFYSNIMNFFKTEITLANGEIRKRPLIETNGETGEIVWDKGRDFATVRKVLSMPQVNIVKKTEVQTGGFSKESILPKRNSDKLIARKKDWDPKKYGGFDSPTVAYSVLVVAKVEKGKSKKLKSVKELLGITIMERSSFEKNPIDFLEAKGYKEVKKDLIIKLPKYSLFELENGRKRMLASAGELQKGNELALPSKYVNFLYLASHYEKLKGSPEDNEQKQLFVEQHKHYLDEIIEQISEFSKRVILADANLDKVLSAYNKHRDKPIREQAENIIHLFTLTNLGAPAAFKYFDTTIDRKRYTSTKEVLDATLIHQSITGLYETRIDLSQLGGDGGEAAAKEAAAKEAAAKEAAAKEAAAKGGMNPLQLLQPLPAEIKGTKLLAHWNSGATITCIPESFLEDEQPIKKTLIKTIHGEKQQNVYYVTFKVKGRKVEAEVIASPYEYILLSPTDVPWLTQQPLQLTILVPLQEYQEKILSKTALPEDQKQQLKTLFVKYDNLWQHWENQVGHRKIRPHNIATGDYPPRPQKQYPINPKAKPSIQIVIDDLLKQGVLTPQNSTMNTPVYPVPKPDGRWRMVLDYREVNKTIPLTAAQNQHSAGILATIVRQKYKTTLDLANGFWAHPITPESYWLTAFTWQGKQYCWTRLPQGFLNSPALFNADVVDLLKEIPNVQVYVDDIYLSHDDPKEHVQQLEKVFQILLQAGYVVSLKKSEIGQKTVEFLGFNITKEGRGLTDTFKTKLLNITPPKDLKQLQSILGLLNFARNFIPNFAELVQPLYNLIAPAKGKYIEWSEENTKQLNMVIEALNTASNLEERLPEQRLVIKVNTSPSAGYVRYYNETGKKPIMYLNYVFSKAELKFSMLEKLLTTMHKALIKAMDLAMGQEILVYSPIVSMTKIQKTPLPERKALPIRWITWMTYLEDPRIQFHYDKTLPELKHIPDVYTSSQSPVKHPSQYEGVFYTDGSAIKSPDPTKSNNAGMGIVHATYKPEYQVLNQWSIPLGNHTAQMAEIAAVEFACKKALKIPGPVLVITDSFYVAESANKELPYWKSNGFVNNKKKPLKHISKWKSIAECLSMKPDITIQHEKGISLQIPVFILKGNALADKLATQGSYVVNAGKRTADGSEFEKRTADGSEFESPKKKAKVE

SEQ ID NO: 6429 - protein, 2190 aa, synthetic construct
MPAAKRVKLDGGDKKYSIGLDIGTNSVGWAVITDEYKVPSKKFKVLGNTDRHSIKKNLIGALLFDSGETAEATRLKRTARRRYTRRKNRICYLQEIFSNEMAKVDDSFFHRLEESFLVEEDKKHERHPIFGNIVDEVAYHEKYPTIYHLRKKLVDSTDKADLRLIYLALAHMIKFRGHFLIEGDLNPDNSDVDKLFIQLVQTYNQLFEENPINASGVDAKAILSARLSKSRRLENLIAQLPGEKKNGLFGNLIALSLGLTPNFKSNFDLAEDAKLQLSKDTYDDDLDNLLAQIGDQYADLFLAAKNLSDAILLSDILRVNTEITKAPLSASMIKRYDEHHQDLTLLKALVRQQLPEKYKEIFFDQSKNGYAGYIDGGASQEEFYKFIKPILEKMDGTEELLVKLNREDLLRKQRTFDNGSIPHQIHLGELHAILRRQEDFYPFLKDNREKIEKILTFRIPYYVGPLARGNSRFAWMTRKSEETITPWNFEEVVDKGASAQSFIERMTNFDKNLPNEKVLPKHSLLYEYFTVYNELTKVKYVTEGMRKPAFLSGEQKKAIVDLLFKTNRKVTVKQLKEDYFKKIECFDSVEISGVEDRFNASLGTYHDLLKIIKDKDFLDNEENEDILEDIVLTLTLFEDREMIEERLKTYAHLFDDKVMKQLKRRRYTGWGRLSRKLINGIRDKQSGKTILDFLKSDGFANRNFMQLIHDDSLTFKEDIQKAQVSGQGDSLHEHIANLAGSPAIKKGILQTVKVVDELVKVMGRHKPENIVIEMARENQTTQKGQKNSRERMKRIEEGIKELGSQILKEHPVENTQLQNEKLYLYYLQNGRDMYVDQELDINRLSDYDVDHIVPQSFLKDDSIDNKVLTRSDKARGKSDNVPSEEVVKKMKNYWRQLLNAKLITQRKFDNLTKAERGGLSELDKAGFIKRQLVETRQITKHVAQILDSRMNTKYDENDKLIREVKVITLKSKLVSDFRKDFQFYKVREINNYHHAHDAYLNAVVGTALIKKYPKLESEFVYGDYKVYDVRKMIAKSEQEIGKATAKYFFYSNIMNFFKTEITLANGEIRKRPLIETNGETGEIVWDKGRDFATVRKVLSMPQVNIVKKTEVQTGGFSKESILPKRNSDKLIARKKDWDPKKYGGFDSPTVAYSVLVVAKVEKGKSKKLKSVKELLGITIMERSSFEKNPIDFLEAKGYKEVKKDLIIKLPKYSLFELENGRKRMLASAGELQKGNELALPSKYVNFLYLASHYEKLKGSPEDNEQKQLFVEQHKHYLDEIIEQISEFSKRVILADANLDKVLSAYNKHRDKPIREQAENIIHLFTLTNLGAPAAFKYFDTTIDRKRYTSTKEVLDATLIHQSITGLYETRIDLSQLGGDGGEAAAKEAAAKEAAAKEAAAKEAAAKGGMNPLQLLQPLPAEIKGTKLLAHWNSGATITCIPESFLEDEQPIKKTLIKTIHGEKQQNVYYVTFKVKGRKVEAEVIASPYEYILLSPTDVPWLTQQPLQLTILVPLQEYQEKILSKTALPEDQKQQLKTLFVKYDNLWQHWENQVGHRKIRPHNIATGDYPPRPQKQYPINPKAKPSIQIVIDDLLKQGVLTPQNSTMNTPVYPVPKPDGRWRMVLDYREVNKTIPLTAAQNQHSAGILATIVRQKYKTTLDLANGFWAHPITPESYWLTAFTWQGKQYCWTRLPQGFLNSPALFNADVVDLLKEIPNVQVYVDDIYLSHDDPKEHVQQLEKVFQILLQAGYVVSLKKSEIGQKTVEFLGFNITKEGRGLTDTFKTKLLNITPPKDLKQLQSILGKLNFARNFIPNFAELVQPLYNLIAPAKGKYIEWSEENTKQLNMVIEALNTASNLEERLPEQRLVIKVNTSPSAGYVRYYNETGKKPIMYLNYVFSKAELKFSMLEKLLTTMHKALIKAMDLAMGQEILVYSPIVSMTKIQKTPLPERKALPIRWITWMTYLEDPRIQFHYDKTLPELKHIPDVYTSSQSPVKHPSQYEGVFYTDGSAIKSPDPTKSNNAGMGIVHATYKPEYQVLNQWSIPLGNHTAQMAEIAAVEFACKKALKIPGPVLVITDSFYVAESANKELPYWKSNGFVNNKKKPLKHISKWKSIAECLSMKPDITIQHEKGISLQIPVFILKGNALADKLATQGSYVVNAGKRTADGSEFEKRTADGSEFESPKKKAKVE

SEQ ID NO: 6430 - protein, 2108 aa, synthetic construct
MPAAKRVKLDGGDKKYSIGLDIGTNSVGWAVITDEYKVPSKKFKVLGNTDRHSIKKNLIGALLFDSGETAEATRLKRTARRRYTRRKNRICYLQEIFSNEMAKVDDSFFHRLEESFLVEEDKKHERHPIFGNIVDEVAYHEKYPTIYHLRKKLVDSTDKADLRLIYLALAHMIKFRGHFLIEGDLNPDNSDVDKLFIQLVQTYNQLFEENPINASGVDAKAILSARLSKSRRLENLIAQLPGEKKNGLFGNLIALSLGLTPNFKSNFDLAEDAKLQLSKDTYDDDLDNLLAQIGDQYADLFLAAKNLSDAILLSDILRVNTEITKAPLSASMIKRYDEHHQDLTLLKALVRQQLPEKYKEIFFDQSKNGYAGYIDGGASQEEFYKFIKPILEKMDGTEELLVKLNREDLLRKQRTFDNGSIPHQIHLGELHAILRRQEDFYPFLKDNREKIEKILTFRIPYYVGPLARGNSRFAWMTRKSEETITPWNFEEVVDKGASAQSFIERMTNFDKNLPNEKVLPKHSLLYEYFTVYNELTKVKYVTEGMRKPAFLSGEQKKAIVDLLFKTNRKVTVKQLKEDYFKKIECFDSVEISGVEDRFNASLGTYHDLLKIIKDKDFLDNEENEDILEDIVLTLTLFEDREMIEERLKTYAHLFDDKVMKQLKRRRYTGWGRLSRKLINGIRDKQSGKTILDFLKSDGFANRNFMQLIHDDSLTFKEDIQKAQVSGQGDSLHEHIANLAGSPAIKKGILQTVKVVDELVKVMGRHKPENIVIEMARENQTTQKGQKNSRERMKRIEEGIKELGSQILKEHPVENTQLQNEKLYLYYLQNGRDMYVDQELDINRLSDYDVDHIVPQSFLKDDSIDNKVLTRSDKARGKSDNVPSEEVVKKMKNYWRQLLNAKLITQRKFDNLTKAERGGLSELDKAGFIKRQLVETRQITKHVAQILDSRMNTKYDENDKLIREVKVITLKSKLVSDFRKDFQFYKVREINNYHHAHDAYLNAVVGTALIKKYPKLESEFVYGDYKVYDVRKMIAKSEQEIGKATAKYFFYSNIMNFFKTEITLANGEIRKRPLIETNGETGEIVWDKGRDFATVRKVLSMPQVNIVKKTEVQTGGFSKESILPKRNSDKLIARKKDWDPKKYGGFDSPTVAYSVLVVAKVEKGKSKKLKSVKELLGITIMERSSFEKNPIDFLEAKGYKEVKKDLIIKLPKYSLFELENGRKRMLASAGELQKGNELALPSKYVNFLYLASHYEKLKGSPEDNEQKQLFVEQHKHYLDEIIEQISEFSKRVILADANLDKVLSAYNKHRDKPIREQAENIIHLFTLTNLGAPAAFKYFDTTIDRKRYTSTKEVLDATLIHQSITGLYETRIDLSQLGGDGGEAAAKEAAAKEAAAKEAAAKEAAAKGGVLNLEEEYRLHEKPVPSSIDPSWLQLFPTVWAERAGMGLANQVPPVVVELRSGASPVAVRQYPMSKEAREGIRPHIQKFLDLGVLVPCRSPWNTPLLPVKKPGTNDYRPVQDLREINKRVQDIHPTVPNPYNLLSSLPPSYTWYSVLDLKDAFFCLRLHPNSQPLFAFEWKDPEKGNTGQLTWTRLPQGFKNSPTLFNEALHRDLAPFRALNPQVVLLQYVDDLLVAAPTYEDCKKGTQKLLQELSKLGYRVSAKKAQLCQREVTYLGYLLKEGKRWLTPARKATVMKIPVPTTPRQVREFLGTAGFCRLWIPGFASLAAPLYPLTKPSIPFIWTEEHQQAFDHIKKALLSAPALALPDLTKPFTLYIDERAGVARGVLTQTLGPWRRPVAYLSKKLDPVASGWPTCLKAVAAVALLLKDADKLTLGQNVTVIASHSLESIVRQPPDRWMTNARMTHYQSLLLNERVSFAPPAVLNPATLLPVESEATPVHRCSEILAEETGTRRDLEDQPLPGVPTWYTDGSSFITEGKRRAGAPIVDGKRTVWASSLPEGTSAQKAELVALTQALRLAEGKNINIYTDSRYAFATAHIHGAIYKQRGWLTSAGKDIKNKEEILALLEAIHLPRRVAIIHCPGHQRGSNPVATGNRRADEAAKQAALSTRVLAGTTKPAGKRTADGSEFEKRTADGSEFESPKKKAKVE

SEQ ID NO: 6431 - protein, 2108 aa, synthetic construct
MPAAKRVKLDGGDKKYSIGLDIGTNSVGWAVITDEYKVPSKKFKVLGNTDRHSIKKNLIGALLFDSGETAEATRLKRTARRRYTRRKNRICYLQEIFSNEMAKVDDSFFHRLEESFLVEEDKKHERHPIFGNIVDEVAYHEKYPTIYHLRKKLVDSTDKADLRLIYLALAHMIKFRGHFLIEGDLNPDNSDVDKLFIQLVQTYNQLFEENPINASGVDAKAILSARLSKSRRLENLIAQLPGEKKNGLFGNLIALSLGLTPNFKSNFDLAEDAKLQLSKDTYDDDLDNLLAQIGDQYADLFLAAKNLSDAILLSDILRVNTEITKAPLSASMIKRYDEHHQDLTLLKALVRQQLPEKYKEIFFDQSKNGYAGYIDGGASQEEFYKFIKPILEKMDGTEELLVKLNREDLLRKQRTFDNGSIPHQIHLGELHAILRRQEDFYPFLKDNREKIEKILTFRIPYYVGPLARGNSRFAWMTRKSEETITPWNFEEVVDKGASAQSFIERMTNFDKNLPNEKVLPKHSLLYEYFTVYNELTKVKYVTEGMRKPAFLSGEQKKAIVDLLFKTNRKVTVKQLKEDYFKKIECFDSVEISGVEDRFNASLGTYHDLLKIIKDKDFLDNEENEDILEDIVLTLTLFEDREMIEERLKTYAHLFDDKVMKQLKRRRYTGWGRLSRKLINGIRDKQSGKTILDFLKSDGFANRNFMQLIHDDSLTFKEDIQKAQVSGQGDSLHEHIANLAGSPAIKKGILQTVKVVDELVKVMGRHKPENIVIEMARENQTTQKGQKNSRERMKRIEEGIKELGSQILKEHPVENTQLQNEKLYLYYLQNGRDMYVDQELDINRLSDYDVDHIVPQSFLKDDSIDNKVLTRSDKARGKSDNVPSEEVVKKMKNYWRQLLNAKLITQRKFDNLTKAERGGLSELDKAGFIKRQLVETRQITKHVAQILDSRMNTKYDENDKLIREVKVITLKSKLVSDFRKDFQFYKVREINNYHHAHDAYLNAVVGTALIKKYPKLESEFVYGDYKVYDVRKMIAKSEQEIGKATAKYFFYSNIMNFFKTEITLANGEIRKRPLIETNGETGEIVWDKGRDFATVRKVLSMPQVNIVKKTEVQTGGFSKESILPKRNSDKLIARKKDWDPKKYGGFDSPTVAYSVLVVAKVEKGKSKKLKSVKELLGITIMERSSFEKNPIDFLEAKGYKEVKKDLIIKLPKYSLFELENGRKRMLASAGELQKGNELALPSKYVNFLYLASHYEKLKGSPEDNEQKQLFVEQHKHYLDEIIEQISEFSKRVILADANLDKVLSAYNKHRDKPIREQAENIIHLFTLTNLGAPAAFKYFDTTIDRKRYTSTKEVLDATLIHQSITGLYETRIDLSQLGGDGGEAAAKEAAAKEAAAKEAAAKEAAAKGGVLNLEEEYRLHEKPVPSSIDPSWLQLFPTVWAERAGMGLANQVPPVVVELRSGASPVAVRQYPMSKEAREGIRPHIQKFLDLGVLVPCRSPWNTPLLPVKKPGTNDYRPVQDLREINKRVQDIHPTVPNPYNLLSSLPPSYTWYSVLDLKDAFFCLRLHPNSQPLFAFEWKDPEKGNTGQLTWTRLPQGFKNSPTLFNEALHRDLAPFRALNPQVVLLQYVDDLLVAAPTYEDCKKGTQKLLQELSKLGYRVSAKKAQLCQREVTYLGYLLKEGKRWLTPARKATVMKIPVPTTPRQVREFLGKAGFCRLFIPGFASLAAPLYPLTKPSIPFIWTEEHQQAFDHIKKALLSAPALALPDLTKPFTLYIDERAGVARGVLTQTLGPWRRPVAYLSKKLDPVASGWPTCLKAVAAVALLLKDADKLTLGQNVTVIASHSLESIVRQPPDRWMTNARMTHYQSLLLNERVSFAPPAVLNPATLLPVESEATPVHRCSEILAEETGTRRDLEDQPLPGVPTWYTDGSSFITEGKRRAGAPIVDGKRTVWASSLPEGTSAQKAELVALTQALRLAEGKNINIYTDSRYAFATAHIHGAIYKQRGWLTSAGKDIKNKEEILALLEAIHLPRRVAIIHCPGHQRGSNPVATGNRRADEAAKQAALSTRVLAGTTKPAGKRTADGSEFEKRTADGSEFESPKKKAKVE

SEQ ID NO: 6432 - protein, 2232 aa, synthetic construct
MPAAKRVKLDGGDKKYSIGLDIGTNSVGWAVITDEYKVPSKKFKVLGNTDRHSIKKNLIGALLFDSGETAEATRLKRTARRRYTRRKNRICYLQEIFSNEMAKVDDSFFHRLEESFLVEEDKKHERHPIFGNIVDEVAYHEKYPTIYHLRKKLVDSTDKADLRLIYLALAHMIKFRGHFLIEGDLNPDNSDVDKLFIQLVQTYNQLFEENPINASGVDAKAILSARLSKSRRLENLIAQLPGEKKNGLFGNLIALSLGLTPNFKSNFDLAEDAKLQLSKDTYDDDLDNLLAQIGDQYADLFLAAKNLSDAILLSDILRVNTEITKAPLSASMIKRYDEHHQDLTLLKALVRQQLPEKYKEIFFDQSKNGYAGYIDGGASQEEFYKFIKPILEKMDGTEELLVKLNREDLLRKQRTFDNGSIPHQIHLGELHAILRRQEDFYPFLKDNREKIEKILTFRIPYYVGPLARGNSRFAWMTRKSEETITPWNFEEVVDKGASAQSFIERMTNFDKNLPNEKVLPKHSLLYEYFTVYNELTKVKYVTEGMRKPAFLSGEQKKAIVDLLFKTNRKVTVKQLKEDYFKKIECFDSVEISGVEDRFNASLGTYHDLLKIIKDKDFLDNEENEDILEDIVLTLTLFEDREMIEERLKTYAHLFDDKVMKQLKRRRYTGWGRLSRKLINGIRDKQSGKTILDFLKSDGFANRNFMQLIHDDSLTFKEDIQKAQVSGQGDSLHEHIANLAGSPAIKKGILQTVKVVDELVKVMGRHKPENIVIEMARENQTTQKGQKNSRERMKRIEEGIKELGSQILKEHPVENTQLQNEKLYLYYLQNGRDMYVDQELDINRLSDYDVDHIVPQSFLKDDSIDNKVLTRSDKARGKSDNVPSEEVVKKMKNYWRQLLNAKLITQRKFDNLTKAERGGLSELDKAGFIKRQLVETRQITKHVAQILDSRMNTKYDENDKLIREVKVITLKSKLVSDFRKDFQFYKVREINNYHHAHDAYLNAVVGTALIKKYPKLESEFVYGDYKVYDVRKMIAKSEQEIGKATAKYFFYSNIMNFFKTEITLANGEIRKRPLIETNGETGEIVWDKGRDFATVRKVLSMPQVNIVKKTEVQTGGFSKESILPKRNSDKLIARKKDWDPKKYGGFDSPTVAYSVLVVAKVEKGKSKKLKSVKELLGITIMERSSFEKNPIDFLEAKGYKEVKKDLIIKLPKYSLFELENGRKRMLASAGELQKGNELALPSKYVNFLYLASHYEKLKGSPEDNEQKQLFVEQHKHYLDEIIEQISEFSKRVILADANLDKVLSAYNKHRDKPIREQAENIIHLFTLTNLGAPAAFKYFDTTIDRKRYTSTKEVLDATLIHQSITGLYETRIDLSQLGGDGGEAAAKEAAAKEAAAKEAAAKEAAAKGGTLGDQGSRGSDPLPEPRVTLTVEGIPTEFLVNTGAEHSVLTKPMGKMGSKRTVVAGATGSKVYPWTTKRLLKIGQKQVTHSFLVIPECPAPLLGRDLLTKLKAQIQFSTEGPQVTWEDRPAMCLVLNLEEEYRLHEKPVPPSIDPSWLQLFPMVWAEKAGMGLANQVPPVVVELKSDASPVAVRQYPMSKEAREGIRPHIQRFLDLGILVPCQSPWNTPLLPVKKPGTNDYRPVQDLREVNKRVQDIHPTVPNPYNLLSSLPPSHTWYSVLDLKDAFFCLKLHPNSQPLFAFEWRDPEKGNTGQLTWTRLPQGFKNSPTLFNEALHRDLASFRALNPQVVMLQYVDDLLVAAPTYRDCKEGTRRLLQELSKLGYRVSAKKAQLCREEVTYLGYLLKGGKRWLTPARKATVMKIPTPTTPRQVREFLGTAGFCRLWIPGFASLAAPLYPLTRPKVPFTWTEAHQEAFGRIKEALLSAPALALPDLTKPFALYVDEKEGVARGVLTQTLGPWRRPVAYLSKKLDPVASGWPTCLKAIAAVALLLKDADKLTLGQNVLVIAPHNLESIVRQPPDRWMTNARMTHYQSLLLNERVSFAPPAILNPATLLPVESDDTPIHICSEILAEETGTRPDLRDQPLPGVPAWYTDGSSFIMDGRRQAGAAIVDNKRTVWASNLPEGTSAQKAELIALTQALRLAEGKSINIYTDSRYAFATAHVHGAIYKQRGWLTSAGKDIKNKEEILALLEAIHLPKRVAIIHCPGHQRGTDPVATGNRKADEAAKQAAQSTRILTETTKNAGKRTADGSEFEKRTADGSEFESPKKKAKVE

SEQ ID NO: 6433 - protein, 2110 aa, synthetic construct
MPAAKRVKLDGGDKKYSIGLDIGTNSVGWAVITDEYKVPSKKFKVLGNTDRHSIKKNLIGALLFDSGETAEATRLKRTARRRYTRRKNRICYLQEIFSNEMAKVDDSFFHRLEESFLVEEDKKHERHPIFGNIVDEVAYHEKYPTIYHLRKKLVDSTDKADLRLIYLALAHMIKFRGHFLIEGDLNPDNSDVDKLFIQLVQTYNQLFEENPINASGVDAKAILSARLSKSRRLENLIAQLPGEKKNGLFGNLIALSLGLTPNFKSNFDLAEDAKLQLSKDTYDDDLDNLLAQIGDQYADLFLAAKNLSDAILLSDILRVNTEITKAPLSASMIKRYDEHHQDLTLLKALVRQQLPEKYKEIFFDQSKNGYAGYIDGGASQEEFYKFIKPILEKMDGTEELLVKLNREDLLRKQRTFDNGSIPHQIHLGELHAILRRQEDFYPFLKDNREKIEKILTFRIPYYVGPLARGNSRFAWMTRKSEETITPWNFEEVVDKGASAQSFIERMTNFDKNLPNEKVLPKHSLLYEYFTVYNELTKVKYVTEGMRKPAFLSGEQKKAIVDLLFKTNRKVTVKQLKEDYFKKIECFDSVEISGVEDRFNASLGTYHDLLKIIKDKDFLDNEENEDILEDIVLTLTLFEDREMIEERLKTYAHLFDDKVMKQLKRRRYTGWGRLSRKLINGIRDKQSGKTILDFLKSDGFANRNFMQLIHDDSLTFKEDIQKAQVSGQGDSLHEHIANLAGSPAIKKGILQTVKVVDELVKVMGRHKPENIVIEMARENQTTQKGQKNSRERMKRIEEGIKELGSQILKEHPVENTQLQNEKLYLYYLQNGRDMYVDQELDINRLSDYDVDHIVPQSFLKDDSIDNKVLTRSDKARGKSDNVPSEEVVKKMKNYWRQLLNAKLITQRKFDNLTKAERGGLSELDKAGFIKRQLVETRQITKHVAQILDSRMNTKYDENDKLIREVKVITLKSKLVSDFRKDFQFYKVREINNYHHAHDAYLNAVVGTALIKKYPKLESEFVYGDYKVYDVRKMIAKSEQEIGKATAKYFFYSNIMNFFKTEITLANGEIRKRPLIETNGETGEIVWDKGRDFATVRKVLSMPQVNIVKKTEVQTGGFSKESILPKRNSDKLIARKKDWDPKKYGGFDSPTVAYSVLVVAKVEKGKSKKLKSVKELLGITIMERSSFEKNPIDFLEAKGYKEVKKDLIIKLPKYSLFELENGRKRMLASAGELQKGNELALPSKYVNFLYLASHYEKLKGSPEDNEQKQLFVEQHKHYLDEIIEQISEFSKRVILADANLDKVLSAYNKHRDKPIREQAENIIHLFTLTNLGAPAAFKYFDTTIDRKRYTSTKEVLDATLIHQSITGLYETRIDLSQLGGDGGEAAAKEAAAKEAAAKEAAAKEAAAKGGTLNLEDEYRLYETSAEPEVSPGSTWLSDFPQAWAETGGMGLAVRQAPLIIPLKATSTPVSIKQYPMSQEAKLGIKPHIQRLLDQGILVPCQSPWNTPLLPVKKPGTNDYRPVQDLREVNKRVEDIHPTVPNPYNLLSGLPPSHRWYTVLDLKDAFFCLRLHPTSQPLFAFEWRDPGMGISGQLTWTRLPQGFKNSPTLFNEALHRDLADFRIQHPDLILLQYVDDILLAATSELDCQQGTRALLLTLGNLGYRASAKKAQLCQKQVKYLGYLLKEGQRWLTEARKETVMGQPTPKTPRQLREFLGTAGFCRLWIPGFAEMAAPLYPLTKPGTLFNWGPDQQKAYQEIKQALLTAPALGLPDLTKPFELFVDEKQGYAKGVLTQKLGPWRRPVAYLSKKLDPVAAGWPPCLRMVAAIAVLRKDAGKLTMGQPLVILAPHAVEALVKQPPDRWLSNARMTHYQAMLLDTDRVQFGPVVALNPATLLPLPEEGAPHDCLEILAETHGTRPDLTDQPIPDADHTWYTDGSSFLQEGQRKAGAAVTTETEVIWARALPAGTSAQRAELIALTQALKMAEGKRLNVYTDSRYAFATAHIHGEIYRRRGWLTSEGREIKNKSEILALLKALFLPKRLSIIHCLGHQKGDSAEARGNRLADQAAREAAIKTPPDTSTLLAGKRTADGSEFEKRTADGSEFESPKKKAKVE

SEQ ID NO: 6434 - protein, 2110 aa, synthetic construct; identical to SEQ ID NO: 4507

SEQ ID NO: 6435 - protein, 2110 aa, synthetic construct
MPAAKRVKLDGGDKKYSIGLDIGTNSVGWAVITDEYKVPSKKFKVLGNTDRHSIKKNLIGALLFDSGETAEATRLKRTARRRYTRRKNRICYLQEIFSNEMAKVDDSFFHRLEESFLVEEDKKHERHPIFGNIVDEVAYHEKYPTIYHLRKKLVDSTDKADLRLIYLALAHMIKFRGHFLIEGDLNPDNSDVDKLFIQLVQTYNQLFEENPINASGVDAKAILSARLSKSRRLENLIAQLPGEKKNGLFGNLIALSLGLTPNFKSNFDLAEDAKLQLSKDTYDDDLDNLLAQIGDQYADLFLAAKNLSDAILLSDILRVNTEITKAPLSASMIKRYDEHHQDLTLLKALVRQQLPEKYKEIFFDQSKNGYAGYIDGGASQEEFYKFIKPILEKMDGTEELLVKLNREDLLRKQRTFDNGSIPHQIHLGELHAILRRQEDFYPFLKDNREKIEKILTFRIPYYVGPLARGNSRFAWMTRKSEETITPWNFEEVVDKGASAQSFIERMTNFDKNLPNEKVLPKHSLLYEYFTVYNELTKVKYVTEGMRKPAFLSGEQKKAIVDLLFKTNRKVTVKQLKEDYFKKIECFDSVEISGVEDRFNASLGTYHDLLKIIKDKDFLDNEENEDILEDIVLTLTLFEDREMIEERLKTYAHLFDDKVMKQLKRRRYTGWGRLSRKLINGIRDKQSGKTILDFLKSDGFANRNFMQLIHDDSLTFKEDIQKAQVSGQGDSLHEHIANLAGSPAIKKGILQTVKVVDELVKVMGRHKPENIVIEMARENQTTQKGQKNSRERMKRIEEGIKELGSQILKEHPVENTQLQNEKLYLYYLQNGRDMYVDQELDINRLSDYDVDHIVPQSFLKDDSIDNKVLTRSDKARGKSDNVPSEEVVKKMKNYWRQLLNAKLITQRKFDNLTKAERGGLSELDKAGFIKRQLVETRQITKHVAQILDSRMNTKYDENDKLIREVKVITLKSKLVSDFRKDFQFYKVREINNYHHAHDAYLNAVVGTALIKKYPKLESEFVYGDYKVYDVRKMIAKSEQEIGKATAKYFFYSNIMNFFKTEITLANGEIRKRPLIETNGETGEIVWDKGRDFATVRKVLSMPQVNIVKKTEVQTGGFSKESILPKRNSDKLIARKKDWDPKKYGGFDSPTVAYSVLVVAKVEKGKSKKLKSVKELLGITIMERSSFEKNPIDFLEAKGYKEVKKDLIIKLPKYSLFELENGRKRMLASAGELQKGNELALPSKYVNFLYLASHYEKLKGSPEDNEQKQLFVEQHKHYLDEIIEQISEFSKRVILADANLDKVLSAYNKHRDKPIREQAENIIHLFTLTNLGAPAAFKYFDTTIDRKRYTSTKEVLDATLIHQSITGLYETRIDLSQLGGDGGEAAAKEAAAKEAAAKEAAAKEAAAKGGTLNIEDEYRLHETSKGPDVPLGSTWLSDFPQAWAETGGMGLAVRQAPLIIPLKATSTPVSIKQYPMSQEARLGIKPHIQRLLDQGILVPCQSPWNTPLLPVKKPGTNDYRPVQDLREVNKRVEDIHPTVPNPYNLLSGLPPSHQWYTVLDLKDAFFCLRLHPTSQSLFAFEWRDPEMGISGQLTWTRLPQGFKNSPTLFDEALHRDLADFRIQHPDLILLQYVDDLLLAATSELDCQQGTRALLQTLGDLGYRASAKKAQICQKQVKYLGYLLKEGQRWLTEARKETVMGQPTPKTPRQLREFLGTAGFCRLWIPGFAEMAAPLYPLTKTGTLFEWGPDQQKAYQEIKQALLTAPALGLPDLTKPFELFVDEKQGYAKGVLTQKLGPWRRPVAYLSKKLDPVAAGWPPCLRMVAAIAVLTKDAGKLTMGQPLVILAPHAVEALVKQPPDRWLSNARMTHYQALLLDTDRVQFGPIVALNPATLLPLPEEGLQHDCLDILAEAHGTRPDLTDQPLPDADHTWYTDGSSFLQEGQRKAGAAVTTETEVVWAKALPAGTSAQRAELIALTQALKMAEGKKLNVYTDSRYAFATAHIHGEIYRRRGLLTSEGKEIKNKDEILALLKALFLPKRLSIIHCPGHQKGNRAEARGNRMADQAAREVATRETPETSTLLAGKRTADGSEFEKRTADGSEFESPKKKAKVE

SEQ ID NO: 6436 - protein, 2110 aa, synthetic construct
MPAAKRVKLDGGDKKYSIGLDIGTNSVGWAVITDEYKVPSKKFKVLGNTDRHSIKKNLIGALLFDSGETAEATRLKRTARRRYTRRKNRICYLQEIFSNEMAKVDDSFFHRLEESFLVEEDKKHERHPIFGNIVDEVAYHEKYPTIYHLRKKLVDSTDKADLRLIYLALAHMIKFRGHFLIEGDLNPDNSDVDKLFIQLVQTYNQLFEENPINASGVDAKAILSARLSKSRRLENLIAQLPGEKKNGLFGNLIALSLGLTPNFKSNFDLAEDAKLQLSKDTYDDDLDNLLAQIGDQYADLFLAAKNLSDAILLSDILRVNTEITKAPLSASMIKRYDEHHQDLTLLKALVRQQLPEKYKEIFFDQSKNGYAGYIDGGASQEEFYKFIKPILEKMDGTEELLVKLNREDLLRKQRTFDNGSIPHQIHLGELHAILRRQEDFYPFLKDNREKIEKILTFRIPYYVGPLARGNSRFAWMTRKSEETITPWNFEEVVDKGASAQSFIERMTNFDKNLPNEKVLPKHSLLYEYFTVYNELTKVKYVTEGMRKPAFLSGEQKKAIVDLLFKTNRKVTVKQLKEDYFKKIECFDSVEISGVEDRFNASLGTYHDLLKIIKDKDFLDNEENEDILEDIVLTLTLFEDREMIEERLKTYAHLFDDKVMKQLKRRRYTGWGRLSRKLINGIRDKQSGKTILDFLKSDGFANRNFMQLIHDDSLTFKEDIQKAQVSGQGDSLHEHIANLAGSPAIKKGILQTVKVVDELVKVMGRHKPENIVIEMARENQTTQKGQKNSRERMKRIEEGIKELGSQILKEHPVENTQLQNEKLYLYYLQNGRDMYVDQELDINRLSDYDVDHIVPQSFLKDDSIDNKVLTRSDKARGKSDNVPSEEVVKKMKNYWRQLLNAKLITQRKFDNLTKAERGGLSELDKAGFIKRQLVETRQITKHVAQILDSRMNTKYDENDKLIREVKVITLKSKLVSDFRKDFQFYKVREINNYHHAHDAYLNAVVGTALIKKYPKLESEFVYGDYKVYDVRKMIAKSEQEIGKATAKYFFYSNIMNFFKTEITLANGEIRKRPLIETNGETGEIVWDKGRDFATVRKVLSMPQVNIVKKTEVQTGGFSKESILPKRNSDKLIARKKDWDPKKYGGFDSPTVAYSVLVVAKVEKGKSKKLKSVKELLGITIMERSSFEKNPIDFLEAKGYKEVKKDLIIKLPKYSLFELENGRKRMLASAGELQKGNELALPSKYVNFLYLASHYEKLKGSPEDNEQKQLFVEQHKHYLDEIIEQISEFSKRVILADANLDKVLSAYNKHRDKPIREQAENIIHLFTLTNLGAPAAFKYFDTTIDRKRYTSTKEVLDATLIHQSITGLYETRIDLSQLGGDGGEAAAKEAAAKEAAAKEAAAKEAAAKGGTLNIEDEHRLHETSKEPDVSLGSTWLSDFPQAWAETGGMGLAVRQAPLIIPLKATSTPVSIKQYPMSQEARLGIKPHIQRLLDQGILVPCQSPWNTPLLPVKKPGTNDYRPVQDLREVNKRVEDIHPTVPNPYNLLSGLPPSHQWYTVLDLKDAFFCLRLHPTSQPLFAFEWRDPEMGISGQLTWTRLPQGFKNSPTLFDEALHRDLADFRIQHPDLILLQYVDDLLLAATSELDCQQGTRALLQTLGNLGYRASAKKAQICQKQVKYLGYLLKEGQRWLTEARKETVMGQPTPKTPRQLREFLGTAGFCRLWIPGFAEMAAPLYPLTKTGTLFNWGPDQQKAYQEIKQALLTAPALGLPDLTKPFELFVDEKQGYAKGVLTQKLGPWRRPVAYLSKKLDPVAAGWPPCLRMVAAIAVLTKDAGKLTMGQPLVILAPHAVEALVKQPPDRWLSNARMTHYQALLLDTDRVQFGPVVALNPATLLPLPEEGLQHNCLDILAEAHGTRPDLTDQPLPDADHTWYTDGSSLLQEGQRKAGAAVTTETEVIWAKALPAGTSAQRAELIALTQALKMAEGKKLNVYTDSRYAFATAHIHGEIYRRRGLLTSEGKEIKNKDEILALLKALFLPKRLSIIHCPGHQKGHSAEARGNRMADQAARKAAITETPDTSTLLAGKRTADGSEFEKRTADGSEFESPKKKAKVE

SEQ ID NO: 6437 - protein, 2190 aa, synthetic construct
MPAAKRVKLDGGDKKYSIGLDIGTNSVGWAVITDEYKVPSKKFKVLGNTDRHSIKKNLIGALLFDSGETAEATRLKRTARRRYTRRKNRICYLQEIFSNEMAKVDDSFFHRLEESFLVEEDKKHERHPIFGNIVDEVAYHEKYPTIYHLRKKLVDSTDKADLRLIYLALAHMIKFRGHFLIEGDLNPDNSDVDKLFIQLVQTYNQLFEENPINASGVDAKAILSARLSKSRRLENLIAQLPGEKKNGLFGNLIALSLGLTPNFKSNFDLAEDAKLQLSKDTYDDDLDNLLAQIGDQYADLFLAAKNLSDAILLSDILRVNTEITKAPLSASMIKRYDEHHQDLTLLKALVRQQLPEKYKEIFFDQSKNGYAGYIDGGASQEEFYKFIKPILEKMDGTEELLVKLNREDLLRKQRTFDNGSIPHQIHLGELHAILRRQEDFYPFLKDNREKIEKILTFRIPYYVGPLARGNSRFAWMTRKSEETITPWNFEEVVDKGASAQSFIERMTNFDKNLPNEKVLPKHSLLYEYFTVYNELTKVKYVTEGMRKPAFLSGEQKKAIVDLLFKTNRKVTVKQLKEDYFKKIECFDSVEISGVEDRFNASLGTYHDLLKIIKDKDFLDNEENEDILEDIVLTLTLFEDREMIEERLKTYAHLFDDKVMKQLKRRRYTGWGRLSRKLINGIRDKQSGKTILDFLKSDGFANRNFMQLIHDDSLTFKEDIQKAQVSGQGDSLHEHIANLAGSPAIKKGILQTVKVVDELVKVMGRHKPENIVIEMARENQTTQKGQKNSRERMKRIEEGIKELGSQILKEHPVENTQLQNEKLYLYYLQNGRDMYVDQELDINRLSDYDVDHIVPQSFLKDDSIDNKVLTRSDKARGKSDNVPSEEVVKKMKNYWRQLLNAKLITQRKFDNLTKAERGGLSELDKAGFIKRQLVETRQITKHVAQILDSRMNTKYDENDKLIREVKVITLKSKLVSDFRKDFQFYKVREINNYHHAHDAYLNAVVGTALIKKYPKLESEFVYGDYKVYDVRKMIAKSEQEIGKATAKYFFYSNIMNFFKTEITLANGEIRKRPLIETNGETGEIVWDKGRDFATVRKVLSMPQVNIVKKTEVQTGGFSKESILPKRNSDKLIARKKDWDPKKYGGFDSPTVAYSVLVVAKVEKGKSKKLKSVKELLGITIMERSSFEKNPIDFLEAKGYKEVKKDLIIKLPKYSLFELENGRKRMLASAGELQKGNELALPSKYVNFLYLASHYEKLKGSPEDNEQKQLFVEQHKHYLDEIIEQISEFSKRVILADANLDKVLSAYNKHRDKPIREQAENIIHLFTLTNLGAPAAFKYFDTTIDRKRYTSTKEVLDATLIHQSITGLYETRIDLSQLGGDGGEAAAKEAAAKEAAAKEAAAKEAAAKGGMDPLQLLQPLEAEIKGTKLKAHWNSGATITCVPEAFLEDERPIQTMLIKTIHGEKQQDVYYLTFKVQGRKVEAEVLASPYDYILLNPSDVPWLMKKPLQLTVLVPLHEYQERLLQQTALPKEQKELLQKLFLKYDALWQHWENQVGHRRIKPHNIATGTLAPRPQKQYPINPKAKPSIQIVIDDLLKQGVLIQQNSTMNTPVYPVPKPDGKWRMVLDYREVNKTIPLIAAQNQHSAGILSSIYRGKYKTTLDLTNGFWAHPITPESYWLTAFTWQGKQYCWTRLPQGFLNSPALFTADVVDLLKEIPNVQAYVDDIYISHDDPQEHLEQLEKIFSILLNAGYVVSLKKSEIAQREVEFLGFNITKEGRGLTDTFKQKLLNITPPKDLKQLQSILGLLNFARNFIPNYSELVKPLYTIVANANGKFISWTEDNSNQLQHIISVLNQADNLEERNPETRLIIKVNSSPSAGYIRYYNEGSKRPIMYVNYIFSKAEAKFTQTEKLLTTMHKGLIKAMDLAMGQEILVYSPIVSMTKIQRTPLPERKALPVRWITWMTYLEDPRIQFHYDKSLPELQQIPNVTEDVIAKTKHPSEFAMVFYTDGSAIKHPDVNKSHSAGMGIAQVQFIPEYKIVHQWSIPLGDHTAQLAEIAAVEFACKKALKISGPVLIVTDSFYVAESANKELPYWKSNGFLNNKKKPLRHVSKWKSIAECLQLKPDIIIMHEKGHQQPMTTLHTEGNNLADKLATQGSYVVHAGKRTADGSEFEKRTADGSEFESPKKKAKVE

SEQ ID NO: 6438 - protein, 2110 aa, synthetic construct
MPAAKRVKLDGGDKKYSIGLDIGTNSVGWAVITDEYKVPSKKFKVLGNTDRHSIKKNLIGALLFDSGETAEATRLKRTARRRYTRRKNRICYLQEIFSNEMAKVDDSFFHRLEESFLVEEDKKHERHPIFGNIVDEVAYHEKYPTIYHLRKKLVDSTDKADLRLIYLALAHMIKFRGHFLIEGDLNPDNSDVDKLFIQLVQTYNQLFEENPINASGVDAKAILSARLSKSRRLENLIAQLPGEKKNGLFGNLIALSLGLTPNFKSNFDLAEDAKLQLSKDTYDDDLDNLLAQIGDQYADLFLAAKNLSDAILLSDILRVNTEITKAPLSASMIKRYDEHHQDLTLLKALVRQQLPEKYKEIFFDQSKNGYAGYIDGGASQEEFYKFIKPILEKMDGTEELLVKLNREDLLRKQRTFDNGSIPHQIHLGELHAILRRQEDFYPFLKDNREKIEKILTFRIPYYVGPLARGNSRFAWMTRKSEETITPWNFEEVVDKGASAQSFIERMTNFDKNLPNEKVLPKHSLLYEYFTVYNELTKVKYVTEGMRKPAFLSGEQKKAIVDLLFKTNRKVTVKQLKEDYFKKIECFDSVEISGVEDRFNASLGTYHDLLKIIKDKDFLDNEENEDILEDIVLTLTLFEDREMIEERLKTYAHLFDDKVMKQLKRRRYTGWGRLSRKLINGIRDKQSGKTILDFLKSDGFANRNFMQLIHDDSLTFKEDIQKAQVSGQGDSLHEHIANLAGSPAIKKGILQTVKVVDELVKVMGRHKPENIVIEMARENQTTQKGQKNSRERMKRIEEGIKELGSQILKEHPVENTQLQNEKLYLYYLQNGRDMYVDQELDINRLSDYDVDHIVPQSFLKDDSIDNKVLTRSDKARGKSDNVPSEEVVKKMKNYWRQLLNAKLITQRKFDNLTKAERGGLSELDKAGFIKRQLVETRQITKHVAQILDSRMNTKYDENDKLIREVKVITLKSKLVSDFRKDFQFYKVREINNYHHAHDAYLNAVVGTALIKKYPKLESEFVYGDYKVYDVRKMIAKSEQEIGKATAKYFFYSNIMNFFKTEITLANGEIRKRPLIETNGETGEIVWDKGRDFATVRKVLSMPQVNIVKKTEVQTGGFSKESILPKRNSDKLIARKKDWDPKKYGGFDSPTVAYSVLVVAKVEKGKSKKLKSVKELLGITIMERSSFEKNPIDFLEAKGYKEVKKDLIIKLPKYSLFELENGRKRMLASAGELQKGNELALPSKYVNFLYLASHYEKLKGSPEDNEQKQLFVEQHKHYLDEIIEQISEFSKRVILADANLDKVLSAYNKHRDKPIREQAENIIHLFTLTNLGAPAAFKYFDTTIDRKRYTSTKEVLDATLIHQSITGLYETRIDLSQLGGDGGEAAAKEAAAKEAAAKEAAAKEAAAKGGTLNIEDEYRLHETSKEPDVPLGSTWLSDFPQAWAETGGMGLAVRQAPLIIPLKATSTPVSIKQYPMSQEARLGIKPHIQRLLDQGILVPCQSPWNTPLLPVKKPGTNDYRPVQDLREVNKRVEDIHPTVPNPYNLLSGLPPSHQWYTVLDLKDAFFCLRLHPTSQPLFAFEWRDPEMGISGQLTWTRLPQGFKNSPTLFDEALHRDLADFRIQHPDLILLQYVDDLLLAATSEQDCQRGTRALLQTLGNLGYRASAKKAQICQKQVKYLGYLLKEGQRWLTEARKETVMGQPTPKTPRQLREFLGTAGFCRLWIPGFAEMAAPLYPLTKTGTLFNWGPDQQKAYQEIKQALLTAPALGLPDLTKPFELFVDEKQGYAKGVLTQKLGPWRRPVAYLSKKLDPVAAGWPPCLRMVAAIAVLTKDAGKLTMGQPLVILAPHAVEALVKQPPDRWLSNARMTHYQAMLLDTDRVQFGPVVALNPATLLPLPEKEAPHDCLEILAETHGTRPDLTDQPIPDADYTWYTDGSSFLQEGQRRAGAAVTTETEVIWARALPAGTSAQRAELIALTQALKMAEGKKLNVYTDSRYAFATAHVHGEIYRRRGLLTSEGREIKNKNEILALLKALFLPKRLSIIHCPGHQKGNSAEARGNRMADQAAREAAMKAVLETSTLLAGKRTADGSEFEKRTADGSEFESPKKKAKVE

SEQ ID NO: 6439 - protein, 2110 aa, synthetic construct
MPAAKRVKLDGGDKKYSIGLDIGTNSVGWAVITDEYKVPSKKFKVLGNTDRHSIKKNLIGALLFDSGETAEATRLKRTARRRYTRRKNRICYLQEIFSNEMAKVDDSFFHRLEESFLVEEDKKHERHPIFGNIVDEVAYHEKYPTIYHLRKKLVDSTDKADLRLIYLALAHMIKFRGHFLIEGDLNPDNSDVDKLFIQLVQTYNQLFEENPINASGVDAKAILSARLSKSRRLENLIAQLPGEKKNGLFGNLIALSLGLTPNFKSNFDLAEDAKLQLSKDTYDDDLDNLLAQIGDQYADLFLAAKNLSDAILLSDILRVNTEITKAPLSASMIKRYDEHHQDLTLLKALVRQQLPEKYKEIFFDQSKNGYAGYIDGGASQEEFYKFIKPILEKMDGTEELLVKLNREDLLRKQRTFDNGSIPHQIHLGELHAILRRQEDFYPFLKDNREKIEKILTFRIPYYVGPLARGNSRFAWMTRKSEETITPWNFEEVVDKGASAQSFIERMTNFDKNLPNEKVLPKHSLLYEYFTVYNELTKVKYVTEGMRKPAFLSGEQKKAIVDLLFKTNRKVTVKQLKEDYFKKIECFDSVEISGVEDRFNASLGTYHDLLKIIKDKDFLDNEENEDILEDIVLTLTLFEDREMIEERLKTYAHLFDDKVMKQLKRRRYTGWGRLSRKLINGIRDKQSGKTILDFLKSDGFANRNFMQLIHDDSLTFKEDIQKAQVSGQGDSLHEHIANLAGSPAIKKGILQTVKVVDELVKVMGRHKPENIVIEMARENQTTQKGQKNSRERMKRIEEGIKELGSQILKEHPVENTQLQNEKLYLYYLQNGRDMYVDQELDINRLSDYDVDHIVPQSFLKDDSIDNKVLTRSDKARGKSDNVPSEEVVKKMKNYWRQLLNAKLITQRKFDNLTKAERGGLSELDKAGFIKRQLVETRQITKHVAQILDSRMNTKYDENDKLIREVKVITLKSKLVSDFRKDFQFYKVREINNYHHAHDAYLNAVVGTALIKKYPKLESEFVYGDYKVYDVRKMIAKSEQEIGKATAKYFFYSNIMNFFKTEITLANGEIRKRPLIETNGETGEIVWDKGRDFATVRKVLSMPQVNIVKKTEVQTGGFSKESILPKRNSDKLIARKKDWDPKKYGGFDSPTVAYSVLVVAKVEKGKSKKLKSVKELLGITIMERSSFEKNPIDFLEAKGYKEVKKDLIIKLPKYSLFELENGRKRMLASAGELQKGNELALPSKYVNFLYLASHYEKLKGSPEDNEQKQLFVEQHKHYLDEIIEQISEFSKRVILADANLDKVLSAYNKHRDKPIREQAENIIHLFTLTNLGAPAAFKYFDTTIDRKRYTSTKEVLDATLIHQSITGLYETRIDLSQLGGDGGEAAAKEAAAKEAAAKEAAAKEAAAKGGTLNIEDEYRLHETSKEPDVPLGSTWLSDFPQAWAETGGMGLAVRQAPLIIPLKATSTPVSIKQYPMSQEARLGIKPHIQRLLDQGILVPCQSPWNTPLLPVKKPGTNDYRPVQDLREVNKRVEDIHPTVPNPYNLLSGLPPSHQWYTVLDLKDAFFCLRLHPTSQPLFAFEWRDPEMGISGQLTWTRLPQGFKNSPTLFNEALHRDLADFRIQHPDLILLQYVDDLLLAATSEQDCQRGTRALLQTLGNLGYRASAKKAQICQKQVKYLGYLLKEGQRWLTEARKETVMGQPTPKTPRQLREFLGTAGFCRLWIPGFAEMAAPLYPLTKPGTLFNWGPDQQKAYQEIKQALLTAPALGLPDLTKPFELFVDEKQGYAKGVLTQKLGPWRRPVAYLSKKLDPVAAGWPPCLRMVAAIAVLTKDAGKLTMGQPLVILAPHAVEALVKQPPDRWLSNARMTHYQAMLLDTDRVQFGPVVALNPATLLPLPEKEAPHDCLEILAETHGTRPDLTDQPIPDADYTWYTDGSSFLQEGQRRAGAAVTTETEVIWARALPAGTSAQRAELIALTQALKMAEGKKLNVYTDSRYAFATAHVHGEIYRRRGWLTSEGREIKNKNEILALLKALFLPKRLSIIHCPGHQKGNSAEARGNRMADQAAREAAMKAVLETSTLLAGKRTADGSEFEKRTADGSEFESPKKKAKVE

SEQ ID NO: 6440 - protein, 2117 aa, synthetic construct
MPAAKRVKLDGGDKKYSIGLDIGTNSVGWAVITDEYKVPSKKFKVLGNTDRHSIKKNLIGALLFDSGETAEATRLKRTARRRYTRRKNRICYLQEIFSNEMAKVDDSFFHRLEESFLVEEDKKHERHPIFGNIVDEVAYHEKYPTIYHLRKKLVDSTDKADLRLIYLALAHMIKFRGHFLIEGDLNPDNSDVDKLFIQLVQTYNQLFEENPINASGVDAKAILSARLSKSRRLENLIAQLPGEKKNGLFGNLIALSLGLTPNFKSNFDLAEDAKLQLSKDTYDDDLDNLLAQIGDQYADLFLAAKNLSDAILLSDILRVNTEITKAPLSASMIKRYDEHHQDLTLLKALVRQQLPEKYKEIFFDQSKNGYAGYIDGGASQEEFYKFIKPILEKMDGTEELLVKLNREDLLRKQRTFDNGSIPHQIHLGELHAILRRQEDFYPFLKDNREKIEKILTFRIPYYVGPLARGNSRFAWMTRKSEETITPWNFEEVVDKGASAQSFIERMTNFDKNLPNEKVLPKHSLLYEYFTVYNELTKVKYVTEGMRKPAFLSGEQKKAIVDLLFKTNRKVTVKQLKEDYFKKIECFDSVEISGVEDRFNASLGTYHDLLKIIKDKDFLDNEENEDILEDIVLTLTLFEDREMIEERLKTYAHLFDDKVMKQLKRRRYTGWGRLSRKLINGIRDKQSGKTILDFLKSDGFANRNFMQLIHDDSLTFKEDIQKAQVSGQGDSLHEHIANLAGSPAIKKGILQTVKVVDELVKVMGRHKPENIVIEMARENQTTQKGQKNSRERMKRIEEGIKELGSQILKEHPVENTQLQNEKLYLYYLQNGRDMYVDQELDINRLSDYDVDHIVPQSFLKDDSIDNKVLTRSDKARGKSDNVPSEEVVKKMKNYWRQLLNAKLITQRKFDNLTKAERGGLSELDKAGFIKRQLVETRQITKHVAQILDSRMNTKYDENDKLIREVKVITLKSKLVSDFRKDFQFYKVREINNYHHAHDAYLNAVVGTALIKKYPKLESEFVYGDYKVYDVRKMIAKSEQEIGKATAKYFFYSNIMNFFKTEITLANGEIRKRPLIETNGETGEIVWDKGRDFATVRKVLSMPQVNIVKKTEVQTGGFSKESILPKRNSDKLIARKKDWDPKKYGGFDSPTVAYSVLVVAKVEKGKSKKLKSVKELLGITIMERSSFEKNPIDFLEAKGYKEVKKDLIIKLPKYSLFELENGRKRMLASAGELQKGNELALPSKYVNFLYLASHYEKLKGSPEDNEQKQLFVEQHKHYLDEIIEQISEFSKRVILADANLDKVLSAYNKHRDKPIREQAENIIHLFTLTNLGAPAAFKYFDTTIDRKRYTSTKEVLDATLIHQSITGLYETRIDLSQLGGDGGEAAAKEAAAKEAAAKEAAAKEAAAKEAAAKGGTAPLEEEYRLFLEAPIQNVTLLEQWKREIPKVWAEINPPGLASTQAPIHVQLLSTALPVRVRQYPITLEAKRSLRETIRKFRAAGILRPVHSPWNTPLLPVRKSGTSEYRMVQDLREVNKRVETIHPTVPNPYTLLSLLPPDRIWYSVLDLKDAFFCIPLAPESQLIFAFEWADAEEGESGQLTWTRLPQGFKNSPTLFDEALNRDLQGFRLDHPSVSLLQYVDDLLIAADTQAACLSATRDLLMTLAELGYRVSGKKAQLCQEEVTYLGFKIHKGSRSLSNSRTQAILQIPVPKTKRQVREFLGTIGYCRLWIPGFAELAQPLYAATRGGNDPLVWGEKEEEAFQSLKLALTQPPALALPSLDKPFQLFVEETSGAAKGVLTQALGPWKRPVAYLSKRLDPVAAGWPRCLRAIAAAALLTREASKLTFGQDIEITSSHNLESLLRSPPDKWLTNARITQYQVLLLDPPRVRFKQTAALNPATLLPETDDTLPIHHCLDTLDSLTSTRPDLTDQPLAQAEATLFTDGSSYIRDGKRYAGAAVVTLDSVIWAEPLPIGTSAQKAELIALTKALEWSKDKSVNIYTDSRYAFATLHVHGMIYRERGLLTAGGKAIKNAPEILALLTAVWLPKRVAVMHCKGHQKDDAPTSTGNRRADEVAREVAIRPLSTQATISAGKRTADGSEFEKRTADGSEFESPKKKAKVE

SEQ ID NO: 6441 - protein, 2117 aa, synthetic construct
MPAAKRVKLDGGDKKYSIGLDIGTNSVGWAVITDEYKVPSKKFKVLGNTDRHSIKKNLIGALLFDSGETAEATRLKRTARRRYTRRKNRICYLQEIFSNEMAKVDDSFFHRLEESFLVEEDKKHERHPIFGNIVDEVAYHEKYPTIYHLRKKLVDSTDKADLRLIYLALAHMIKFRGHFLIEGDLNPDNSDVDKLFIQLVQTYNQLFEENPINASGVDAKAILSARLSKSRRLENLIAQLPGEKKNGLFGNLIALSLGLTPNFKSNFDLAEDAKLQLSKDTYDDDLDNLLAQIGDQYADLFLAAKNLSDAILLSDILRVNTEITKAPLSASMIKRYDEHHQDLTLLKALVRQQLPEKYKEIFFDQSKNGYAGYIDGGASQEEFYKFIKPILEKMDGTEELLVKLNREDLLRKQRTFDNGSIPHQIHLGELHAILRRQEDFYPFLKDNREKIEKILTFRIPYYVGPLARGNSRFAWMTRKSEETITPWNFEEVVDKGASAQSFIERMTNFDKNLPNEKVLPKHSLLYEYFTVYNELTKVKYVTEGMRKPAFLSGEQKKAIVDLLFKTNRKVTVKQLKEDYFKKIECFDSVEISGVEDRFNASLGTYHDLLKIIKDKDFLDNEENEDILEDIVLTLTLFEDREMIEERLKTYAHLFDDKVMKQLKRRRYTGWGRLSRKLINGIRDKQSGKTILDFLKSDGFANRNFMQLIHDDSLTFKEDIQKAQVSGQGDSLHEHIANLAGSPAIKKGILQTVKVVDELVKVMGRHKPENIVIEMARENQTTQKGQKNSRERMKRIEEGIKELGSQILKEHPVENTQLQNEKLYLYYLQNGRDMYVDQELDINRLSDYDVDHIVPQSFLKDDSIDNKVLTRSDKARGKSDNVPSEEVVKKMKNYWRQLLNAKLITQRKFDNLTKAERGGLSELDKAGFIKRQLVETRQITKHVAQILDSRMNTKYDENDKLIREVKVITLKSKLVSDFRKDFQFYKVREINNYHHAHDAYLNAVVGTALIKKYPKLESEFVYGDYKVYDVRKMIAKSEQEIGKATAKYFFYSNIMNFFKTEITLANGEIRKRPLIETNGETGEIVWDKGRDFATVRKVLSMPQVNIVKKTEVQTGGFSKESILPKRNSDKLIARKKDWDPKKYGGFDSPTVAYSVLVVAKVEKGKSKKLKSVKELLGITIMERSSFEKNPIDFLEAKGYKEVKKDLIIKLPKYSLFELENGRKRMLASAGELQKGNELALPSKYVNFLYLASHYEKLKGSPEDNEQKQLFVEQHKHYLDEIIEQISEFSKRVILADANLDKVLSAYNKHRDKPIREQAENIIHLFTLTNLGAPAAFKYFDTTIDRKRYTSTKEVLDATLIHQSITGLYETRIDLSQLGGDGGEAAAKEAAAKEAAAKEAAAKEAAAKEAAAKGGTAPLEEEYRLFLEAPIQNVTLLEQWKREIPKVWAEINPPGLASTQAPIHVQLLSTALPVRVRQYPITLEAKRSLRETIRKFRAAGILRPVHSPWNTPLLPVRKSGTSEYRMVQDLREVNKRVETIHPTVPNPYTLLSLLPPDRIWYSVLDLKDAFFCIPLAPESQLIFAFEWADAEEGESGQLTWTRLPQGFKNSPTLFNEALNRDLQGFRLDHPSVSLLQYVDDLLIAADTQAACLSATRDLLMTLAELGYRVSGKKAQLCQEEVTYLGFKIHKGSRSLSNSRTQAILQIPVPKTKRQVREFLGTIGYCRLWIPGFAELAQPLYAATRPGNDPLVWGEKEEEAFQSLKLALTQPPALALPSLDKPFQLFVEETSGAAKGVLTQALGPWKRPVAYLSKRLDPVAAGWPRCLRAIAAAALLTREASKLTFGQDIEITSSHNLESLLRSPPDKWLTNARITQYQVLLLDPPRVRFKQTAALNPATLLPETDDTLPIHHCLDTLDSLTSTRPDLTDQPLAQAEATLFTDGSSYIRDGKRYAGAAVVTLDSVIWAEPLPIGTSAQKAELIALTKALEWSKDKSVNIYTDSRYAFATLHVHGMIYRERGWLTAGGKAIKNAPEILALLTAVWLPKRVAVMHCKGHQKDDAPTSTGNRRADEVAREVAIRPLSTQATISAGKRTADGSEFEKRTADGSEFESPKKKAKVE

SEQ ID NO: 6442 - protein, 2121 aa, synthetic construct
MPAAKRVKLDGGDKKYSIGLDIGTNSVGWAVITDEYKVPSKKFKVLGNTDRHSIKKNLIGALLFDSGETAEATRLKRTARRRYTRRKNRICYLQEIFSNEMAKVDDSFFHRLEESFLVEEDKKHERHPIFGNIVDEVAYHEKYPTIYHLRKKLVDSTDKADLRLIYLALAHMIKFRGHFLIEGDLNPDNSDVDKLFIQLVQTYNQLFEENPINASGVDAKAILSARLSKSRRLENLIAQLPGEKKNGLFGNLIALSLGLTPNFKSNFDLAEDAKLQLSKDTYDDDLDNLLAQIGDQYADLFLAAKNLSDAILLSDILRVNTEITKAPLSASMIKRYDEHHQDLTLLKALVRQQLPEKYKEIFFDQSKNGYAGYIDGGASQEEFYKFIKPILEKMDGTEELLVKLNREDLLRKQRTFDNGSIPHQIHLGELHAILRRQEDFYPFLKDNREKIEKILTFRIPYYVGPLARGNSRFAWMTRKSEETITPWNFEEVVDKGASAQSFIERMTNFDKNLPNEKVLPKHSLLYEYFTVYNELTKVKYVTEGMRKPAFLSGEQKKAIVDLLFKTNRKVTVKQLKEDYFKKIECFDSVEISGVEDRFNASLGTYHDLLKIIKDKDFLDNEENEDILEDIVLTLTLFEDREMIEERLKTYAHLFDDKVMKQLKRRRYTGWGRLSRKLINGIRDKQSGKTILDFLKSDGFANRNFMQLIHDDSLTFKEDIQKAQVSGQGDSLHEHIANLAGSPAIKKGILQTVKVVDELVKVMGRHKPENIVIEMARENQTTQKGQKNSRERMKRIEEGIKELGSQILKEHPVENTQLQNEKLYLYYLQNGRDMYVDQELDINRLSDYDVDHIVPQSFLKDDSIDNKVLTRSDKARGKSDNVPSEEVVKKMKNYWRQLLNAKLITQRKFDNLTKAERGGLSELDKAGFIKRQLVETRQITKHVAQILDSRMNTKYDENDKLIREVKVITLKSKLVSDFRKDFQFYKVREINNYHHAHDAYLNAVVGTALIKKYPKLESEFVYGDYKVYDVRKMIAKSEQEIGKATAKYFFYSNIMNFFKTEITLANGEIRKRPLIETNGETGEIVWDKGRDFATVRKVLSMPQVNIVKKTEVQTGGFSKESILPKRNSDKLIARKKDWDPKKYGGFDSPTVAYSVLVVAKVEKGKSKKLKSVKELLGITIMERSSFEKNPIDFLEAKGYKEVKKDLIIKLPKYSLFELENGRKRMLASAGELQKGNELALPSKYVNFLYLASHYEKLKGSPEDNEQKQLFVEQHKHYLDEIIEQISEFSKRVILADANLDKVLSAYNKHRDKPIREQAENIIHLFTLTNLGAPAAFKYFDTTIDRKRYTSTKEVLDATLIHQSITGLYETRIDLSQLGGDGGEAAAKEAAAKEAAAKEAAAKEAAAKEAAAKGGTVSLQDEHRLFDIPVTTSLPDVWLQDFPQAWAETGGLGRAKCQAPIIIDLKPTAVPVSIKQYPMSLEAHMGIRQHIIKFLELGVLRPCRSPWNTPLLPVKKPGTQDYRPVQDLREINKRTVDIHPTVPNPYNLLSTLKPDYSWYTVLDLKDAFFCLPLAPQSQELFAFEWKDPERGISGQLTWTRLPQGFKNSPTLFDEALHRDLTDFRTQHPEVTLLQYVDDLLLAAPTKKACTQGTRHLLQELGEKGYRASAKKAQICQTKVTYLGYILSEGKRWLTPGRIETVARIPPPRNPREVREFLGTAGFCRLWIPGFAELAAPLYALTKESTPFTWQTEHQLAFEALKKALLSAPALGLPDTSKPFTLFLDERQGIAKGVLTQKLGPWKRPVAYLSKKLDPVAAGWPPCLRIMAATAMLVKDSAKLTLGQPLTVITPHTLEAIVRQPPDRWITNARLTHYQALLLDTDRVQFGPPVTLNPATLLPVPENQPSPHDCRQVLAETHGTREDLKDQELPDADHTWYTDGSSYLDSGTRRAGAAVVDGHNTIWAQSLPPGTSAQKAELIALTKALELSKGKKANIYTDSRYAFATAHTHGSIYERRGLLTSEGKEIKNKAEIIALLKALFLPQEVAIIHCPGHQKGQDPVAVGNRQADRVARQAAMAEVLTLATEPDNTSHITAGKRTADGSEFEKRTADGSEFESPKKKAKVE

SEQ ID NO: 6443 - protein, 2192 aa, synthetic construct
MPAAKRVKLDGGDKKYSIGLDIGTNSVGWAVITDEYKVPSKKFKVLGNTDRHSIKKNLIGALLFDSGETAEATRLKRTARRRYTRRKNRICYLQEIFSNEMAKVDDSFFHRLEESFLVEEDKKHERHPIFGNIVDEVAYHEKYPTIYHLRKKLVDSTDKADLRLIYLALAHMIKFRGHFLIEGDLNPDNSDVDKLFIQLVQTYNQLFEENPINASGVDAKAILSARLSKSRRLENLIAQLPGEKKNGLFGNLIALSLGLTPNFKSNFDLAEDAKLQLSKDTYDDDLDNLLAQIGDQYADLFLAAKNLSDAILLSDILRVNTEITKAPLSASMIKRYDEHHQDLTLLKALVRQQLPEKYKEIFFDQSKNGYAGYIDGGASQEEFYKFIKPILEKMDGTEELLVKLNREDLLRKQRTFDNGSIPHQIHLGELHAILRRQEDFYPFLKDNREKIEKILTFRIPYYVGPLARGNSRFAWMTRKSEETITPWNFEEVVDKGASAQSFIERMTNFDKNLPNEKVLPKHSLLYEYFTVYNELTKVKYVTEGMRKPAFLSGEQKKAIVDLLFKTNRKVTVKQLKEDYFKKIECFDSVEISGVEDRFNASLGTYHDLLKIIKDKDFLDNEENEDILEDIVLTLTLFEDREMIEERLKTYAHLFDDKVMKQLKRRRYTGWGRLSRKLINGIRDKQSGKTILDFLKSDGFANRNFMQLIHDDSLTFKEDIQKAQVSGQGDSLHEHIANLAGSPAIKKGILQTVKVVDELVKVMGRHKPENIVIEMARENQTTQKGQKNSRERMKRIEEGIKELGSQILKEHPVENTQLQNEKLYLYYLQNGRDMYVDQELDINRLSDYDVDHIVPQSFLKDDSIDNKVLTRSDKARGKSDNVPSEEVVKKMKNYWRQLLNAKLITQRKFDNLTKAERGGLSELDKAGFIKRQLVETRQITKHVAQILDSRMNTKYDENDKLIREVKVITLKSKLVSDFRKDFQFYKVREINNYHHAHDAYLNAVVGTALIKKYPKLESEFVYGDYKVYDVRKMIAKSEQEIGKATAKYFFYSNIMNFFKTEITLANGEIRKRPLIETNGETGEIVWDKGRDFATVRKVLSMPQVNIVKKTEVQTGGFSKESILPKRNSDKLIARKKDWDPKKYGGFDSPTVAYSVLVVAKVEKGKSKKLKSVKELLGITIMERSSFEKNPIDFLEAKGYKEVKKDLIIKLPKYSLFELENGRKRMLASAGELQKGNELALPSKYVNFLYLASHYEKLKGSPEDNEQKQLFVEQHKHYLDEIIEQISEFSKRVILADANLDKVLSAYNKHRDKPIREQAENIIHLFTLTNLGAPAAFKYFDTTIDRKRYTSTKEVLDATLIHQSITGLYETRIDLSQLGGDGGEAAAKEAAAKEAAAKEAAAKEAAAKEAAAKGGMDLLKPLTVERKGVKIKGYWNSQADITCVPKDLLQGEEPVRQQNVTTIHGTQEGDVYYVNLKIDGRRINTEVIGTTLDYAIITPGDVPWILKKPLELTIKLDLEEQQGTLLNNSILSKKGKEELKQLFEKYSALWQSWENQVGHRRIRPHKIATGTVKPTPQKQYHINPKAKPDIQIVINDLLKQGVLIQKESTMNTPVYPVPKPNGRWRMVLDYRAVNKVTPLIAVQNQHSYGILGSLFKGRYKTTIDLSNGFWAHPIVPEDYWITAFTWQGKQYCWTVLPQGFLNSPGLFTGDVVDLLQGIPNVEVYVDDVYISHDSEKEHLEYLDILFNRLKEAGYIISLKKSNIANSIVDFLGFQITNEGRGLTDTFKEKLENITAPTTLKQLQSILGLLNFARNFIPDFTELIAPLYALIPKSTKNYVPWQIEHSTTLETLITKLNGAEYLQGRKGDKTLIMKVNASYTTGYIRYYNEGEKKPISYVSIVFSKTELKFTELEKLLTTVHKGLLKALDLSMGQNIHVYSPIVSMQNIQKTPQTAKKALASRWLSWLSYLEDPRIRFFYDPQMPALKDLPAVDTGKDNKKHPSNFQHIFYTDGSAITSPTKEGHLNAGMGIVYFINKDGNLQKQQEWSISLGNHTAQFAEIAAFEFALKKCLPLGGNILVVTDSNYVAKAYNEELDVWASNGFVNNRKKPLKHISKWKSVADLKRLRPDVVVTHEPGHQKLDSSPHAYGNNLADQLATQASFKVHAGKRTADGSEFEKRTADGSEFESPKKKAKVE

SEQ ID NO: 6444 - protein, 2106 aa, synthetic construct
MPAAKRVKLDGGDKKYSIGLDIGTNSVGWAVITDEYKVPSKKFKVLGNTDRHSIKKNLIGALLFDSGETAEATRLKRTARRRYTRRKNRICYLQEIFSNEMAKVDDSFFHRLEESFLVEEDKKHERHPIFGNIVDEVAYHEKYPTIYHLRKKLVDSTDKADLRLIYLALAHMIKFRGHFLIEGDLNPDNSDVDKLFIQLVQTYNQLFEENPINASGVDAKAILSARLSKSRRLENLIAQLPGEKKNGLFGNLIALSLGLTPNFKSNFDLAEDAKLQLSKDTYDDDLDNLLAQIGDQYADLFLAAKNLSDAILLSDILRVNTEITKAPLSASMIKRYDEHHQDLTLLKALVRQQLPEKYKEIFFDQSKNGYAGYIDGGASQEEFYKFIKPILEKMDGTEELLVKLNREDLLRKQRTFDNGSIPHQIHLGELHAILRRQEDFYPFLKDNREKIEKILTFRIPYYVGPLARGNSRFAWMTRKSEETITPWNFEEVVDKGASAQSFIERMTNFDKNLPNEKVLPKHSLLYEYFTVYNELTKVKYVTEGMRKPAFLSGEQKKAIVDLLFKTNRKVTVKQLKEDYFKKIECFDSVEISGVEDRFNASLGTYHDLLKIIKDKDFLDNEENEDILEDIVLTLTLFEDREMIEERLKTYAHLFDDKVMKQLKRRRYTGWGRLSRKLINGIRDKQSGKTILDFLKSDGFANRNFMQLIHDDSLTFKEDIQKAQVSGQGDSLHEHIANLAGSPAIKKGILQTVKVVDELVKVMGRHKPENIVIEMARENQTTQKGQKNSRERMKRIEEGIKELGSQILKEHPVENTQLQNEKLYLYYLQNGRDMYVDQELDINRLSDYDVDHIVPQSFLKDDSIDNKVLTRSDKARGKSDNVPSEEVVKKMKNYWRQLLNAKLITQRKFDNLTKAERGGLSELDKAGFIKRQLVETRQITKHVAQILDSRMNTKYDENDKLIREVKVITLKSKLVSDFRKDFQFYKVREINNYHHAHDAYLNAVVGTALIKKYPKLESEFVYGDYKVYDVRKMIAKSEQEIGKATAKYFFYSNIMNFFKTEITLANGEIRKRPLIETNGETGEIVWDKGRDFATVRKVLSMPQVNIVKKTEVQTGGFSKESILPKRNSDKLIARKKDWDPKKYGGFDSPTVAYSVLVVAKVEKGKSKKLKSVKELLGITIMERSSFEKNPIDFLEAKGYKEVKKDLIIKLPKYSLFELENGRKRMLASAGELQKGNELALPSKYVNFLYLASHYEKLKGSPEDNEQKQLFVEQHKHYLDEIIEQISEFSKRVILADANLDKVLSAYNKHRDKPIREQAENIIHLFTLTNLGAPAAFKYFDTTIDRKRYTSTKEVLDATLIHQSITGLYETRIDLSQLGGDGGEAAAKEAAAKEAAAKEAAAKEAAAKEAAAKGGVPWILKKPLELTIKLDLEEQQGTLLNNSILSKKGKEELKQLFEKYSALWQSWENQVGHRRIRPHKIATGTVKPTPQKQYHINPKAKPDIQIVINDLLKQGVLIQKESTMNTPVYPVPKPNGRWRMVLDYRAVNKVTPLIAVQNQHSYGILGSLFKGRYKTTIDLSNGFWAHPIVPEDYWITAFTWQGKQYCWTVLPQGFLNSPGLFTGDVVDLLQGIPNVEVYVDDVYISHDSEKEHLEYLDILFNRLKEAGYIISLKKSNIANSIVDFLGFQITNEGRGLTDTFKEKLENITAPTTLKQLQSILGLLNFARNFIPDFTELIAPLYALIPKSTKNYVPWQIEHSTTLETLITKLNGAEYLQGRKGDKTLIMKVNASYTTGYIRYYNEGEKKPISYVSIVFSKTELKFTELEKLLTTVHKGLLKALDLSMGQNIHVYSPIVSMQNIQKTPQTAKKALASRWLSWLSYLEDPRIRFFYDPQMPALKDLPAVDTGKDNKKHPSNFQHIFYTDGSAITSPTKEGHLNAGMGIVYFINKDGNLQKQQEWSISLGNHTAQFAEIAAFEFALKKCLPLGGNILVVTDSNYVAKAYNEELDVWASNGFVNNRKKPLKHISKWKSVADLKRLRPDVVVTHEPGHQKLDSSPHAYGNNLADQLATQASFKVHAGKRTADGSEFEKRTADGSEFESPKKKAKVE

SEQ ID NO: 6445 - protein, 2192 aa, synthetic construct
MPAAKRVKLDGGDKKYSIGLDIGTNSVGWAVITDEYKVPSKKFKVLGNTDRHSIKKNLIGALLFDSGETAEATRLKRTARRRYTRRKNRICYLQEIFSNEMAKVDDSFFHRLEESFLVEEDKKHERHPIFGNIVDEVAYHEKYPTIYHLRKKLVDSTDKADLRLIYLALAHMIKFRGHFLIEGDLNPDNSDVDKLFIQLVQTYNQLFEENPINASGVDAKAILSARLSKSRRLENLIAQLPGEKKNGLFGNLIALSLGLTPNFKSNFDLAEDAKLQLSKDTYDDDLDNLLAQIGDQYADLFLAAKNLSDAILLSDILRVNTEITKAPLSASMIKRYDEHHQDLTLLKALVRQQLPEKYKEIFFDQSKNGYAGYIDGGASQEEFYKFIKPILEKMDGTEELLVKLNREDLLRKQRTFDNGSIPHQIHLGELHAILRRQEDFYPFLKDNREKIEKILTFRIPYYVGPLARGNSRFAWMTRKSEETITPWNFEEVVDKGASAQSFIERMTNFDKNLPNEKVLPKHSLLYEYFTVYNELTKVKYVTEGMRKPAFLSGEQKKAIVDLLFKTNRKVTVKQLKEDYFKKIECFDSVEISGVEDRFNASLGTYHDLLKIIKDKDFLDNEENEDILEDIVLTLTLFEDREMIEERLKTYAHLFDDKVMKQLKRRRYTGWGRLSRKLINGIRDKQSGKTILDFLKSDGFANRNFMQLIHDDSLTFKEDIQKAQVSGQGDSLHEHIANLAGSPAIKKGILQTVKVVDELVKVMGRHKPENIVIEMARENQTTQKGQKNSRERMKRIEEGIKELGSQILKEHPVENTQLQNEKLYLYYLQNGRDMYVDQELDINRLSDYDVDHIVPQSFLKDDSIDNKVLTRSDKARGKSDNVPSEEVVKKMKNYWRQLLNAKLITQRKFDNLTKAERGGLSELDKAGFIKRQLVETRQITKHVAQILDSRMNTKYDENDKLIREVKVITLKSKLVSDFRKDFQFYKVREINNYHHAHDAYLNAVVGTALIKKYPKLESEFVYGDYKVYDVRKMIAKSEQEIGKATAKYFFYSNIMNFFKTEITLANGEIRKRPLIETNGETGEIVWDKGRDFATVRKVLSMPQVNIVKKTEVQTGGFSKESILPKRNSDKLIARKKDWDPKKYGGFDSPTVAYSVLVVAKVEKGKSKKLKSVKELLGITIMERSSFEKNPIDFLEAKGYKEVKKDLIIKLPKYSLFELENGRKRMLASAGELQKGNELALPSKYVNFLYLASHYEKLKGSPEDNEQKQLFVEQHKHYLDEIIEQISEFSKRVILADANLDKVLSAYNKHRDKPIREQAENIIHLFTLTNLGAPAAFKYFDTTIDRKRYTSTKEVLDATLIHQSITGLYETRIDLSQLGGDGGEAAAKEAAAKEAAAKEAAAKEAAAKEAAAKGGMDLLKPLTVERKGVKIKGYWNSQADITCVPKDLLQGEEPVRQQNVTTIHGTQEGDVYYVNLKIDGRRINTEVIGTTLDYAIITPGDVPWILKKPLELTIKLDLEEQQGTLLNNSILSKKGKEELKQLFEKYSALWQSWENQVGHRRIRPHKIATGTVKPTPQKQYHINPKAKPDIQIVINDLLKQGVLIQKESTMNTPVYPVPKPNGRWRMVLDYRAVNKVTPLIAVQNQHSYGILGSLFKGRYKTTIDLSNGFWAHPIVPEDYWITAFTWQGKQYCWTVLPQGFLNSPGLFNGDVVDLLQGIPNVEVYVDDVYISHDSEKEHLEYLDILFNRLKEAGYIISLKKSNIANSIVDFLGFQITNEGRGLTDTFKEKLENITAPTTLKQLQSILGLLNFARNFIPDFTELIAPLYALIPKSPKNYVPWQIEHSTTLETLITKLNGAEYLQGRKGDKTLIMKVNASYTTGYIRYYNEGEKKPISYVSIVFSKTELKFTELEKLLTTVHKGLLKALDLSMGQNIHVYSPIVSMQNIQKTPQTAKKALASRWLSWLSYLEDPRIRFFYDPQMPALKDLPAVDTGKDNKKHPSNFQHIFYTDGSAITSPTKEGHLNAGMGIVYFINKDGNLQKQQEWSISLGNHTAQFAEIAAFEFALKKCLPLGGNILVVTDSNYVAKAYNEELDVWASNGFVNNRKKPLKHISKWKSVADLKRLRPDVVVTHEPGHQKLDSSPHAYGNNLADQLATQASFKVHAGKRTADGSEFEKRTADGSEFESPKKKAKVE

SEQ ID NO: 6446 - protein, 2192 aa, synthetic construct
MPAAKRVKLDGGDKKYSIGLDIGTNSVGWAVITDEYKVPSKKFKVLGNTDRHSIKKNLIGALLFDSGETAEATRLKRTARRRYTRRKNRICYLQEIFSNEMAKVDDSFFHRLEESFLVEEDKKHERHPIFGNIVDEVAYHEKYPTIYHLRKKLVDSTDKADLRLIYLALAHMIKFRGHFLIEGDLNPDNSDVDKLFIQLVQTYNQLFEENPINASGVDAKAILSARLSKSRRLENLIAQLPGEKKNGLFGNLIALSLGLTPNFKSNFDLAEDAKLQLSKDTYDDDLDNLLAQIGDQYADLFLAAKNLSDAILLSDILRVNTEITKAPLSASMIKRYDEHHQDLTLLKALVRQQLPEKYKEIFFDQSKNGYAGYIDGGASQEEFYKFIKPILEKMDGTEELLVKLNREDLLRKQRTFDNGSIPHQIHLGELHAILRRQEDFYPFLKDNREKIEKILTFRIPYYVGPLARGNSRFAWMTRKSEETITPWNFEEVVDKGASAQSFIERMTNFDKNLPNEKVLPKHSLLYEYFTVYNELTKVKYVTEGMRKPAFLSGEQKKAIVDLLFKTNRKVTVKQLKEDYFKKIECFDSVEISGVEDRFNASLGTYHDLLKIIKDKDFLDNEENEDILEDIVLTLTLFEDREMIEERLKTYAHLFDDKVMKQLKRRRYTGWGRLSRKLINGIRDKQSGKTILDFLKSDGFANRNFMQLIHDDSLTFKEDIQKAQVSGQGDSLHEHIANLAGSPAIKKGILQTVKVVDELVKVMGRHKPENIVIEMARENQTTQKGQKNSRERMKRIEEGIKELGSQILKEHPVENTQLQNEKLYLYYLQNGRDMYVDQELDINRLSDYDVDHIVPQSFLKDDSIDNKVLTRSDKARGKSDNVPSEEVVKKMKNYWRQLLNAKLITQRKFDNLTKAERGGLSELDKAGFIKRQLVETRQITKHVAQILDSRMNTKYDENDKLIREVKVITLKSKLVSDFRKDFQFYKVREINNYHHAHDAYLNAVVGTALIKKYPKLESEFVYGDYKVYDVRKMIAKSEQEIGKATAKYFFYSNIMNFFKTEITLANGEIRKRPLIETNGETGEIVWDKGRDFATVRKVLSMPQVNIVKKTEVQTGGFSKESILPKRNSDKLIARKKDWDPKKYGGFDSPTVAYSVLVVAKVEKGKSKKLKSVKELLGITIMERSSFEKNPIDFLEAKGYKEVKKDLIIKLPKYSLFELENGRKRMLASAGELQKGNELALPSKYVNFLYLASHYEKLKGSPEDNEQKQLFVEQHKHYLDEIIEQISEFSKRVILADANLDKVLSAYNKHRDKPIREQAENIIHLFTLTNLGAPAAFKYFDTTIDRKRYTSTKEVLDATLIHQSITGLYETRIDLSQLGGDGGEAAAKEAAAKEAAAKEAAAKEAAAKEAAAKGGMDLLKPLTVERKGVKIKGYWNSQADITCVPKDLLQGEEPVRQQNVTTIHGTQEGDVYYVNLKIDGRRINTEVIGTTLDYAIITPGDVPWILKKPLELTIKLDLEEQQGTLLNNSILSKKGKEELKQLFEKYSALWQSWENQVGHRRIRPHKIATGTVKPTPQKQYHINPKAKPDIQIVINDLLKQGVLIQKESTMNTPVYPVPKPNGRWRMVLDYRAVNKVTPLIAVQNQHSYGILGSLFKGRYKTTIDLSNGFWAHPIVPEDYWITAFTWQGKQYCWTVLPQGFLNSPGLFNGDVVDLLQGIPNVEVYVDDVYISHDSEKEHLEYLDILFNRLKEAGYIISLKKSNIANSIVDFLGFQITNEGRGLTDTFKEKLENITAPTTLKQLQSILGKLNFARNFIPDFTELIAPLYALIPKSPKNYVPWQIEHSTTLETLITKLNGAEYLQGRKGDKTLIMKVNASYTTGYIRYYNEGEKKPISYVSIVFSKTELKFTELEKLLTTVHKGLLKALDLSMGQNIHVYSPIVSMQNIQKTPQTAKKALASRWLSWLSYLEDPRIRFFYDPQMPALKDLPAVDTGKDNKKHPSNFQHIFYTDGSAITSPTKEGHLNAGMGIVYFINKDGNLQKQQEWSISLGNHTAQFAEIAAFEFALKKCLPLGGNILVVTDSNYVAKAYNEELDVWASNGFVNNRKKPLKHISKWKSVADLKRLRPDVVVTHEPGHQKLDSSPHAYGNNLADQLATQASFKVHAGKRTADGSEFEKRTADGSEFESPKKKAKVE

SEQ ID NO: 6447 - protein, 2195 aa, synthetic construct
MPAAKRVKLDGGDKKYSIGLDIGTNSVGWAVITDEYKVPSKKFKVLGNTDRHSIKKNLIGALLFDSGETAEATRLKRTARRRYTRRKNRICYLQEIFSNEMAKVDDSFFHRLEESFLVEEDKKHERHPIFGNIVDEVAYHEKYPTIYHLRKKLVDSTDKADLRLIYLALAHMIKFRGHFLIEGDLNPDNSDVDKLFIQLVQTYNQLFEENPINASGVDAKAILSARLSKSRRLENLIAQLPGEKKNGLFGNLIALSLGLTPNFKSNFDLAEDAKLQLSKDTYDDDLDNLLAQIGDQYADLFLAAKNLSDAILLSDILRVNTEITKAPLSASMIKRYDEHHQDLTLLKALVRQQLPEKYKEIFFDQSKNGYAGYIDGGASQEEFYKFIKPILEKMDGTEELLVKLNREDLLRKQRTFDNGSIPHQIHLGELHAILRRQEDFYPFLKDNREKIEKILTFRIPYYVGPLARGNSRFAWMTRKSEETITPWNFEEVVDKGASAQSFIERMTNFDKNLPNEKVLPKHSLLYEYFTVYNELTKVKYVTEGMRKPAFLSGEQKKAIVDLLFKTNRKVTVKQLKEDYFKKIECFDSVEISGVEDRFNASLGTYHDLLKIIKDKDFLDNEENEDILEDIVLTLTLFEDREMIEERLKTYAHLFDDKVMKQLKRRRYTGWGRLSRKLINGIRDKQSGKTILDFLKSDGFANRNFMQLIHDDSLTFKEDIQKAQVSGQGDSLHEHIANLAGSPAIKKGILQTVKVVDELVKVMGRHKPENIVIEMARENQTTQKGQKNSRERMKRIEEGIKELGSQILKEHPVENTQLQNEKLYLYYLQNGRDMYVDQELDINRLSDYDVDHIVPQSFLKDDSIDNKVLTRSDKARGKSDNVPSEEVVKKMKNYWRQLLNAKLITQRKFDNLTKAERGGLSELDKAGFIKRQLVETRQITKHVAQILDSRMNTKYDENDKLIREVKVITLKSKLVSDFRKDFQFYKVREINNYHHAHDAYLNAVVGTALIKKYPKLESEFVYGDYKVYDVRKMIAKSEQEIGKATAKYFFYSNIMNFFKTEITLANGEIRKRPLIETNGETGEIVWDKGRDFATVRKVLSMPQVNIVKKTEVQTGGFSKESILPKRNSDKLIARKKDWDPKKYGGFDSPTVAYSVLVVAKVEKGKSKKLKSVKELLGITIMERSSFEKNPIDFLEAKGYKEVKKDLIIKLPKYSLFELENGRKRMLASAGELQKGNELALPSKYVNFLYLASHYEKLKGSPEDNEQKQLFVEQHKHYLDEIIEQISEFSKRVILADANLDKVLSAYNKHRDKPIREQAENIIHLFTLTNLGAPAAFKYFDTTIDRKRYTSTKEVLDATLIHQSITGLYETRIDLSQLGGDGGEAAAKEAAAKEAAAKEAAAKEAAAKEAAAKGGMNPLQLLQPLPAEIKGTKLLAHWNSGATITCIPESFLEDEQPIKKTLIKTIHGEKQQNVYYVTFKVKGRKVEAEVIASPYEYILLSPTDVPWLTQQPLQLTILVPLQEYQEKILSKTALPEDQKQQLKTLFVKYDNLWQHWENQVGHRKIRPHNIATGDYPPRPQKQYPINPKAKPSIQIVIDDLLKQGVLTPQNSTMNTPVYPVPKPDGRWRMVLDYREVNKTIPLTAAQNQHSAGILATIVRQKYKTTLDLANGFWAHPITPESYWLTAFTWQGKQYCWTRLPQGFLNSPALFTADVVDLLKEIPNVQVYVDDIYLSHDDPKEHVQQLEKVFQILLQAGYVVSLKKSEIGQKTVEFLGFNITKEGRGLTDTFKTKLLNITPPKDLKQLQSILGLLNFARNFIPNFAELVQPLYNLIASAKGKYIEWSEENTKQLNMVIEALNTASNLEERLPEQRLVIKVNTSPSAGYVRYYNETGKKPIMYLNYVFSKAELKFSMLEKLLTTMHKALIKAMDLAMGQEILVYSPIVSMTKIQKTPLPERKALPIRWITWMTYLEDPRIQFHYDKTLPELKHIPDVYTSSQSPVKHPSQYEGVFYTDGSAIKSPDPTKSNNAGMGIVHATYKPEYQVLNQWSIPLGNHTAQMAEIAAVEFACKKALKIPGPVLVITDSFYVAESANKELPYWKSNGFVNNKKKPLKHISKWKSIAECLSMKPDITIQHEKGISLQIPVFILKGNALADKLATQGSYVVNAGKRTADGSEFEKRTADGSEFESPKKKAKVE

SEQ ID NO: 6448 - protein, 2106 aa, synthetic construct
MPAAKRVKLDGGDKKYSIGLDIGTNSVGWAVITDEYKVPSKKFKVLGNTDRHSIKKNLIGALLFDSGETAEATRLKRTARRRYTRRKNRICYLQEIFSNEMAKVDDSFFHRLEESFLVEEDKKHERHPIFGNIVDEVAYHEKYPTIYHLRKKLVDSTDKADLRLIYLALAHMIKFRGHFLIEGDLNPDNSDVDKLFIQLVQTYNQLFEENPINASGVDAKAILSARLSKSRRLENLIAQLPGEKKNGLFGNLIALSLGLTPNFKSNFDLAEDAKLQLSKDTYDDDLDNLLAQIGDQYADLFLAAKNLSDAILLSDILRVNTEITKAPLSASMIKRYDEHHQDLTLLKALVRQQLPEKYKEIFFDQSKNGYAGYIDGGASQEEFYKFIKPILEKMDGTEELLVKLNREDLLRKQRTFDNGSIPHQIHLGELHAILRRQEDFYPFLKDNREKIEKILTFRIPYYVGPLARGNSRFAWMTRKSEETITPWNFEEVVDKGASAQSFIERMTNFDKNLPNEKVLPKHSLLYEYFTVYNELTKVKYVTEGMRKPAFLSGEQKKAIVDLLFKTNRKVTVKQLKEDYFKKIECFDSVEISGVEDRFNASLGTYHDLLKIIKDKDFLDNEENEDILEDIVLTLTLFEDREMIEERLKTYAHLFDDKVMKQLKRRRYTGWGRLSRKLINGIRDKQSGKTILDFLKSDGFANRNFMQLIHDDSLTFKEDIQKAQVSGQGDSLHEHIANLAGSPAIKKGILQTVKVVDELVKVMGRHKPENIVIEMARENQTTQKGQKNSRERMKRIEEGIKELGSQILKEHPVENTQLQNEKLYLYYLQNGRDMYVDQELDINRLSDYDVDHIVPQSFLKDDSIDNKVLTRSDKARGKSDNVPSEEVVKKMKNYWRQLLNAKLITQRKFDNLTKAERGGLSELDKAGFIKRQLVETRQITKHVAQILDSRMNTKYDENDKLIREVKVITLKSKLVSDFRKDFQFYKVREINNYHHAHDAYLNAVVGTALIKKYPKLESEFVYGDYKVYDVRKMIAKSEQEIGKATAKYFFYSNIMNFFKTEITLANGEIRKRPLIETNGETGEIVWDKGRDFATVRKVLSMPQVNIVKKTEVQTGGFSKESILPKRNSDKLIARKKDWDPKKYGGFDSPTVAYSVLVVAKVEKGKSKKLKSVKELLGITIMERSSFEKNPIDFLEAKGYKEVKKDLIIKLPKYSLFELENGRKRMLASAGELQKGNELALPSKYVNFLYLASHYEKLKGSPEDNEQKQLFVEQHKHYLDEIIEQISEFSKRVILADANLDKVLSAYNKHRDKPIREQAENIIHLFTLTNLGAPAAFKYFDTTIDRKRYTSTKEVLDATLIHQSITGLYETRIDLSQLGGDGGEAAAKEAAAKEAAAKEAAAKEAAAKEAAAKGGVPWLTQQPLQLTILVPLQEYQEKILSKTALPEDQKQQLKTLFVKYDNLWQHWENQVGHRKIRPHNIATGDYPPRPQKQYPINPKAKPSIQIVIDDLLKQGVLTPQNSTMNTPVYPVPKPDGRWRMVLDYREVNKTIPLTAAQNQHSAGILATIVRQKYKTTLDLANGFWAHPITPESYWLTAFTWQGKQYCWTRLPQGFLNSPALFNADVVDLLKEIPNVQVYVDDIYLSHDDPKEHVQQLEKVFQILLQAGYVVSLKKSEIGQKTVEFLGFNITKEGRGLTDTFKTKLLNITPPKDLKQLQSILGKLNFARNFIPNFAELVQPLYNLIAPAKGKYIEWSEENTKQLNMVIEALNTASNLEERLPEQRLVIKVNTSPSAGYVRYYNETGKKPIMYLNYVFSKAELKFSMLEKLLTTMHKALIKAMDLAMGQEILVYSPIVSMTKIQKTPLPERKALPIRWITWMTYLEDPRIQFHYDKTLPELKHIPDVYTSSQSPVKHPSQYEGVFYTDGSAIKSPDPTKSNNAGMGIVHATYKPEYQVLNQWSIPLGNHTAQMAEIAAVEFACKKALKIPGPVLVITDSFYVAESANKELPYWKSNGFVNNKKKPLKHISKWKSIAECLSMKPDITIQHEKGISLQIPVFILKGNALADKLATQGSYVVNAGKRTADGSEFEKRTADGSEFESPKKKAKVE

SEQ ID NO: 6449 - protein, 2195 aa, synthetic construct
MPAAKRVKLDGGDKKYSIGLDIGTNSVGWAVITDEYKVPSKKFKVLGNTDRHSIKKNLIGALLFDSGETAEATRLKRTARRRYTRRKNRICYLQEIFSNEMAKVDDSFFHRLEESFLVEEDKKHERHPIFGNIVDEVAYHEKYPTIYHLRKKLVDSTDKADLRLIYLALAHMIKFRGHFLIEGDLNPDNSDVDKLFIQLVQTYNQLFEENPINASGVDAKAILSARLSKSRRLENLIAQLPGEKKNGLFGNLIALSLGLTPNFKSNFDLAEDAKLQLSKDTYDDDLDNLLAQIGDQYADLFLAAKNLSDAILLSDILRVNTEITKAPLSASMIKRYDEHHQDLTLLKALVRQQLPEKYKEIFFDQSKNGYAGYIDGGASQEEFYKFIKPILEKMDGTEELLVKLNREDLLRKQRTFDNGSIPHQIHLGELHAILRRQEDFYPFLKDNREKIEKILTFRIPYYVGPLARGNSRFAWMTRKSEETITPWNFEEVVDKGASAQSFIERMTNFDKNLPNEKVLPKHSLLYEYFTVYNELTKVKYVTEGMRKPAFLSGEQKKAIVDLLFKTNRKVTVKQLKEDYFKKIECFDSVEISGVEDRFNASLGTYHDLLKIIKDKDFLDNEENEDILEDIVLTLTLFEDREMIEERLKTYAHLFDDKVMKQLKRRRYTGWGRLSRKLINGIRDKQSGKTILDFLKSDGFANRNFMQLIHDDSLTFKEDIQKAQVSGQGDSLHEHIANLAGSPAIKKGILQTVKVVDELVKVMGRHKPENIVIEMARENQTTQKGQKNSRERMKRIEEGIKELGSQILKEHPVENTQLQNEKLYLYYLQNGRDMYVDQELDINRLSDYDVDHIVPQSFLKDDSIDNKVLTRSDKARGKSDNVPSEEVVKKMKNYWRQLLNAKLITQRKFDNLTKAERGGLSELDKAGFIKRQLVETRQITKHVAQILDSRMNTKYDENDKLIREVKVITLKSKLVSDFRKDFQFYKVREINNYHHAHDAYLNAVVGTALIKKYPKLESEFVYGDYKVYDVRKMIAKSEQEIGKATAKYFFYSNIMNFFKTEITLANGEIRKRPLIETNGETGEIVWDKGRDFATVRKVLSMPQVNIVKKTEVQTGGFSKESILPKRNSDKLIARKKDWDPKKYGGFDSPTVAYSVLVVAKVEKGKSKKLKSVKELLGITIMERSSFEKNPIDFLEAKGYKEVKKDLIIKLPKYSLFELENGRKRMLASAGELQKGNELALPSKYVNFLYLASHYEKLKGSPEDNEQKQLFVEQHKHYLDEIIEQISEFSKRVILADANLDKVLSAYNKHRDKPIREQAENIIHLFTLTNLGAPAAFKYFDTTIDRKRYTSTKEVLDATLIHQSITGLYETRIDLSQLGGDGGEAAAKEAAAKEAAAKEAAAKEAAAKEAAAKGGMNPLQLLQPLPAEIKGTKLLAHWNSGATITCIPESFLEDEQPIKKTLIKTIHGEKQQNVYYVTFKVKGRKVEAEVIASPYEYILLSPTDVPWLTQQPLQLTILVPLQEYQEKILSKTALPEDQKQQLKTLFVKYDNLWQHWENQVGHRKIRPHNIATGDYPPRPQKQYPINPKAKPSIQIVIDDLLKQGVLTPQNSTMNTPVYPVPKPDGRWRMVLDYREVNKTIPLTAAQNQHSAGILATIVRQKYKTTLDLANGFWAHPITPESYWLTAFTWQGKQYCWTRLPQGFLNSPALFNADVVDLLKEIPNVQVYVDDIYLSHDDPKEHVQQLEKVFQILLQAGYVVSLKKSEIGQKTVEFLGFNITKEGRGLTDTFKTKLLNITPPKDLKQLQSILGLLNFARNFIPNFAELVQPLYNLIAPAKGKYIEWSEENTKQLNMVIEALNTASNLEERLPEQRLVIKVNTSPSAGYVRYYNETGKKPIMYLNYVFSKAELKFSMLEKLLTTMHKALIKAMDLAMGQEILVYSPIVSMTKIQKTPLPERKALPIRWITWMTYLEDPRIQFHYDKTLPELKHIPDVYTSSQSPVKHPSQYEGVFYTDGSAIKSPDPTKSNNAGMGIVHATYKPEYQVLNQWSIPLGNHTAQMAEIAAVEFACKKALKIPGPVLVITDSFYVAESANKELPYWKSNGFVNNKKKPLKHISKWKSIAECLSMKPDITIQHEKGISLQIPVFILKGNALADKLATQGSYVVNAGKRTADGSEFEKRTADGSEFESPKKKAKVE

SEQ ID NO: 6450 - protein, 2113 aa, synthetic construct
MPAAKRVKLDGGDKKYSIGLDIGTNSVGWAVITDEYKVPSKKFKVLGNTDRHSIKKNLIGALLFDSGETAEATRLKRTARRRYTRRKNRICYLQEIFSNEMAKVDDSFFHRLEESFLVEEDKKHERHPIFGNIVDEVAYHEKYPTIYHLRKKLVDSTDKADLRLIYLALAHMIKFRGHFLIEGDLNPDNSDVDKLFIQLVQTYNQLFEENPINASGVDAKAILSARLSKSRRLENLIAQLPGEKKNGLFGNLIALSLGLTPNFKSNFDLAEDAKLQLSKDTYDDDLDNLLAQIGDQYADLFLAAKNLSDAILLSDILRVNTEITKAPLSASMIKRYDEHHQDLTLLKALVRQQLPEKYKEIFFDQSKNGYAGYIDGGASQEEFYKFIKPILEKMDGTEELLVKLNREDLLRKQRTFDNGSIPHQIHLGELHAILRRQEDFYPFLKDNREKIEKILTFRIPYYVGPLARGNSRFAWMTRKSEETITPWNFEEVVDKGASAQSFIERMTNFDKNLPNEKVLPKHSLLYEYFTVYNELTKVKYVTEGMRKPAFLSGEQKKAIVDLLFKTNRKVTVKQLKEDYFKKIECFDSVEISGVEDRFNASLGTYHDLLKIIKDKDFLDNEENEDILEDIVLTLTLFEDREMIEERLKTYAHLFDDKVMKQLKRRRYTGWGRLSRKLINGIRDKQSGKTILDFLKSDGFANRNFMQLIHDDSLTFKEDIQKAQVSGQGDSLHEHIANLAGSPAIKKGILQTVKVVDELVKVMGRHKPENIVIEMARENQTTQKGQKNSRERMKRIEEGIKELGSQILKEHPVENTQLQNEKLYLYYLQNGRDMYVDQELDINRLSDYDVDHIVPQSFLKDDSIDNKVLTRSDKARGKSDNVPSEEVVKKMKNYWRQLLNAKLITQRKFDNLTKAERGGLSELDKAGFIKRQLVETRQITKHVAQILDSRMNTKYDENDKLIREVKVITLKSKLVSDFRKDFQFYKVREINNYHHAHDAYLNAVVGTALIKKYPKLESEFVYGDYKVYDVRKMIAKSEQEIGKATAKYFFYSNIMNFFKTEITLANGEIRKRPLIETNGETGEIVWDKGRDFATVRKVLSMPQVNIVKKTEVQTGGFSKESILPKRNSDKLIARKKDWDPKKYGGFDSPTVAYSVLVVAKVEKGKSKKLKSVKELLGITIMERSSFEKNPIDFLEAKGYKEVKKDLIIKLPKYSLFELENGRKRMLASAGELQKGNELALPSKYVNFLYLASHYEKLKGSPEDNEQKQLFVEQHKHYLDEIIEQISEFSKRVILADANLDKVLSAYNKHRDKPIREQAENIIHLFTLTNLGAPAAFKYFDTTIDRKRYTSTKEVLDATLIHQSITGLYETRIDLSQLGGDGGEAAAKEAAAKEAAAKEAAAKEAAAKEAAAKGGVLNLEEEYRLHEKPVPSSIDPSWLQLFPTVWAERAGMGLANQVPPVVVELRSGASPVAVRQYPMSKEAREGIRPHIQKFLDLGVLVPCRSPWNTPLLPVKKPGTNDYRPVQDLREINKRVQDIHPTVPNPYNLLSSLPPSYTWYSVLDLKDAFFCLRLHPNSQPLFAFEWKDPEKGNTGQLTWTRLPQGFKNSPTLFDEALHRDLAPFRALNPQVVLLQYVDDLLVAAPTYEDCKKGTQKLLQELSKLGYRVSAKKAQLCQREVTYLGYLLKEGKRWLTPARKATVMKIPVPTTPRQVREFLGTAGFCRLWIPGFASLAAPLYPLTKESIPFIWTEEHQQAFDHIKKALLSAPALALPDLTKPFTLYIDERAGVARGVLTQTLGPWRRPVAYLSKKLDPVASGWPTCLKAVAAVALLLKDADKLTLGQNVTVIASHSLESIVRQPPDRWMTNARMTHYQSLLLNERVSFAPPAVLNPATLLPVESEATPVHRCSEILAEETGTRRDLEDQPLPGVPTWYTDGSSFITEGKRRAGAPIVDGKRTVWASSLPEGTSAQKAELVALTQALRLAEGKNINIYTDSRYAFATAHIHGAIYKQRGLLTSAGKDIKNKEEILALLEAIHLPRRVAIIHCPGHQRGSNPVATGNRRADEAAKQAALSTRVLAGTTKPAGKRTADGSEFEKRTADGSEFESPKKKAKVE

SEQ ID NO: 6451 - protein, 2113 aa, synthetic construct
MPAAKRVKLDGGDKKYSIGLDIGTNSVGWAVITDEYKVPSKKFKVLGNTDRHSIKKNLIGALLFDSGETAEATRLKRTARRRYTRRKNRICYLQEIFSNEMAKVDDSFFHRLEESFLVEEDKKHERHPIFGNIVDEVAYHEKYPTIYHLRKKLVDSTDKADLRLIYLALAHMIKFRGHFLIEGDLNPDNSDVDKLFIQLVQTYNQLFEENPINASGVDAKAILSARLSKSRRLENLIAQLPGEKKNGLFGNLIALSLGLTPNFKSNFDLAEDAKLQLSKDTYDDDLDNLLAQIGDQYADLFLAAKNLSDAILLSDILRVNTEITKAPLSASMIKRYDEHHQDLTLLKALVRQQLPEKYKEIFFDQSKNGYAGYIDGGASQEEFYKFIKPILEKMDGTEELLVKLNREDLLRKQRTFDNGSIPHQIHLGELHAILRRQEDFYPFLKDNREKIEKILTFRIPYYVGPLARGNSRFAWMTRKSEETITPWNFEEVVDKGASAQSFIERMTNFDKNLPNEKVLPKHSLLYEYFTVYNELTKVKYVTEGMRKPAFLSGEQKKAIVDLLFKTNRKVTVKQLKEDYFKKIECFDSVEISGVEDRFNASLGTYHDLLKIIKDKDFLDNEENEDILEDIVLTLTLFEDREMIEERLKTYAHLFDDKVMKQLKRRRYTGWGRLSRKLINGIRDKQSGKTILDFLKSDGFANRNFMQLIHDDSLTFKEDIQKAQVSGQGDSLHEHIANLAGSPAIKKGILQTVKVVDELVKVMGRHKPENIVIEMARENQTTQKGQKNSRERMKRIEEGIKELGSQILKEHPVENTQLQNEKLYLYYLQNGRDMYVDQELDINRLSDYDVDHIVPQSFLKDDSIDNKVLTRSDKARGKSDNVPSEEVVKKMKNYWRQLLNAKLITQRKFDNLTKAERGGLSELDKAGFIKRQLVETRQITKHVAQILDSRMNTKYDENDKLIREVKVITLKSKLVSDFRKDFQFYKVREINNYHHAHDAYLNAVVGTALIKKYPKLESEFVYGDYKVYDVRKMIAKSEQEIGKATAKYFFYSNIMNFFKTEITLANGEIRKRPLIETNGETGEIVWDKGRDFATVRKVLSMPQVNIVKKTEVQTGGFSKESILPKRNSDKLIARKKDWDPKKYGGFDSPTVAYSVLVVAKVEKGKSKKLKSVKELLGITIMERSSFEKNPIDFLEAKGYKEVKKDLIIKLPKYSLFELENGRKRMLASAGELQKGNELALPSKYVNFLYLASHYEKLKGSPEDNEQKQLFVEQHKHYLDEIIEQISEFSKRVILADANLDKVLSAYNKHRDKPIREQAENIIHLFTLTNLGAPAAFKYFDTTIDRKRYTSTKEVLDATLIHQSITGLYETRIDLSQLGGDGGEAAAKEAAAKEAAAKEAAAKEAAAKEAAAKGGVLNLEEEYRLHEKPVPSSIDPSWLQLFPTVWAERAGMGLANQVPPVVVELRSGASPVAVRQYPMSKEAREGIRPHIQKFLDLGVLVPCRSPWNTPLLPVKKPGTNDYRPVQDLREINKRVQDIHPTVPNPYNLLSSLPPSYTWYSVLDLKDAFFCLRLHPNSQPLFAFEWKDPEKGNTGQLTWTRLPQGFKNSPTLFNEALHRDLAPFRALNPQVVLLQYVDDLLVAAPTYEDCKKGTQKLLQELSKLGYRVSAKKAQLCQREVTYLGYLLKEGKRWLTPARKATVMKIPVPTTPRQVREFLGTAGFCRLWIPGFASLAAPLYPLTKPSIPFIWTEEHQQAFDHIKKALLSAPALALPDLTKPFTLYIDERAGVARGVLTQTLGPWRRPVAYLSKKLDPVASGWPTCLKAVAAVALLLKDADKLTLGQNVTVIASHSLESIVRQPPDRWMTNARMTHYQSLLLNERVSFAPPAVLNPATLLPVESEATPVHRCSEILAEETGTRRDLEDQPLPGVPTWYTDGSSFITEGKRRAGAPIVDGKRTVWASSLPEGTSAQKAELVALTQALRLAEGKNINIYTDSRYAFATAHIHGAIYKQRGWLTSAGKDIKNKEEILALLEAIHLPRRVAIIHCPGHQRGSNPVATGNRRADEAAKQAALSTRVLAGTTKPAGKRTADGSEFEKRTADGSEFESPKKKAKVE

SEQ ID NO: 6452 - protein, 2237 aa, synthetic construct
MPAAKRVKLDGGDKKYSIGLDIGTNSVGWAVITDEYKVPSKKFKVLGNTDRHSIKKNLIGALLFDSGETAEATRLKRTARRRYTRRKNRICYLQEIFSNEMAKVDDSFFHRLEESFLVEEDKKHERHPIFGNIVDEVAYHEKYPTIYHLRKKLVDSTDKADLRLIYLALAHMIKFRGHFLIEGDLNPDNSDVDKLFIQLVQTYNQLFEENPINASGVDAKAILSARLSKSRRLENLIAQLPGEKKNGLFGNLIALSLGLTPNFKSNFDLAEDAKLQLSKDTYDDDLDNLLAQIGDQYADLFLAAKNLSDAILLSDILRVNTEITKAPLSASMIKRYDEHHQDLTLLKALVRQQLPEKYKEIFFDQSKNGYAGYIDGGASQEEFYKFIKPILEKMDGTEELLVKLNREDLLRKQRTFDNGSIPHQIHLGELHAILRRQEDFYPFLKDNREKIEKILTFRIPYYVGPLARGNSRFAWMTRKSEETITPWNFEEVVDKGASAQSFIERMTNFDKNLPNEKVLPKHSLLYEYFTVYNELTKVKYVTEGMRKPAFLSGEQKKAIVDLLFKTNRKVTVKQLKEDYFKKIECFDSVEISGVEDRFNASLGTYHDLLKIIKDKDFLDNEENEDILEDIVLTLTLFEDREMIEERLKTYAHLFDDKVMKQLKRRRYTGWGRLSRKLINGIRDKQSGKTILDFLKSDGFANRNFMQLIHDDSLTFKEDIQKAQVSGQGDSLHEHIANLAGSPAIKKGILQTVKVVDELVKVMGRHKPENIVIEMARENQTTQKGQKNSRERMKRIEEGIKELGSQILKEHPVENTQLQNEKLYLYYLQNGRDMYVDQELDINRLSDYDVDHIVPQSFLKDDSIDNKVLTRSDKARGKSDNVPSEEVVKKMKNYWRQLLNAKLITQRKFDNLTKAERGGLSELDKAGFIKRQLVETRQITKHVAQILDSRMNTKYDENDKLIREVKVITLKSKLVSDFRKDFQFYKVREINNYHHAHDAYLNAVVGTALIKKYPKLESEFVYGDYKVYDVRKMIAKSEQEIGKATAKYFFYSNIMNFFKTEITLANGEIRKRPLIETNGETGEIVWDKGRDFATVRKVLSMPQVNIVKKTEVQTGGFSKESILPKRNSDKLIARKKDWDPKKYGGFDSPTVAYSVLVVAKVEKGKSKKLKSVKELLGITIMERSSFEKNPIDFLEAKGYKEVKKDLIIKLPKYSLFELENGRKRMLASAGELQKGNELALPSKYVNFLYLASHYEKLKGSPEDNEQKQLFVEQHKHYLDEIIEQISEFSKRVILADANLDKVLSAYNKHRDKPIREQAENIIHLFTLTNLGAPAAFKYFDTTIDRKRYTSTKEVLDATLIHQSITGLYETRIDLSQLGGDGGEAAAKEAAAKEAAAKEAAAKEAAAKEAAAKGGTLGDQGSRGSDPLPEPRVTLTVEGIPTEFLVNTGAEHSVLTKPMGKMGSKRTVVAGATGSKVYPWTTKRLLKIGQKQVTHSFLVIPECPAPLLGRDLLTKLKAQIQFSTEGPQVTWEDRPAMCLVLNLEEEYRLHEKPVPPSIDPSWLQLFPMVWAEKAGMGLANQVPPVVVELKSDASPVAVRQYPMSKEAREGIRPHIQRFLDLGILVPCQSPWNTPLLPVKKPGTNDYRPVQDLREVNKRVQDIHPTVPNPYNLLSSLPPSHTWYSVLDLKDAFFCLKLHPNSQPLFAFEWRDPEKGNTGQLTWTRLPQGFKNSPTLFDEALHRDLASFRALNPQVVMLQYVDDLLVAAPTYRDCKEGTRRLLQELSKLGYRVSAKKAQLCREEVTYLGYLLKGGKRWLTPARKATVMKIPTPTTPRQVREFLGTAGFCRLWIPGFASLAAPLYPLTREKVPFTWTEAHQEAFGRIKEALLSAPALALPDLTKPFALYVDEKEGVARGVLTQTLGPWRRPVAYLSKKLDPVASGWPTCLKAIAAVALLLKDADKLTLGQNVLVIAPHNLESIVRQPPDRWMTNARMTHYQSLLLNERVSFAPPAILNPATLLPVESDDTPIHICSEILAEETGTRPDLRDQPLPGVPAWYTDGSSFIMDGRRQAGAAIVDNKRTVWASNLPEGTSAQKAELIALTQALRLAEGKSINIYTDSRYAFATAHVHGAIYKQRGLLTSAGKDIKNKEEILALLEAIHLPKRVAIIHCPGHQRGTDPVATGNRKADEAAKQAAQSTRILTETTKNAGKRTADGSEFEKRTADGSEFESPKKKAKVE

SEQ ID NO: 6453 - protein, 2237 aa, synthetic construct
MPAAKRVKLDGGDKKYSIGLDIGTNSVGWAVITDEYKVPSKKFKVLGNTDRHSIKKNLIGALLFDSGETAEATRLKRTARRRYTRRKNRICYLQEIFSNEMAKVDDSFFHRLEESFLVEEDKKHERHPIFGNIVDEVAYHEKYPTIYHLRKKLVDSTDKADLRLIYLALAHMIKFRGHFLIEGDLNPDNSDVDKLFIQLVQTYNQLFEENPINASGVDAKAILSARLSKSRRLENLIAQLPGEKKNGLFGNLIALSLGLTPNFKSNFDLAEDAKLQLSKDTYDDDLDNLLAQIGDQYADLFLAAKNLSDAILLSDILRVNTEITKAPLSASMIKRYDEHHQDLTLLKALVRQQLPEKYKEIFFDQSKNGYAGYIDGGASQEEFYKFIKPILEKMDGTEELLVKLNREDLLRKQRTFDNGSIPHQIHLGELHAILRRQEDFYPFLKDNREKIEKILTFRIPYYVGPLARGNSRFAWMTRKSEETITPWNFEEVVDKGASAQSFIERMTNFDKNLPNEKVLPKHSLLYEYFTVYNELTKVKYVTEGMRKPAFLSGEQKKAIVDLLFKTNRKVTVKQLKEDYFKKIECFDSVEISGVEDRFNASLGTYHDLLKIIKDKDFLDNEENEDILEDIVLTLTLFEDREMIEERLKTYAHLFDDKVMKQLKRRRYTGWGRLSRKLINGIRDKQSGKTILDFLKSDGFANRNFMQLIHDDSLTFKEDIQKAQVSGQGDSLHEHIANLAGSPAIKKGILQTVKVVDELVKVMGRHKPENIVIEMARENQTTQKGQKNSRERMKRIEEGIKELGSQILKEHPVENTQLQNEKLYLYYLQNGRDMYVDQELDINRLSDYDVDHIVPQSFLKDDSIDNKVLTRSDKARGKSDNVPSEEVVKKMKNYWRQLLNAKLITQRKFDNLTKAERGGLSELDKAGFIKRQLVETRQITKHVAQILDSRMNTKYDENDKLIREVKVITLKSKLVSDFRKDFQFYKVREINNYHHAHDAYLNAVVGTALIKKYPKLESEFVYGDYKVYDVRKMIAKSEQEIGKATAKYFFYSNIMNFFKTEITLANGEIRKRPLIETNGETGEIVWDKGRDFATVRKVLSMPQVNIVKKTEVQTGGFSKESILPKRNSDKLIARKKDWDPKKYGGFDSPTVAYSVLVVAKVEKGKSKKLKSVKELLGITIMERSSFEKNPIDFLEAKGYKEVKKDLIIKLPKYSLFELENGRKRMLASAGELQKGNELALPSKYVNFLYLASHYEKLKGSPEDNEQKQLFVEQHKHYLDEIIEQISEFSKRVILADANLDKVLSAYNKHRDKPIREQAENIIHLFTLTNLGAPAAFKYFDTTIDRKRYTSTKEVLDATLIHQSITGLYETRIDLSQLGGDGGEAAAKEAAAKEAAAKEAAAKEAAAKEAAAKGGTLGDQGSRGSDPLPEPRVTLTVEGIPTEFLVNTGAEHSVLTKPMGKMGSKRTVVAGATGSKVYPWTTKRLLKIGQKQVTHSFLVIPECPAPLLGRDLLTKLKAQIQFSTEGPQVTWEDRPAMCLVLNLEEEYRLHEKPVPPSIDPSWLQLFPMVWAEKAGMGLANQVPPVVVELKSDASPVAVRQYPMSKEAREGIRPHIQRFLDLGILVPCQSPWNTPLLPVKKPGTNDYRPVQDLREVNKRVQDIHPTVPNPYNLLSSLPPSHTWYSVLDLKDAFFCLKLHPNSQPLFAFEWRDPEKGNTGQLTWTRLPQGFKNSPTLFNEALHRDLASFRALNPQVVMLQYVDDLLVAAPTYRDCKEGTRRLLQELSKLGYRVSAKKAQLCREEVTYLGYLLKGGKRWLTPARKATVMKIPTPTTPRQVREFLGTAGFCRLWIPGFASLAAPLYPLTRPKVPFTWTEAHQEAFGRIKEALLSAPALALPDLTKPFALYVDEKEGVARGVLTQTLGPWRRPVAYLSKKLDPVASGWPTCLKAIAAVALLLKDADKLTLGQNVLVIAPHNLESIVRQPPDRWMTNARMTHYQSLLLNERVSFAPPAILNPATLLPVESDDTPIHICSEILAEETGTRPDLRDQPLPGVPAWYTDGSSFIMDGRRQAGAAIVDNKRTVWASNLPEGTSAQKAELIALTQALRLAEGKSINIYTDSRYAFATAHVHGAIYKQRGWLTSAGKDIKNKEEILALLEAIHLPKRVAIIHCPGHQRGTDPVATGNRKADEAAKQAAQSTRILTETTKNAGKRTADGSEFEKRTADGSEFESPKKKAKVE

SEQ ID NO: 6454 - protein, 2115 aa, synthetic construct
MPAAKRVKLDGGDKKYSIGLDIGTNSVGWAVITDEYKVPSKKFKVLGNTDRHSIKKNLIGALLFDSGETAEATRLKRTARRRYTRRKNRICYLQEIFSNEMAKVDDSFFHRLEESFLVEEDKKHERHPIFGNIVDEVAYHEKYPTIYHLRKKLVDSTDKADLRLIYLALAHMIKFRGHFLIEGDLNPDNSDVDKLFIQLVQTYNQLFEENPINASGVDAKAILSARLSKSRRLENLIAQLPGEKKNGLFGNLIALSLGLTPNFKSNFDLAEDAKLQLSKDTYDDDLDNLLAQIGDQYADLFLAAKNLSDAILLSDILRVNTEITKAPLSASMIKRYDEHHQDLTLLKALVRQQLPEKYKEIFFDQSKNGYAGYIDGGASQEEFYKFIKPILEKMDGTEELLVKLNREDLLRKQRTFDNGSIPHQIHLGELHAILRRQEDFYPFLKDNREKIEKILTFRIPYYVGPLARGNSRFAWMTRKSEETITPWNFEEVVDKGASAQSFIERMTNFDKNLPNEKVLPKHSLLYEYFTVYNELTKVKYVTEGMRKPAFLSGEQKKAIVDLLFKTNRKVTVKQLKEDYFKKIECFDSVEISGVEDRFNASLGTYHDLLKIIKDKDFLDNEENEDILEDIVLTLTLFEDREMIEERLKTYAHLFDDKVMKQLKRRRYTGWGRLSRKLINGIRDKQSGKTILDFLKSDGFANRNFMQLIHDDSLTFKEDIQKAQVSGQGDSLHEHIANLAGSPAIKKGILQTVKVVDELVKVMGRHKPENIVIEMARENQTTQKGQKNSRERMKRIEEGIKELGSQILKEHPVENTQLQNEKLYLYYLQNGRDMYVDQELDINRLSDYDVDHIVPQSFLKDDSIDNKVLTRSDKARGKSDNVPSEEVVKKMKNYWRQLLNAKLITQRKFDNLTKAERGGLSELDKAGFIKRQLVETRQITKHVAQILDSRMNTKYDENDKLIREVKVITLKSKLVSDFRKDFQFYKVREINNYHHAHDAYLNAVVGTALIKKYPKLESEFVYGDYKVYDVRKMIAKSEQEIGKATAKYFFYSNIMNFFKTEITLANGEIRKRPLIETNGETGEIVWDKGRDFATVRKVLSMPQVNIVKKTEVQTGGFSKESILPKRNSDKLIARKKDWDPKKYGGFDSPTVAYSVLVVAKVEKGKSKKLKSVKELLGITIMERSSFEKNPIDFLEAKGYKEVKKDLIIKLPKYSLFELENGRKRMLASAGELQKGNELALPSKYVNFLYLASHYEKLKGSPEDNEQKQLFVEQHKHYLDEIIEQISEFSKRVILADANLDKVLSAYNKHRDKPIREQAENIIHLFTLTNLGAPAAFKYFDTTIDRKRYTSTKEVLDATLIHQSITGLYETRIDLSQLGGDGGEAAAKEAAAKEAAAKEAAAKEAAAKEAAAKGGTLNLEDEYRLYETSAEPEVSPGSTWLSDFPQAWAETGGMGLAVRQAPLIIPLKATSTPVSIKQYPMSQEAKLGIKPHIQRLLDQGILVPCQSPWNTPLLPVKKPGTNDYRPVQDLREVNKRVEDIHPTVPNPYNLLSGLPPSHRWYTVLDLKDAFFCLRLHPTSQPLFAFEWRDPGMGISGQLTWTRLPQGFKNSPTLFNEALHRDLADFRIQHPDLILLQYVDDILLAATSELDCQQGTRALLLTLGNLGYRASAKKAQLCQKQVKYLGYLLKEGQRWLTEARKETVMGQPTPKTPRQLREFLGTAGFCRLWIPGFAEMAAPLYPLTKPGTLFNWGPDQQKAYQEIKQALLTAPALGLPDLTKPFELFVDEKQGYAKGVLTQKLGPWRRPVAYLSKKLDPVAAGWPPCLRMVAAIAVLRKDAGKLTMGQPLVILAPHAVEALVKQPPDRWLSNARMTHYQAMLLDTDRVQFGPVVALNPATLLPLPEEGAPHDCLEILAETHGTRPDLTDQPIPDADHTWYTDGSSFLQEGQRKAGAAVTTETEVIWARALPAGTSAQRAELIALTQALKMAEGKRLNVYTDSRYAFATAHIHGEIYRRRGWLTSEGREIKNKSEILALLKALFLPKRLSIIHCLGHQKGDSAEARGNRLADQAAREAAIKTPPDTSTLLAGKRTADGSEFEKRTADGSEFESPKKKAKVE

SEQ ID NO: 6455 - protein, 2115 aa, synthetic construct
MPAAKRVKLDGGDKKYSIGLDIGTNSVGWAVITDEYKVPSKKFKVLGNTDRHSIKKNLIGALLFDSGETAEATRLKRTARRRYTRRKNRICYLQEIFSNEMAKVDDSFFHRLEESFLVEEDKKHERHPIFGNIVDEVAYHEKYPTIYHLRKKLVDSTDKADLRLIYLALAHMIKFRGHFLIEGDLNPDNSDVDKLFIQLVQTYNQLFEENPINASGVDAKAILSARLSKSRRLENLIAQLPGEKKNGLFGNLIALSLGLTPNFKSNFDLAEDAKLQLSKDTYDDDLDNLLAQIGDQYADLFLAAKNLSDAILLSDILRVNTEITKAPLSASMIKRYDEHHQDLTLLKALVRQQLPEKYKEIFFDQSKNGYAGYIDGGASQEEFYKFIKPILEKMDGTEELLVKLNREDLLRKQRTFDNGSIPHQIHLGELHAILRRQEDFYPFLKDNREKIEKILTFRIPYYVGPLARGNSRFAWMTRKSEETITPWNFEEVVDKGASAQSFIERMTNFDKNLPNEKVLPKHSLLYEYFTVYNELTKVKYVTEGMRKPAFLSGEQKKAIVDLLFKTNRKVTVKQLKEDYFKKIECFDSVEISGVEDRFNASLGTYHDLLKIIKDKDFLDNEENEDILEDIVLTLTLFEDREMIEERLKTYAHLFDDKVMKQLKRRRYTGWGRLSRKLINGIRDKQSGKTILDFLKSDGFANRNFMQLIHDDSLTFKEDIQKAQVSGQGDSLHEHIANLAGSPAIKKGILQTVKVVDELVKVMGRHKPENIVIEMARENQTTQKGQKNSRERMKRIEEGIKELGSQILKEHPVENTQLQNEKLYLYYLQNGRDMYVDQELDINRLSDYDVDHIVPQSFLKDDSIDNKVLTRSDKARGKSDNVPSEEVVKKMKNYWRQLLNAKLITQRKFDNLTKAERGGLSELDKAGFIKRQLVETRQITKHVAQILDSRMNTKYDENDKLIREVKVITLKSKLVSDFRKDFQFYKVREINNYHHAHDAYLNAVVGTALIKKYPKLESEFVYGDYKVYDVRKMIAKSEQEIGKATAKYFFYSNIMNFFKTEITLANGEIRKRPLIETNGETGEIVWDKGRDFATVRKVLSMPQVNIVKKTEVQTGGFSKESILPKRNSDKLIARKKDWDPKKYGGFDSPTVAYSVLVVAKVEKGKSKKLKSVKELLGITIMERSSFEKNPIDFLEAKGYKEVKKDLIIKLPKYSLFELENGRKRMLASAGELQKGNELALPSKYVNFLYLASHYEKLKGSPEDNEQKQLFVEQHKHYLDEIIEQISEFSKRVILADANLDKVLSAYNKHRDKPIREQAENIIHLFTLTNLGAPAAFKYFDTTIDRKRYTSTKEVLDATLIHQSITGLYETRIDLSQLGGDGGEAAAKEAAAKEAAAKEAAAKEAAAKEAAAKGGTLGIEDEYRLHETSTEPDVSLGSTWLSDFPQAWAETGGMGLAVRQAPLIIPLKATSTPVSIQQYPMSHEARLGIKPHIQRLLDQGILVPCQSPWNTPLLPVKKPGTNDYRPVQDLREVNKRVEDIHPTVPNPYNLLSGLPPSHQWYTVLDLKDAFFCLRLHPTSQPLFAFEWRDPGMGISGQLTWTRLPQGFKNSPTLFDEALHRDLADFRIQHPDLILLQYVDDILLAATSELDCQQGTRALLQTLGDLGYRASAKKAQICQKQVKYLGYLLREGQRWLTEARKETVMGQPVPKTPRQLREFLGTAGFCRLWIPGFAEMAAPLYPLTKTGTLFSWGPDQQKAYQEIKQALLTAPALGLPDLTKPFELFVDEKQGYAKGVLTQKLGPWRRPVAYLSKKLDPVAAGWPPCLRMVAAIAVLTKDAGKLTMGQPLVILAPHAVEALVKQPPDRWLSNARMTHYQAMLLDTDRVQFGPVVALNPATLLPLPEEGAPHDCLEILAETHGTRPDLTDQPIPDADHTWYTDGSSFLQEGQRKAGAAVTTETEVIWAGALPAGTSAQRAELIALTQALKMAEGKRLNVYTDSRYAFATAHIHGEIYRRRGLLTSEGREIKNKSEILALLKALFLPKRLSIIHCLGHQKGDSAEARGNRLADQAAREAAIKTPPDTSTLLAGKRTADGSEFEKRTADGSEFESPKKKAKVE

SEQ ID NO: 6456 - protein, 2115 aa, synthetic construct; identical to SEQ ID NO: 6455

SEQ ID NO: 6457 - protein, 2115 aa, synthetic construct
MPAAKRVKLDGGDKKYSIGLDIGTNSVGWAVITDEYKVPSKKFKVLGNTDRHSIKKNLIGALLFDSGETAEATRLKRTARRRYTRRKNRICYLQEIFSNEMAKVDDSFFHRLEESFLVEEDKKHERHPIFGNIVDEVAYHEKYPTIYHLRKKLVDSTDKADLRLIYLALAHMIKFRGHFLIEGDLNPDNSDVDKLFIQLVQTYNQLFEENPINASGVDAKAILSARLSKSRRLENLIAQLPGEKKNGLFGNLIALSLGLTPNFKSNFDLAEDAKLQLSKDTYDDDLDNLLAQIGDQYADLFLAAKNLSDAILLSDILRVNTEITKAPLSASMIKRYDEHHQDLTLLKALVRQQLPEKYKEIFFDQSKNGYAGYIDGGASQEEFYKFIKPILEKMDGTEELLVKLNREDLLRKQRTFDNGSIPHQIHLGELHAILRRQEDFYPFLKDNREKIEKILTFRIPYYVGPLARGNSRFAWMTRKSEETITPWNFEEVVDKGASAQSFIERMTNFDKNLPNEKVLPKHSLLYEYFTVYNELTKVKYVTEGMRKPAFLSGEQKKAIVDLLFKTNRKVTVKQLKEDYFKKIECFDSVEISGVEDRFNASLGTYHDLLKIIKDKDFLDNEENEDILEDIVLTLTLFEDREMIEERLKTYAHLFDDKVMKQLKRRRYTGWGRLSRKLINGIRDKQSGKTILDFLKSDGFANRNFMQLIHDDSLTFKEDIQKAQVSGQGDSLHEHIANLAGSPAIKKGILQTVKVVDELVKVMGRHKPENIVIEMARENQTTQKGQKNSRERMKRIEEGIKELGSQILKEHPVENTQLQNEKLYLYYLQNGRDMYVDQELDINRLSDYDVDHIVPQSFLKDDSIDNKVLTRSDKARGKSDNVPSEEVVKKMKNYWRQLLNAKLITQRKFDNLTKAERGGLSELDKAGFIKRQLVETRQITKHVAQILDSRMNTKYDENDKLIREVKVITLKSKLVSDFRKDFQFYKVREINNYHHAHDAYLNAVVGTALIKKYPKLESEFVYGDYKVYDVRKMIAKSEQEIGKATAKYFFYSNIMNFFKTEITLANGEIRKRPLIETNGETGEIVWDKGRDFATVRKVLSMPQVNIVKKTEVQTGGFSKESILPKRNSDKLIARKKDWDPKKYGGFDSPTVAYSVLVVAKVEKGKSKKLKSVKELLGITIMERSSFEKNPIDFLEAKGYKEVKKDLIIKLPKYSLFELENGRKRMLASAGELQKGNELALPSKYVNFLYLASHYEKLKGSPEDNEQKQLFVEQHKHYLDEIIEQISEFSKRVILADANLDKVLSAYNKHRDKPIREQAENIIHLFTLTNLGAPAAFKYFDTTIDRKRYTSTKEVLDATLIHQSITGLYETRIDLSQLGGDGGEAAAKEAAAKEAAAKEAAAKEAAAKEAAAKGGTLNIEDEYRLHETSKEPDVSLGSTWLSDFPQAWAETGGMGLAVRQAPLIIPLKATSTPVSIKQYPMSQEARLGIKPHIQRLLDQGILVPCQSPWNTPLLPVKKPGTNDYRPVQDLREVNKRVEDIHPTVPNPYNLLSGLPPSHQWYTVLDLKDAFFCLRLHPTSQPLFAFEWRDPEMGISGQLTWTRLPQGFKNSPTLFDEALHRDLAGFRIQHPDLILLQYVDDLLLAATSELDCQQGTRALLQTLGDLGYRASAKKAQICQKQVKYLGYLLKEGQRWLTEARKETVMGQPIPKTPRQLREFLGTAGFCRLWIPGFAEMAAPLYPLTKTGTLFNWGPDQQKAFQEIKQALLTAPALGLPDLTKPFELFVDEKQGYAKGVLTQKLGPWRRPVAYLSKKLDPVAAGWPPCLRMVAAIAVLTKDAGKLTMGQPLVILAPHAVEALVKQPPDRWLSNARMTHYQALLLDTDRVQFGPVVALNPATLLPLPEEGLQHDCLDILAEAHGTRSDLMDQPLPDADHTWYTDGSSFLQEGQRKAGAAVTTETEVIWARALPAGTSAQRAELIALTQALKMAEGKKLNVYTDSRYAFATAHIHGEIYRRRGLLTSEGKEIKNKDEILALLKALFLPKRLSIIHCPGHQKGNSAEARGNRMADQAAREVATRETPETSTLLAGKRTADGSEFEKRTADGSEFESPKKKAKVE

SEQ ID NO: 6458 - protein, 2115 aa, synthetic construct
MPAAKRVKLDGGDKKYSIGLDIGTNSVGWAVITDEYKVPSKKFKVLGNTDRHSIKKNLIGALLFDSGETAEATRLKRTARRRYTRRKNRICYLQEIFSNEMAKVDDSFFHRLEESFLVEEDKKHERHPIFGNIVDEVAYHEKYPTIYHLRKKLVDSTDKADLRLIYLALAHMIKFRGHFLIEGDLNPDNSDVDKLFIQLVQTYNQLFEENPINASGVDAKAILSARLSKSRRLENLIAQLPGEKKNGLFGNLIALSLGLTPNFKSNFDLAEDAKLQLSKDTYDDDLDNLLAQIGDQYADLFLAAKNLSDAILLSDILRVNTEITKAPLSASMIKRYDEHHQDLTLLKALVRQQLPEKYKEIFFDQSKNGYAGYIDGGASQEEFYKFIKPILEKMDGTEELLVKLNREDLLRKQRTFDNGSIPHQIHLGELHAILRRQEDFYPFLKDNREKIEKILTFRIPYYVGPLARGNSRFAWMTRKSEETITPWNFEEVVDKGASAQSFIERMTNFDKNLPNEKVLPKHSLLYEYFTVYNELTKVKYVTEGMRKPAFLSGEQKKAIVDLLFKTNRKVTVKQLKEDYFKKIECFDSVEISGVEDRFNASLGTYHDLLKIIKDKDFLDNEENEDILEDIVLTLTLFEDREMIEERLKTYAHLFDDKVMKQLKRRRYTGWGRLSRKLINGIRDKQSGKTILDFLKSDGFANRNFMQLIHDDSLTFKEDIQKAQVSGQGDSLHEHIANLAGSPAIKKGILQTVKVVDELVKVMGRHKPENIVIEMARENQTTQKGQKNSRERMKRIEEGIKELGSQILKEHPVENTQLQNEKLYLYYLQNGRDMYVDQELDINRLSDYDVDHIVPQSFLKDDSIDNKVLTRSDKARGKSDNVPSEEVVKKMKNYWRQLLNAKLITQRKFDNLTKAERGGLSELDKAGFIKRQLVETRQITKHVAQILDSRMNTKYDENDKLIREVKVITLKSKLVSDFRKDFQFYKVREINNYHHAHDAYLNAVVGTALIKKYPKLESEFVYGDYKVYDVRKMIAKSEQEIGKATAKYFFYSNIMNFFKTEITLANGEIRKRPLIETNGETGEIVWDKGRDFATVRKVLSMPQVNIVKKTEVQTGGFSKESILPKRNSDKLIARKKDWDPKKYGGFDSPTVAYSVLVVAKVEKGKSKKLKSVKELLGITIMERSSFEKNPIDFLEAKGYKEVKKDLIIKLPKYSLFELENGRKRMLASAGELQKGNELALPSKYVNFLYLASHYEKLKGSPEDNEQKQLFVEQHKHYLDEIIEQISEFSKRVILADANLDKVLSAYNKHRDKPIREQAENIIHLFTLTNLGAPAAFKYFDTTIDRKRYTSTKEVLDATLIHQSITGLYETRIDLSQLGGDGGEAAAKEAAAKEAAAKEAAAKEAAAKEAAAKGGTLNIEDEHRLHETSKEPDVSLGSTWLSDFPQAWAETGGMGLAVRQAPLIIPLKATSTPVSIKQYPMSQEARLGIKPHIQRLLDQGILVPCQSPWNTPLLPVKKPGTNDYRPVQDLREVNKRVEDIHPTVPNPYNLLSGLPPSHQWYTVLDLKDAFFCLRLHPTSQPLFAFEWRDPEMGISGQLTWTRLPQGFKNSPTLFDEALHRDLADFRIQHPDLILLQYVDDLLLAATSELDCQQGTRALLQTLGNLGYRASAKKAQICQKQVKYLGYLLKEGQRWLTEARKETVMGQPTPKTPRQLREFLGTAGFCRLWIPGFAEMAAPLYPLTKTGTLFNWGPDQQKAYQEIKQALLTAPALGLPDLTKPFELFVDEKQGYAKGVLTQKLGPWRRPVAYLSKKLDPVAAGWPPCLRMVAAIAVLTKDAGKLTMGQPLVILAPHAVEALVKQPPDRWLSNARMTHYQALLLDTDRVQFGPVVALNPATLLPLPEEGLQHNCLDILAEAHGTRPDLTDQPLPDADHTWYTDGSSLLQEGQRKAGAAVTTETEVIWAKALPAGTSAQRAELIALTQALKMAEGKKLNVYTDSRYAFATAHIHGEIYRRRGLLTSEGKEIKNKDEILALLKALFLPKRLSIIHCPGHQKGHSAEARGNRMADQAARKAAITETPDTSTLLAGKRTADGSEFEKRTADGSEFESPKKKAKVE

SEQ ID NO: 6459 - protein, 2115 aa, synthetic construct; identical to SEQ ID NO: 6458

SEQ ID NO: 6460 - protein, 2115 aa, synthetic construct
MPAAKRVKLDGGDKKYSIGLDIGTNSVGWAVITDEYKVPSKKFKVLGNTDRHSIKKNLIGALLFDSGETAEATRLKRTARRRYTRRKNRICYLQEIFSNEMAKVDDSFFHRLEESFLVEEDKKHERHPIFGNIVDEVAYHEKYPTIYHLRKKLVDSTDKADLRLIYLALAHMIKFRGHFLIEGDLNPDNSDVDKLFIQLVQTYNQLFEENPINASGVDAKAILSARLSKSRRLENLIAQLPGEKKNGLFGNLIALSLGLTPNFKSNFDLAEDAKLQLSKDTYDDDLDNLLAQIGDQYADLFLAAKNLSDAILLSDILRVNTEITKAPLSASMIKRYDEHHQDLTLLKALVRQQLPEKYKEIFFDQSKNGYAGYIDGGASQEEFYKFIKPILEKMDGTEELLVKLNREDLLRKQRTFDNGSIPHQIHLGELHAILRRQEDFYPFLKDNREKIEKILTFRIPYYVGPLARGNSRFAWMTRKSEETITPWNFEEVVDKGASAQSFIERMTNFDKNLPNEKVLPKHSLLYEYFTVYNELTKVKYVTEGMRKPAFLSGEQKKAIVDLLFKTNRKVTVKQLKEDYFKKIECFDSVEISGVEDRFNASLGTYHDLLKIIKDKDFLDNEENEDILEDIVLTLTLFEDREMIEERLKTYAHLFDDKVMKQLKRRRYTGWGRLSRKLINGIRDKQSGKTILDFLKSDGFANRNFMQLIHDDSLTFKEDIQKAQVSGQGDSLHEHIANLAGSPAIKKGILQTVKVVDELVKVMGRHKPENIVIEMARENQTTQKGQKNSRERMKRIEEGIKELGSQILKEHPVENTQLQNEKLYLYYLQNGRDMYVDQELDINRLSDYDVDHIVPQSFLKDDSIDNKVLTRSDKARGKSDNVPSEEVVKKMKNYWRQLLNAKLITQRKFDNLTKAERGGLSELDKAGFIKRQLVETRQITKHVAQILDSRMNTKYDENDKLIREVKVITLKSKLVSDFRKDFQFYKVREINNYHHAHDAYLNAVVGTALIKKYPKLESEFVYGDYKVYDVRKMIAKSEQEIGKATAKYFFYSNIMNFFKTEITLANGEIRKRPLIETNGETGEIVWDKGRDFATVRKVLSMPQVNIVKKTEVQTGGFSKESILPKRNSDKLIARKKDWDPKKYGGFDSPTVAYSVLVVAKVEKGKSKKLKSVKELLGITIMERSSFEKNPIDFLEAKGYKEVKKDLIIKLPKYSLFELENGRKRMLASAGELQKGNELALPSKYVNFLYLASHYEKLKGSPEDNEQKQLFVEQHKHYLDEIIEQISEFSKRVILADANLDKVLSAYNKHRDKPIREQAENIIHLFTLTNLGAPAAFKYFDTTIDRKRYTSTKEVLDATLIHQSITGLYETRIDLSQLGGDGGEAAAKEAAAKEAAAKEAAAKEAAAKEAAAKGGTLNIEDEYRLHEISTEPDVSPGSTWLSDFPQAWAETGGMGLAVRQAPLIIPLKATSTPVSIKQYPMSQEAKLGIKPHIQRLLDQGILVPCQSPWNTPLLPVKKPGTNDYRPVQGLREVNKRVEDIHPTVPNPYNLLSGLPTSHRWYTVLDLKDAFFCLRLHPTSQPLFASEWRDPGMGISGQLTWTRLPQGFKNSPTLFDEALHRGLADFRIQHPDLILLQYVDDLLLAATSELDCQQGTRALLKTLGNLGYRASAKKAQICQKQVKYLGYLLREGQRWLTEARKETVMGQPTPKTPRQLREFLGTAGFCRLWIPRFAEMAAPLYPLTKTGTLFNWGPDQQKAYHEIKQALLTAPALGLPDLTKPFELFVDEKQGYAKGVLTQKLGPWRRPVAYLSKKLDPVAAGWPPCLRMVAAIAVLTKDAGKLTMGQPLVILAPHAVEALVKQPPDRWLSNARMTHYQAMLLDTDRVQFGPVVALNPATLLPLPEEGAPHDCLEILAETHGTEPDLTDQPIPDADHTWYTDGSSFLQEGQRKAGAAVTTETEVIWARALPAGTSAQRAELIALTQALKMAEGKRLNVYTDSRYAFATAHIHGEIYKRRGLLTSEGREIKNKSEILALLKALFLPKRLSIIHCLGHQKGDSAEARGNRLADQAAREAAIKTPPDTSTLLAGKRTADGSEFEKRTADGSEFESPKKKAKVE

SEQ ID NO: 6461 - protein, 2115 aa, synthetic construct
MPAAKRVKLDGGDKKYSIGLDIGTNSVGWAVITDEYKVPSKKFKVLGNTDRHSIKKNLIGALLFDSGETAEATRLKRTARRRYTRRKNRICYLQEIFSNEMAKVDDSFFHRLEESFLVEEDKKHERHPIFGNIVDEVAYHEKYPTIYHLRKKLVDSTDKADLRLIYLALAHMIKFRGHFLIEGDLNPDNSDVDKLFIQLVQTYNQLFEENPINASGVDAKAILSARLSKSRRLENLIAQLPGEKKNGLFGNLIALSLGLTPNFKSNFDLAEDAKLQLSKDTYDDDLDNLLAQIGDQYADLFLAAKNLSDAILLSDILRVNTEITKAPLSASMIKRYDEHHQDLTLLKALVRQQLPEKYKEIFFDQSKNGYAGYIDGGASQEEFYKFIKPILEKMDGTEELLVKLNREDLLRKQRTFDNGSIPHQIHLGELHAILRRQEDFYPFLKDNREKIEKILTFRIPYYVGPLARGNSRFAWMTRKSEETITPWNFEEVVDKGASAQSFIERMTNFDKNLPNEKVLPKHSLLYEYFTVYNELTKVKYVTEGMRKPAFLSGEQKKAIVDLLFKTNRKVTVKQLKEDYFKKIECFDSVEISGVEDRFNASLGTYHDLLKIIKDKDFLDNEENEDILEDIVLTLTLFEDREMIEERLKTYAHLFDDKVMKQLKRRRYTGWGRLSRKLINGIRDKQSGKTILDFLKSDGFANRNFMQLIHDDSLTFKEDIQKAQVSGQGDSLHEHIANLAGSPAIKKGILQTVKVVDELVKVMGRHKPENIVIEMARENQTTQKGQKNSRERMKRIEEGIKELGSQILKEHPVENTQLQNEKLYLYYLQNGRDMYVDQELDINRLSDYDVDHIVPQSFLKDDSIDNKVLTRSDKARGKSDNVPSEEVVKKMKNYWRQLLNAKLITQRKFDNLTKAERGGLSELDKAGFIKRQLVETRQITKHVAQILDSRMNTKYDENDKLIREVKVITLKSKLVSDFRKDFQFYKVREINNYHHAHDAYLNAVVGTALIKKYPKLESEFVYGDYKVYDVRKMIAKSEQEIGKATAKYFFYSNIMNFFKTEITLANGEIRKRPLIETNGETGEIVWDKGRDFATVRKVLSMPQVNIVKKTEVQTGGFSKESILPKRNSDKLIARKKDWDPKKYGGFDSPTVAYSVLVVAKVEKGKSKKLKSVKELLGITIMERSSFEKNPIDFLEAKGYKEVKKDLIIKLPKYSLFELENGRKRMLASAGELQKGNELALPSKYVNFLYLASHYEKLKGSPEDNEQKQLFVEQHKHYLDEIIEQISEFSKRVILADANLDKVLSAYNKHRDKPIREQAENIIHLFTLTNLGAPAAFKYFDTTIDRKRYTSTKEVLDATLIHQSITGLYETRIDLSQLGGDGGEAAAKEAAAKEAAAKEAAAKEAAAKEAAAKGGTLNIEDEYRLHEISTEPDVSPGSTWLSDFPQAWAETGGMGLAVRQAPLIIPLKATSTPVSIKQYPMSQEAKLGIKPHIQRLLDQGILVPCQSPWNTPLLPVKKPGTNDYRPVQGLREVNKRVEDIHPTVPNPYNLLSGLPTSHRWYTVLDLKDAFFCLRLHPTSQPLFASEWRDPGMGISGQLTWTRLPQGFKNSPTLFNEALHRGLADFRIQHPDLILLQYVDDLLLAATSELDCQQGTRALLKTLGNLGYRASAKKAQICQKQVKYLGYLLREGQRWLTEARKETVMGQPTPKTPRQLREFLGKAGFCRLFIPRFAEMAAPLYPLTKPGTLFNWGPDQQKAYHEIKQALLTAPALGLPDLTKPFELFVDEKQGYAKGVLTQKLGPWRRPVAYLSKKLDPVAAGWPPCLRMVAAIAVLTKDAGKLTMGQPLVILAPHAVEALVKQPPDRWLSNARMTHYQAMLLDTDRVQFGPVVALNPATLLPLPEEGAPHDCLEILAETHGTEPDLTDQPIPDADHTWYTDGSSFLQEGQRKAGAAVTTETEVIWARALPAGTSAQRAELIALTQALKMAEGKRLNVYTDSRYAFATAHIHGEIYKRRGWLTSEGREIKNKSEILALLKALFLPKRLSIIHCLGHQKGDSAEARGNRLADQAAREAAIKTPPDTSTLLAGKRTADGSEFEKRTADGSEFESPKKKAKVE

SEQ ID NO: 6462 - protein, 2195 aa, synthetic construct
MPAAKRVKLDGGDKKYSIGLDIGTNSVGWAVITDEYKVPSKKFKVLGNTDRHSIKKNLIGALLFDSGETAEATRLKRTARRRYTRRKNRICYLQEIFSNEMAKVDDSFFHRLEESFLVEEDKKHERHPIFGNIVDEVAYHEKYPTIYHLRKKLVDSTDKADLRLIYLALAHMIKFRGHFLIEGDLNPDNSDVDKLFIQLVQTYNQLFEENPINASGVDAKAILSARLSKSRRLENLIAQLPGEKKNGLFGNLIALSLGLTPNFKSNFDLAEDAKLQLSKDTYDDDLDNLLAQIGDQYADLFLAAKNLSDAILLSDILRVNTEITKAPLSASMIKRYDEHHQDLTLLKALVRQQLPEKYKEIFFDQSKNGYAGYIDGGASQEEFYKFIKPILEKMDGTEELLVKLNREDLLRKQRTFDNGSIPHQIHLGELHAILRRQEDFYPFLKDNREKIEKILTFRIPYYVGPLARGNSRFAWMTRKSEETITPWNFEEVVDKGASAQSFIERMTNFDKNLPNEKVLPKHSLLYEYFTVYNELTKVKYVTEGMRKPAFLSGEQKKAIVDLLFKTNRKVTVKQLKEDYFKKIECFDSVEISGVEDRFNASLGTYHDLLKIIKDKDFLDNEENEDILEDIVLTLTLFEDREMIEERLKTYAHLFDDKVMKQLKRRRYTGWGRLSRKLINGIRDKQSGKTILDFLKSDGFANRNFMQLIHDDSLTFKEDIQKAQVSGQGDSLHEHIANLAGSPAIKKGILQTVKVVDELVKVMGRHKPENIVIEMARENQTTQKGQKNSRERMKRIEEGIKELGSQILKEHPVENTQLQNEKLYLYYLQNGRDMYVDQELDINRLSDYDVDHIVPQSFLKDDSIDNKVLTRSDKARGKSDNVPSEEVVKKMKNYWRQLLNAKLITQRKFDNLTKAERGGLSELDKAGFIKRQLVETRQITKHVAQILDSRMNTKYDENDKLIREVKVITLKSKLVSDFRKDFQFYKVREINNYHHAHDAYLNAVVGTALIKKYPKLESEFVYGDYKVYDVRKMIAKSEQEIGKATAKYFFYSNIMNFFKTEITLANGEIRKRPLIETNGETGEIVWDKGRDFATVRKVLSMPQVNIVKKTEVQTGGFSKESILPKRNSDKLIARKKDWDPKKYGGFDSPTVAYSVLVVAKVEKGKSKKLKSVKELLGITIMERSSFEKNPIDFLEAKGYKEVKKDLIIKLPKYSLFELENGRKRMLASAGELQKGNELALPSKYVNFLYLASHYEKLKGSPEDNEQKQLFVEQHKHYLDEIIEQISEFSKRVILADANLDKVLSAYNKHRDKPIREQAENIIHLFTLTNLGAPAAFKYFDTTIDRKRYTSTKEVLDATLIHQSITGLYETRIDLSQLGGDGGEAAAKEAAAKEAAAKEAAAKEAAAKEAAAKGGMDPLQLLQPLEAEIKGTKLKAHWNSGATITCVPEAFLEDERPIQTMLIKTIHGEKQQDVYYLTFKVQGRKVEAEVLASPYDYILLNPSDVPWLMKKPLQLTVLVPLHEYQERLLQQTALPKEQKELLQKLFLKYDALWQHWENQVGHRRIKPHNIATGTLAPRPQKQYPINPKAKPSIQIVIDDLLKQGVLIQQNSTMNTPVYPVPKPDGKWRMVLDYREVNKTIPLIAAQNQHSAGILSSIYRGKYKTTLDLTNGFWAHPITPESYWLTAFTWQGKQYCWTRLPQGFLNSPALFTADVVDLLKEIPNVQAYVDDIYISHDDPQEHLEQLEKIFSILLNAGYVVSLKKSEIAQREVEFLGFNITKEGRGLTDTFKQKLLNITPPKDLKQLQSILGLLNFARNFIPNYSELVKPLYTIVANANGKFISWTEDNSNQLQHIISVLNQADNLEERNPETRLIIKVNSSPSAGYIRYYNEGSKRPIMYVNYIFSKAEAKFTQTEKLLTTMHKGLIKAMDLAMGQEILVYSPIVSMTKIQRTPLPERKALPVRWITWMTYLEDPRIQFHYDKSLPELQQIPNVTEDVIAKTKHPSEFAMVFYTDGSAIKHPDVNKSHSAGMGIAQVQFIPEYKIVHQWSIPLGDHTAQLAEIAAVEFACKKALKISGPVLIVTDSFYVAESANKELPYWKSNGFLNNKKKPLRHVSKWKSIAECLQLKPDIIIMHEKGHQQPMTTLHTEGNNLADKLATQGSYVVHAGKRTADGSEFEKRTADGSEFESPKKKAKVE

SEQ ID NO: 6463 - protein, 2106 aa, synthetic construct
MPAAKRVKLDGGDKKYSIGLDIGTNSVGWAVITDEYKVPSKKFKVLGNTDRHSIKKNLIGALLFDSGETAEATRLKRTARRRYTRRKNRICYLQEIFSNEMAKVDDSFFHRLEESFLVEEDKKHERHPIFGNIVDEVAYHEKYPTIYHLRKKLVDSTDKADLRLIYLALAHMIKFRGHFLIEGDLNPDNSDVDKLFIQLVQTYNQLFEENPINASGVDAKAILSARLSKSRRLENLIAQLPGEKKNGLFGNLIALSLGLTPNFKSNFDLAEDAKLQLSKDTYDDDLDNLLAQIGDQYADLFLAAKNLSDAILLSDILRVNTEITKAPLSASMIKRYDEHHQDLTLLKALVRQQLPEKYKEIFFDQSKNGYAGYIDGGASQEEFYKFIKPILEKMDGTEELLVKLNREDLLRKQRTFDNGSIPHQIHLGELHAILRRQEDFYPFLKDNREKIEKILTFRIPYYVGPLARGNSRFAWMTRKSEETITPWNFEEVVDKGASAQSFIERMTNFDKNLPNEKVLPKHSLLYEYFTVYNELTKVKYVTEGMRKPAFLSGEQKKAIVDLLFKTNRKVTVKQLKEDYFKKIECFDSVEISGVEDRFNASLGTYHDLLKIIKDKDFLDNEENEDILEDIVLTLTLFEDREMIEERLKTYAHLFDDKVMKQLKRRRYTGWGRLSRKLINGIRDKQSGKTILDFLKSDGFANRNFMQLIHDDSLTFKEDIQKAQVSGQGDSLHEHIANLAGSPAIKKGILQTVKVVDELVKVMGRHKPENIVIEMARENQTTQKGQKNSRERMKRIEEGIKELGSQILKEHPVENTQLQNEKLYLYYLQNGRDMYVDQELDINRLSDYDVDHIVPQSFLKDDSIDNKVLTRSDKARGKSDNVPSEEVVKKMKNYWRQLLNAKLITQRKFDNLTKAERGGLSELDKAGFIKRQLVETRQITKHVAQILDSRMNTKYDENDKLIREVKVITLKSKLVSDFRKDFQFYKVREINNYHHAHDAYLNAVVGTALIKKYPKLESEFVYGDYKVYDVRKMIAKSEQEIGKATAKYFFYSNIMNFFKTEITLANGEIRKRPLIETNGETGEIVWDKGRDFATVRKVLSMPQVNIVKKTEVQTGGFSKESILPKRNSDKLIARKKDWDPKKYGGFDSPTVAYSVLVVAKVEKGKSKKLKSVKELLGITIMERSSFEKNPIDFLEAKGYKEVKKDLIIKLPKYSLFELENGRKRMLASAGELQKGNELALPSKYVNFLYLASHYEKLKGSPEDNEQKQLFVEQHKHYLDEIIEQISEFSKRVILADANLDKVLSAYNKHRDKPIREQAENIIHLFTLTNLGAPAAFKYFDTTIDRKRYTSTKEVLDATLIHQSITGLYETRIDLSQLGGDGGEAAAKEAAAKEAAAKEAAAKEAAAKEAAAKGGVPWLMKKPLQLTVLVPLHEYQERLLQQTALPKEQKELLQKLFLKYDALWQHWENQVGHRRIKPHNIATGTLAPRPQKQYPINPKAKPSIQIVIDDLLKQGVLIQQNSTMNTPVYPVPKPDGKWRMVLDYREVNKTIPLIAAQNQHSAGILSSIYRGKYKTTLDLTNGFWAHPITPESYWLTAFTWQGKQYCWTRLPQGFLNSPALFTADVVDLLKEIPNVQAYVDDIYISHDDPQEHLEQLEKIFSILLNAGYVVSLKKSEIAQREVEFLGFNITKEGRGLTDTFKQKLLNITPPKDLKQLQSILGLLNFARNFIPNYSELVKPLYTIVANANGKFISWTEDNSNQLQHIISVLNQADNLEERNPETRLIIKVNSSPSAGYIRYYNEGSKRPIMYVNYIFSKAEAKFTQTEKLLTTMHKGLIKAMDLAMGQEILVYSPIVSMTKIQRTPLPERKALPVRWITWMTYLEDPRIQFHYDKSLPELQQIPNVTEDVIAKTKHPSEFAMVFYTDGSAIKHPDVNKSHSAGMGIAQVQFIPEYKIVHQWSIPLGDHTAQLAEIAAVEFACKKALKISGPVLIVTDSFYVAESANKELPYWKSNGFLNNKKKPLRHVSKWKSIAECLQLKPDIIIMHEKGHQQPMTTLHTEGNNLADKLATQGSYVVHAGKRTADGSEFEKRTADGSEFESPKKKAKVE

SEQ ID NO: 6464 - protein, 2106 aa, synthetic construct
MPAAKRVKLDGGDKKYSIGLDIGTNSVGWAVITDEYKVPSKKFKVLGNTDRHSIKKNLIGALLFDSGETAEATRLKRTARRRYTRRKNRICYLQEIFSNEMAKVDDSFFHRLEESFLVEEDKKHERHPIFGNIVDEVAYHEKYPTIYHLRKKLVDSTDKADLRLIYLALAHMIKFRGHFLIEGDLNPDNSDVDKLFIQLVQTYNQLFEENPINASGVDAKAILSARLSKSRRLENLIAQLPGEKKNGLFGNLIALSLGLTPNFKSNFDLAEDAKLQLSKDTYDDDLDNLLAQIGDQYADLFLAAKNLSDAILLSDILRVNTEITKAPLSASMIKRYDEHHQDLTLLKALVRQQLPEKYKEIFFDQSKNGYAGYIDGGASQEEFYKFIKPILEKMDGTEELLVKLNREDLLRKQRTFDNGSIPHQIHLGELHAILRRQEDFYPFLKDNREKIEKILTFRIPYYVGPLARGNSRFAWMTRKSEETITPWNFEEVVDKGASAQSFIERMTNFDKNLPNEKVLPKHSLLYEYFTVYNELTKVKYVTEGMRKPAFLSGEQKKAIVDLLFKTNRKVTVKQLKEDYFKKIECFDSVEISGVEDRFNASLGTYHDLLKIIKDKDFLDNEENEDILEDIVLTLTLFEDREMIEERLKTYAHLFDDKVMKQLKRRRYTGWGRLSRKLINGIRDKQSGKTILDFLKSDGFANRNFMQLIHDDSLTFKEDIQKAQVSGQGDSLHEHIANLAGSPAIKKGILQTVKVVDELVKVMGRHKPENIVIEMARENQTTQKGQKNSRERMKRIEEGIKELGSQILKEHPVENTQLQNEKLYLYYLQNGRDMYVDQELDINRLSDYDVDHIVPQSFLKDDSIDNKVLTRSDKARGKSDNVPSEEVVKKMKNYWRQLLNAKLITQRKFDNLTKAERGGLSELDKAGFIKRQLVETRQITKHVAQILDSRMNTKYDENDKLIREVKVITLKSKLVSDFRKDFQFYKVREINNYHHAHDAYLNAVVGTALIKKYPKLESEFVYGDYKVYDVRKMIAKSEQEIGKATAKYFFYSNIMNFFKTEITLANGEIRKRPLIETNGETGEIVWDKGRDFATVRKVLSMPQVNIVKKTEVQTGGFSKESILPKRNSDKLIARKKDWDPKKYGGFDSPTVAYSVLVVAKVEKGKSKKLKSVKELLGITIMERSSFEKNPIDFLEAKGYKEVKKDLIIKLPKYSLFELENGRKRMLASAGELQKGNELALPSKYVNFLYLASHYEKLKGSPEDNEQKQLFVEQHKHYLDEIIEQISEFSKRVILADANLDKVLSAYNKHRDKPIREQAENIIHLFTLTNLGAPAAFKYFDTTIDRKRYTSTKEVLDATLIHQSITGLYETRIDLSQLGGDGGEAAAKEAAAKEAAAKEAAAKEAAAKEAAAKGGVPWLMKKPLQLTVLVPLHEYQERLLQQTALPKEQKELLQKLFLKYDALWQHWENQVGHRRIKPHNIATGTLAPRPQKQYPINPKAKPSIQIVIDDLLKQGVLIQQNSTMNTPVYPVPKPDGKWRMVLDYREVNKTIPLIAAQNQHSAGILSSIYRGKYKTTLDLTNGFWAHPITPESYWLTAFTWQGKQYCWTRLPQGFLNSPALFNADVVDLLKEIPNVQAYVDDIYISHDDPQEHLEQLEKIFSILLNAGYVVSLKKSEIAQREVEFLGFNITKEGRGLTDTFKQKLLNITPPKDLKQLQSILGKLNFARNFIPNYSELVKPLYTIVAPANGKFISWTEDNSNQLQHIISVLNQADNLEERNPETRLIIKVNSSPSAGYIRYYNEGSKRPIMYVNYIFSKAEAKFTQTEKLLTTMHKGLIKAMDLAMGQEILVYSPIVSMTKIQRTPLPERKALPVRWITWMTYLEDPRIQFHYDKSLPELQQIPNVTEDVIAKTKHPSEFAMVFYTDGSAIKHPDVNKSHSAGMGIAQVQFIPEYKIVHQWSIPLGDHTAQLAEIAAVEFACKKALKISGPVLIVTDSFYVAESANKELPYWKSNGFLNNKKKPLRHVSKWKSIAECLQLKPDIIIMHEKGHQQPMTTLHTEGNNLADKLATQGSYVVHAGKRTADGSEFEKRTADGSEFESPKKKAKVE

SEQ ID NO: 6465 - protein, 2195 aa, synthetic construct
MPAAKRVKLDGGDKKYSIGLDIGTNSVGWAVITDEYKVPSKKFKVLGNTDRHSIKKNLIGALLFDSGETAEATRLKRTARRRYTRRKNRICYLQEIFSNEMAKVDDSFFHRLEESFLVEEDKKHERHPIFGNIVDEVAYHEKYPTIYHLRKKLVDSTDKADLRLIYLALAHMIKFRGHFLIEGDLNPDNSDVDKLFIQLVQTYNQLFEENPINASGVDAKAILSARLSKSRRLENLIAQLPGEKKNGLFGNLIALSLGLTPNFKSNFDLAEDAKLQLSKDTYDDDLDNLLAQIGDQYADLFLAAKNLSDAILLSDILRVNTEITKAPLSASMIKRYDEHHQDLTLLKALVRQQLPEKYKEIFFDQSKNGYAGYIDGGASQEEFYKFIKPILEKMDGTEELLVKLNREDLLRKQRTFDNGSIPHQIHLGELHAILRRQEDFYPFLKDNREKIEKILTFRIPYYVGPLARGNSRFAWMTRKSEETITPWNFEEVVDKGASAQSFIERMTNFDKNLPNEKVLPKHSLLYEYFTVYNELTKVKYVTEGMRKPAFLSGEQKKAIVDLLFKTNRKVTVKQLKEDYFKKIECFDSVEISGVEDRFNASLGTYHDLLKIIKDKDFLDNEENEDILEDIVLTLTLFEDREMIEERLKTYAHLFDDKVMKQLKRRRYTGWGRLSRKLINGIRDKQSGKTILDFLKSDGFANRNFMQLIHDDSLTFKEDIQKAQVSGQGDSLHEHIANLAGSPAIKKGILQTVKVVDELVKVMGRHKPENIVIEMARENQTTQKGQKNSRERMKRIEEGIKELGSQILKEHPVENTQLQNEKLYLYYLQNGRDMYVDQELDINRLSDYDVDHIVPQSFLKDDSIDNKVLTRSDKARGKSDNVPSEEVVKKMKNYWRQLLNAKLITQRKFDNLTKAERGGLSELDKAGFIKRQLVETRQITKHVAQILDSRMNTKYDENDKLIREVKVITLKSKLVSDFRKDFQFYKVREINNYHHAHDAYLNAVVGTALIKKYPKLESEFVYGDYKVYDVRKMIAKSEQEIGKATAKYFFYSNIMNFFKTEITLANGEIRKRPLIETNGETGEIVWDKGRDFATVRKVLSMPQVNIVKKTEVQTGGFSKESILPKRNSDKLIARKKDWDPKKYGGFDSPTVAYSVLVVAKVEKGKSKKLKSVKELLGITIMERSSFEKNPIDFLEAKGYKEVKKDLIIKLPKYSLFELENGRKRMLASAGELQKGNELALPSKYVNFLYLASHYEKLKGSPEDNEQKQLFVEQHKHYLDEIIEQISEFSKRVILADANLDKVLSAYNKHRDKPIREQAENIIHLFTLTNLGAPAAFKYFDTTIDRKRYTSTKEVLDATLIHQSITGLYETRIDLSQLGGDGGEAAAKEAAAKEAAAKEAAAKEAAAKEAAAKGGMDPLQLLQPLEAEIKGTKLKAHWNSGATITCVPQAFLEEEVPIKNIWIKTIHGEKEQPVYYLTFKIQGRKVEAEVISSPYDYILVSPSDIPWLMKKPLQLTTLVPLQEYEERLLKQTMLTGSYKEKLQSLFLKYDALWQHWENQVGHRRIKPHHIATGTVNPRPQKQYPINPKAKASIQTVINDLLKQGVLIQQNSIMNTPVYPVPKPDGKWRMVLDYREVNKTIPLIAAQNQHSAGILSSIFRGKYKTTLDLSNGFWAHSITPESYWLTAFTWLGQQYCWTRLPQGFLNSPALFTADVVDLLKEVPNVQVYVDDIYISHDDPREHLEQLEKVFSLLLNAGYVVSLKKSEIAQHEVEFLGFNITKEGRGLTETFKQKLLNITPPRDLKQLQSILGLLNFARNFIPNFSELVKPLYNIIATANGKYITWTTDNSQQLQNIISMLNSAENLEERNPEVRLIMKVNTSPSAGYIRFYNEFAKRPIMYLNYVYTKAEVKFTNTEKLLTTIHKGLIKALDLGMGQEILVYSPIVSMTKIQKTPLPERKALPIRWITWMSYLEDPRIQFHYDKTLPELQQVPTVTDDIIAKIKHPSEFSMVFYTDGSAIKHPNVNKSHNAGMGIAQVQFKPEFTVINTWSIPLGDHTAQLAEVAAVEFACKKALKIDGPVLIVTDSFYVAESVNKELPYWQSNGFFNNKKKPLKHVSKWKSIADCIQLKPDIIIIHEKGHQPTASTFHTEGNNLADKLATQGSYVVNAGKRTADGSEFEKRTADGSEFESPKKKAKVE

SEQ ID NO: 6466 - protein, 2106 aa, synthetic construct
MPAAKRVKLDGGDKKYSIGLDIGTNSVGWAVITDEYKVPSKKFKVLGNTDRHSIKKNLIGALLFDSGETAEATRLKRTARRRYTRRKNRICYLQEIFSNEMAKVDDSFFHRLEESFLVEEDKKHERHPIFGNIVDEVAYHEKYPTIYHLRKKLVDSTDKADLRLIYLALAHMIKFRGHFLIEGDLNPDNSDVDKLFIQLVQTYNQLFEENPINASGVDAKAILSARLSKSRRLENLIAQLPGEKKNGLFGNLIALSLGLTPNFKSNFDLAEDAKLQLSKDTYDDDLDNLLAQIGDQYADLFLAAKNLSDAILLSDILRVNTEITKAPLSASMIKRYDEHHQDLTLLKALVRQQLPEKYKEIFFDQSKNGYAGYIDGGASQEEFYKFIKPILEKMDGTEELLVKLNREDLLRKQRTFDNGSIPHQIHLGELHAILRRQEDFYPFLKDNREKIEKILTFRIPYYVGPLARGNSRFAWMTRKSEETITPWNFEEVVDKGASAQSFIERMTNFDKNLPNEKVLPKHSLLYEYFTVYNELTKVKYVTEGMRKPAFLSGEQKKAIVDLLFKTNRKVTVKQLKEDYFKKIECFDSVEISGVEDRFNASLGTYHDLLKIIKDKDFLDNEENEDILEDIVLTLTLFEDREMIEERLKTYAHLFDDKVMKQLKRRRYTGWGRLSRKLINGIRDKQSGKTILDFLKSDGFANRNFMQLIHDDSLTFKEDIQKAQVSGQGDSLHEHIANLAGSPAIKKGILQTVKVVDELVKVMGRHKPENIVIEMARENQTTQKGQKNSRERMKRIEEGIKELGSQILKEHPVENTQLQNEKLYLYYLQNGRDMYVDQELDINRLSDYDVDHIVPQSFLKDDSIDNKVLTRSDKARGKSDNVPSEEVVKKMKNYWRQLLNAKLITQRKFDNLTKAERGGLSELDKAGFIKRQLVETRQITKHVAQILDSRMNTKYDENDKLIREVKVITLKSKLVSDFRKDFQFYKVREINNYHHAHDAYLNAVVGTALIKKYPKLESEFVYGDYKVYDVRKMIAKSEQEIGKATAKYFFYSNIMNFFKTEITLANGEIRKRPLIETNGETGEIVWDKGRDFATVRKVLSMPQVNIVKKTEVQTGGFSKESILPKRNSDKLIARKKDWDPKKYGGFDSPTVAYSVLVVAKVEKGKSKKLKSVKELLGITIMERSSFEKNPIDFLEAKGYKEVKKDLIIKLPKYSLFELENGRKRMLASAGELQKGNELALPSKYVNFLYLASHYEKLKGSPEDNEQKQLFVEQHKHYLDEIIEQISEFSKRVILADANLDKVLSAYNKHRDKPIREQAENIIHLFTLTNLGAPAAFKYFDTTIDRKRYTSTKEVLDATLIHQSITGLYETRIDLSQLGGDGGEAAAKEAAAKEAAAKEAAAKEAAAKEAAAKGGIPWLMKKPLQLTTLVPLQEYEERLLKQTMLTGSYKEKLQSLFLKYDALWQHWENQVGHRRIKPHHIATGTVNPRPQKQYPINPKAKASIQTVINDLLKQGVLIQQNSIMNTPVYPVPKPDGKWRMVLDYREVNKTIPLIAAQNQHSAGILSSIFRGKYKTTLDLSNGFWAHSITPESYWLTAFTWLGQQYCWTRLPQGFLNSPALFNADVVDLLKEVPNVQVYVDDIYISHDDPREHLEQLEKVFSLLLNAGYVVSLKKSEIAQHEVEFLGFNITKEGRGLTETFKQKLLNITPPRDLKQLQSILGLLNFARNFIPNFSELVKPLYNIIATAPGKYITWTTDNSQQLQNIISMLNSAENLEERNPEVRLIMKVNTSPSAGYIRFYNEFAKRPIMYLNYVYTKAEVKFTNTEKLLTTIHKGLIKALDLGMGQEILVYSPIVSMTKIQKTPLPERKALPIRWITWMSYLEDPRIQFHYDKTLPELQQVPTVTDDIIAKIKHPSEFSMVFYTDGSAIKHPNVNKSHNAGMGIAQVQFKPEFTVINTWSIPLGDHTAQLAEVAAVEFACKKALKIDGPVLIVTDSFYVAESVNKELPYWQSNGFFNNKKKPLKHVSKWKSIADCIQLKPDIIIIHEKGHQPTASTFHTEGNNLADKLATQGSYVVNAGKRTADGSEFEKRTADGSEFESPKKKAKVE

SEQ ID NO: 6467 - protein, 2113 aa, synthetic construct
MPAAKRVKLDGGDKKYSIGLDIGTNSVGWAVITDEYKVPSKKFKVLGNTDRHSIKKNLIGALLFDSGETAEATRLKRTARRRYTRRKNRICYLQEIFSNEMAKVDDSFFHRLEESFLVEEDKKHERHPIFGNIVDEVAYHEKYPTIYHLRKKLVDSTDKADLRLIYLALAHMIKFRGHFLIEGDLNPDNSDVDKLFIQLVQTYNQLFEENPINASGVDAKAILSARLSKSRRLENLIAQLPGEKKNGLFGNLIALSLGLTPNFKSNFDLAEDAKLQLSKDTYDDDLDNLLAQIGDQYADLFLAAKNLSDAILLSDILRVNTEITKAPLSASMIKRYDEHHQDLTLLKALVRQQLPEKYKEIFFDQSKNGYAGYIDGGASQEEFYKFIKPILEKMDGTEELLVKLNREDLLRKQRTFDNGSIPHQIHLGELHAILRRQEDFYPFLKDNREKIEKILTFRIPYYVGPLARGNSRFAWMTRKSEETITPWNFEEVVDKGASAQSFIERMTNFDKNLPNEKVLPKHSLLYEYFTVYNELTKVKYVTEGMRKPAFLSGEQKKAIVDLLFKTNRKVTVKQLKEDYFKKIECFDSVEISGVEDRFNASLGTYHDLLKIIKDKDFLDNEENEDILEDIVLTLTLFEDREMIEERLKTYAHLFDDKVMKQLKRRRYTGWGRLSRKLINGIRDKQSGKTILDFLKSDGFANRNFMQLIHDDSLTFKEDIQKAQVSGQGDSLHEHIANLAGSPAIKKGILQTVKVVDELVKVMGRHKPENIVIEMARENQTTQKGQKNSRERMKRIEEGIKELGSQILKEHPVENTQLQNEKLYLYYLQNGRDMYVDQELDINRLSDYDVDHIVPQSFLKDDSIDNKVLTRSDKARGKSDNVPSEEVVKKMKNYWRQLLNAKLITQRKFDNLTKAERGGLSELDKAGFIKRQLVETRQITKHVAQILDSRMNTKYDENDKLIREVKVITLKSKLVSDFRKDFQFYKVREINNYHHAHDAYLNAVVGTALIKKYPKLESEFVYGDYKVYDVRKMIAKSEQEIGKATAKYFFYSNIMNFFKTEITLANGEIRKRPLIETNGETGEIVWDKGRDFATVRKVLSMPQVNIVKKTEVQTGGFSKESILPKRNSDKLIARKKDWDPKKYGGFDSPTVAYSVLVVAKVEKGKSKKLKSVKELLGITIMERSSFEKNPIDFLEAKGYKEVKKDLIIKLPKYSLFELENGRKRMLASAGELQKGNELALPSKYVNFLYLASHYEKLKGSPEDNEQKQLFVEQHKHYLDEIIEQISEFSKRVILADANLDKVLSAYNKHRDKPIREQAENIIHLFTLTNLGAPAAFKYFDTTIDRKRYTSTKEVLDATLIHQSITGLYETRIDLSQLGGDGGEAAAKEAAAKEAAAKEAAAKEAAAKEAAAKGGVLNLEEEYRLHEKPVPSSIDPSWLQLFPTVWAERAGMGLANQVPPVVVELRSGASPVAVRQYPMSKEAREGIRPHIQRFLDLGVLVPCQSPWNTPLLPVKKPGTNDYRPVQDLREINKRVQDIHPTVPNPYNLLSSLPPSHTWYSVLDLKDAFFCLKLHPNSQPLFAFEWRDPEKGNTGQLTWTRLPQGFKNSPTLFDEALHRDLAPFRALNPQVVLLQYVDDLLVAAPTYRDCKEGTQKLLQELSKLGYRVSAKKAQLCQKEVTYLGYLLKEGKRWLTPARKATVMKIPPPTTPRQVREFLGTAGFCRLWIPGFASLAAPLYPLTKESIPFIWTEEHQKAFDRIKEALLSAPALALPDLTKPFTLYVDERAGVARGVLTQTLGPWRRPVAYLSKKLDPVASGWPTCLKAVAAVALLLKDADKLTLGQNVTVIASHSLESIVRQPPDRWMTNARMTHYQSLLLNERVSFAPPAVLNPATLLPVESEATPVHRCSEILAEETGTRRDLKDQPLPGVPAWYTDGSSFIAEGKRRAGAAIVDGKRTVWASSLPEGTSAQKAELVALTQALRLAEGKDINIYTDSRYAFATAHIHGAIYKQRGLLTSAGKDIKNKEEILALLEAIHLPKRVAIIHCPGHQKGNDPVATGNRRADEAAKQAALSTRVLAETTKPAGKRTADGSEFEKRTADGSEFESPKKKAKVE

SEQ ID NO: 6468 - protein, 2113 aa, synthetic construct
MPAAKRVKLDGGDKKYSIGLDIGTNSVGWAVITDEYKVPSKKFKVLGNTDRHSIKKNLIGALLFDSGETAEATRLKRTARRRYTRRKNRICYLQEIFSNEMAKVDDSFFHRLEESFLVEEDKKHERHPIFGNIVDEVAYHEKYPTIYHLRKKLVDSTDKADLRLIYLALAHMIKFRGHFLIEGDLNPDNSDVDKLFIQLVQTYNQLFEENPINASGVDAKAILSARLSKSRRLENLIAQLPGEKKNGLFGNLIALSLGLTPNFKSNFDLAEDAKLQLSKDTYDDDLDNLLAQIGDQYADLFLAAKNLSDAILLSDILRVNTEITKAPLSASMIKRYDEHHQDLTLLKALVRQQLPEKYKEIFFDQSKNGYAGYIDGGASQEEFYKFIKPILEKMDGTEELLVKLNREDLLRKQRTFDNGSIPHQIHLGELHAILRRQEDFYPFLKDNREKIEKILTFRIPYYVGPLARGNSRFAWMTRKSEETITPWNFEEVVDKGASAQSFIERMTNFDKNLPNEKVLPKHSLLYEYFTVYNELTKVKYVTEGMRKPAFLSGEQKKAIVDLLFKTNRKVTVKQLKEDYFKKIECFDSVEISGVEDRFNASLGTYHDLLKIIKDKDFLDNEENEDILEDIVLTLTLFEDREMIEERLKTYAHLFDDKVMKQLKRRRYTGWGRLSRKLINGIRDKQSGKTILDFLKSDGFANRNFMQLIHDDSLTFKEDIQKAQVSGQGDSLHEHIANLAGSPAIKKGILQTVKVVDELVKVMGRHKPENIVIEMARENQTTQKGQKNSRERMKRIEEGIKELGSQILKEHPVENTQLQNEKLYLYYLQNGRDMYVDQELDINRLSDYDVDHIVPQSFLKDDSIDNKVLTRSDKARGKSDNVPSEEVVKKMKNYWRQLLNAKLITQRKFDNLTKAERGGLSELDKAGFIKRQLVETRQITKHVAQILDSRMNTKYDENDKLIREVKVITLKSKLVSDFRKDFQFYKVREINNYHHAHDAYLNAVVGTALIKKYPKLESEFVYGDYKVYDVRKMIAKSEQEIGKATAKYFFYSNIMNFFKTEITLANGEIRKRPLIETNGETGEIVWDKGRDFATVRKVLSMPQVNIVKKTEVQTGGFSKESILPKRNSDKLIARKKDWDPKKYGGFDSPTVAYSVLVVAKVEKGKSKKLKSVKELLGITIMERSSFEKNPIDFLEAKGYKEVKKDLIIKLPKYSLFELENGRKRMLASAGELQKGNELALPSKYVNFLYLASHYEKLKGSPEDNEQKQLFVEQHKHYLDEIIEQISEFSKRVILADANLDKVLSAYNKHRDKPIREQAENIIHLFTLTNLGAPAAFKYFDTTIDRKRYTSTKEVLDATLIHQSITGLYETRIDLSQLGGDGGEAAAKEAAAKEAAAKEAAAKEAAAKEAAAKGGVLNLEEEYRLHEKPVPSSIDPSWLQLFPTVWAERAGMGLANQVPPVVVELRSGASPVAVRQYPMSKEAREGIRPHIQRFLDLGVLVPCQSPWNTPLLPVKKPGTNDYRPVQDLREINKRVQDIHPTVPNPYNLLSSLPPSHTWYSVLDLKDAFFCLKLHPNSQPLFAFEWRDPEKGNTGQLTWTRLPQGFKNSPTLFNEALHRDLAPFRALNPQVVLLQYVDDLLVAAPTYRDCKEGTQKLLQELSKLGYRVSAKKAQLCQKEVTYLGYLLKEGKRWLTPARKATVMKIPPPTTPRQVREFLGTAGFCRLWIPGFASLAAPLYPLTKPSIPFIWTEEHQKAFDRIKEALLSAPALALPDLTKPFTLYVDERAGVARGVLTQTLGPWRRPVAYLSKKLDPVASGWPTCLKAVAAVALLLKDADKLTLGQNVTVIASHSLESIVRQPPDRWMTNARMTHYQSLLLNERVSFAPPAVLNPATLLPVESEATPVHRCSEILAEETGTRRDLKDQPLPGVPAWYTDGSSFIAEGKRRAGAAIVDGKRTVWASSLPEGTSAQKAELVALTQALRLAEGKDINIYTDSRYAFATAHIHGAIYKQRGWLTSAGKDIKNKEEILALLEAIHLPKRVAIIHCPGHQKGNDPVATGNRRADEAAKQAALSTRVLAETTKPAGKRTADGSEFEKRTADGSEFESPKKKAKVE

SEQ ID NO: 6469 - protein, 2115 aa, synthetic construct
MPAAKRVKLDGGDKKYSIGLDIGTNSVGWAVITDEYKVPSKKFKVLGNTDRHSIKKNLIGALLFDSGETAEATRLKRTARRRYTRRKNRICYLQEIFSNEMAKVDDSFFHRLEESFLVEEDKKHERHPIFGNIVDEVAYHEKYPTIYHLRKKLVDSTDKADLRLIYLALAHMIKFRGHFLIEGDLNPDNSDVDKLFIQLVQTYNQLFEENPINASGVDAKAILSARLSKSRRLENLIAQLPGEKKNGLFGNLIALSLGLTPNFKSNFDLAEDAKLQLSKDTYDDDLDNLLAQIGDQYADLFLAAKNLSDAILLSDILRVNTEITKAPLSASMIKRYDEHHQDLTLLKALVRQQLPEKYKEIFFDQSKNGYAGYIDGGASQEEFYKFIKPILEKMDGTEELLVKLNREDLLRKQRTFDNGSIPHQIHLGELHAILRRQEDFYPFLKDNREKIEKILTFRIPYYVGPLARGNSRFAWMTRKSEETITPWNFEEVVDKGASAQSFIERMTNFDKNLPNEKVLPKHSLLYEYFTVYNELTKVKYVTEGMRKPAFLSGEQKKAIVDLLFKTNRKVTVKQLKEDYFKKIECFDSVEISGVEDRFNASLGTYHDLLKIIKDKDFLDNEENEDILEDIVLTLTLFEDREMIEERLKTYAHLFDDKVMKQLKRRRYTGWGRLSRKLINGIRDKQSGKTILDFLKSDGFANRNFMQLIHDDSLTFKEDIQKAQVSGQGDSLHEHIANLAGSPAIKKGILQTVKVVDELVKVMGRHKPENIVIEMARENQTTQKGQKNSRERMKRIEEGIKELGSQILKEHPVENTQLQNEKLYLYYLQNGRDMYVDQELDINRLSDYDVDHIVPQSFLKDDSIDNKVLTRSDKARGKSDNVPSEEVVKKMKNYWRQLLNAKLITQRKFDNLTKAERGGLSELDKAGFIKRQLVETRQITKHVAQILDSRMNTKYDENDKLIREVKVITLKSKLVSDFRKDFQFYKVREINNYHHAHDAYLNAVVGTALIKKYPKLESEFVYGDYKVYDVRKMIAKSEQEIGKATAKYFFYSNIMNFFKTEITLANGEIRKRPLIETNGETGEIVWDKGRDFATVRKVLSMPQVNIVKKTEVQTGGFSKESILPKRNSDKLIARKKDWDPKKYGGFDSPTVAYSVLVVAKVEKGKSKKLKSVKELLGITIMERSSFEKNPIDFLEAKGYKEVKKDLIIKLPKYSLFELENGRKRMLASAGELQKGNELALPSKYVNFLYLASHYEKLKGSPEDNEQKQLFVEQHKHYLDEIIEQISEFSKRVILADANLDKVLSAYNKHRDKPIREQAENIIHLFTLTNLGAPAAFKYFDTTIDRKRYTSTKEVLDATLIHQSITGLYETRIDLSQLGGDGGEAAAKEAAAKEAAAKEAAAKEAAAKEAAAKGGTLNIEDEYRLHETSKEPDVPLGSTWLSDFPQAWAETGGMGLAVRQAPLIIPLKATSTPVSIKQYPMSQEARLGIKPHIQRLLDQGILVPCQSPWNTPLLPVKKPGTNDYRPVQDLREVNKRVEDIHPTVPNPYNLLSGLPPSHQWYTVLDLKDAFFCLRLHPTSQPLFAFEWRDPEMGISGQLTWTRLPQGFKNSPTLFDEALHRDLADFRIQHPDLILLQYVDDLLLAATSEQDCQRGTRALLQTLGNLGYRASAKKAQICQKQVKYLGYLLKEGQRWLTEARKETVMGQPTPKTPRQLREFLGTAGFCRLWIPGFAEMAAPLYPLTKTGTLFNWGPDQQKAYQEIKQALLTAPALGLPDLTKPFELFVDEKQGYAKGVLTQKLGPWRRPVAYLSKKLDPVAAGWPPCLRMVAAIAVLTKDAGKLTMGQPLVILAPHAVEALVKQPPDRWLSNARMTHYQAMLLDTDRVQFGPVVALNPATLLPLPEKEAPHDCLEILAETHGTRPDLTDQPIPDADYTWYTDGSSFLQEGQRRAGAAVTTETEVIWARALPAGTSAQRAELIALTQALKMAEGKKLNVYTDSRYAFATAHVHGEIYRRRGLLTSEGREIKNKNEILALLKALFLPKRLSIIHCPGHQKGNSAEARGNRMADQAAREAAMKAVLETSTLLAGKRTADGSEFEKRTADGSEFESPKKKAKVE

SEQ ID NO: 6470 - protein, 2115 aa, synthetic construct
MPAAKRVKLDGGDKKYSIGLDIGTNSVGWAVITDEYKVPSKKFKVLGNTDRHSIKKNLIGALLFDSGETAEATRLKRTARRRYTRRKNRICYLQEIFSNEMAKVDDSFFHRLEESFLVEEDKKHERHPIFGNIVDEVAYHEKYPTIYHLRKKLVDSTDKADLRLIYLALAHMIKFRGHFLIEGDLNPDNSDVDKLFIQLVQTYNQLFEENPINASGVDAKAILSARLSKSRRLENLIAQLPGEKKNGLFGNLIALSLGLTPNFKSNFDLAEDAKLQLSKDTYDDDLDNLLAQIGDQYADLFLAAKNLSDAILLSDILRVNTEITKAPLSASMIKRYDEHHQDLTLLKALVRQQLPEKYKEIFFDQSKNGYAGYIDGGASQEEFYKFIKPILEKMDGTEELLVKLNREDLLRKQRTFDNGSIPHQIHLGELHAILRRQEDFYPFLKDNREKIEKILTFRIPYYVGPLARGNSRFAWMTRKSEETITPWNFEEVVDKGASAQSFIERMTNFDKNLPNEKVLPKHSLLYEYFTVYNELTKVKYVTEGMRKPAFLSGEQKKAIVDLLFKTNRKVTVKQLKEDYFKKIECFDSVEISGVEDRFNASLGTYHDLLKIIKDKDFLDNEENEDILEDIVLTLTLFEDREMIEERLKTYAHLFDDKVMKQLKRRRYTGWGRLSRKLINGIRDKQSGKTILDFLKSDGFANRNFMQLIHDDSLTFKEDIQKAQVSGQGDSLHEHIANLAGSPAIKKGILQTVKVVDELVKVMGRHKPENIVIEMARENQTTQKGQKNSRERMKRIEEGIKELGSQILKEHPVENTQLQNEKLYLYYLQNGRDMYVDQELDINRLSDYDVDHIVPQSFLKDDSIDNKVLTRSDKARGKSDNVPSEEVVKKMKNYWRQLLNAKLITQRKFDNLTKAERGGLSELDKAGFIKRQLVETRQITKHVAQILDSRMNTKYDENDKLIREVKVITLKSKLVSDFRKDFQFYKVREINNYHHAHDAYLNAVVGTALIKKYPKLESEFVYGDYKVYDVRKMIAKSEQEIGKATAKYFFYSNIMNFFKTEITLANGEIRKRPLIETNGETGEIVWDKGRDFATVRKVLSMPQVNIVKKTEVQTGGFSKESILPKRNSDKLIARKKDWDPKKYGGFDSPTVAYSVLVVAKVEKGKSKKLKSVKELLGITIMERSSFEKNPIDFLEAKGYKEVKKDLIIKLPKYSLFELENGRKRMLASAGELQKGNELALPSKYVNFLYLASHYEKLKGSPEDNEQKQLFVEQHKHYLDEIIEQISEFSKRVILADANLDKVLSAYNKHRDKPIREQAENIIHLFTLTNLGAPAAFKYFDTTIDRKRYTSTKEVLDATLIHQSITGLYETRIDLSQLGGDGGEAAAKEAAAKEAAAKEAAAKEAAAKEAAAKGGTLNIEDEYRLHETSKEPDVPLGSTWLSDFPQAWAETGGMGLAVRQAPLIIPLKATSTPVSIKQYPMSQEARLGIKPHIQRLLDQGILVPCQSPWNTPLLPVKKPGTNDYRPVQDLREVNKRVEDIHPTVPNPYNLLSGLPPSHQWYTVLDLKDAFFCLRLHPTSQPLFAFEWRDPEMGISGQLTWTRLPQGFKNSPTLFNEALHRDLADFRIQHPDLILLQYVDDLLLAATSEQDCQRGTRALLQTLGNLGYRASAKKAQICQKQVKYLGYLLKEGQRWLTEARKETVMGQPTPKTPRQLREFLGTAGFCRLWIPGFAEMAAPLYPLTKPGTLFNWGPDQQKAYQEIKQALLTAPALGLPDLTKPFELFVDEKQGYAKGVLTQKLGPWRRPVAYLSKKLDPVAAGWPPCLRMVAAIAVLTKDAGKLTMGQPLVILAPHAVEALVKQPPDRWLSNARMTHYQAMLLDTDRVQFGPVVALNPATLLPLPEKEAPHDCLEILAETHGTRPDLTDQPIPDADYTWYTDGSSFLQEGQRRAGAAVTTETEVIWARALPAGTSAQRAELIALTQALKMAEGKKLNVYTDSRYAFATAHVHGEIYRRRGWLTSEGREIKNKNEILALLKALFLPKRLSIIHCPGHQKGNSAEARGNRMADQAAREAAMKAVLETSTLLAGKRTADGSEFEKRTADGSEFESPKKKAKVE

SEQ ID NO: 6471 - protein, 2094 aa, synthetic construct
MPAAKRVKLDGGDKKYSIGLDIGTNSVGWAVITDEYKVPSKKFKVLGNTDRHSIKKNLIGALLFDSGETAEATRLKRTARRRYTRRKNRICYLQEIFSNEMAKVDDSFFHRLEESFLVEEDKKHERHPIFGNIVDEVAYHEKYPTIYHLRKKLVDSTDKADLRLIYLALAHMIKFRGHFLIEGDLNPDNSDVDKLFIQLVQTYNQLFEENPINASGVDAKAILSARLSKSRRLENLIAQLPGEKKNGLFGNLIALSLGLTPNFKSNFDLAEDAKLQLSKDTYDDDLDNLLAQIGDQYADLFLAAKNLSDAILLSDILRVNTEITKAPLSASMIKRYDEHHQDLTLLKALVRQQLPEKYKEIFFDQSKNGYAGYIDGGASQEEFYKFIKPILEKMDGTEELLVKLNREDLLRKQRTFDNGSIPHQIHLGELHAILRRQEDFYPFLKDNREKIEKILTFRIPYYVGPLARGNSRFAWMTRKSEETITPWNFEEVVDKGASAQSFIERMTNFDKNLPNEKVLPKHSLLYEYFTVYNELTKVKYVTEGMRKPAFLSGEQKKAIVDLLFKTNRKVTVKQLKEDYFKKIECFDSVEISGVEDRFNASLGTYHDLLKIIKDKDFLDNEENEDILEDIVLTLTLFEDREMIEERLKTYAHLFDDKVMKQLKRRRYTGWGRLSRKLINGIRDKQSGKTILDFLKSDGFANRNFMQLIHDDSLTFKEDIQKAQVSGQGDSLHEHIANLAGSPAIKKGILQTVKVVDELVKVMGRHKPENIVIEMARENQTTQKGQKNSRERMKRIEEGIKELGSQILKEHPVENTQLQNEKLYLYYLQNGRDMYVDQELDINRLSDYDVDHIVPQSFLKDDSIDNKVLTRSDKARGKSDNVPSEEVVKKMKNYWRQLLNAKLITQRKFDNLTKAERGGLSELDKAGFIKRQLVETRQITKHVAQILDSRMNTKYDENDKLIREVKVITLKSKLVSDFRKDFQFYKVREINNYHHAHDAYLNAVVGTALIKKYPKLESEFVYGDYKVYDVRKMIAKSEQEIGKATAKYFFYSNIMNFFKTEITLANGEIRKRPLIETNGETGEIVWDKGRDFATVRKVLSMPQVNIVKKTEVQTGGFSKESILPKRNSDKLIARKKDWDPKKYGGFDSPTVAYSVLVVAKVEKGKSKKLKSVKELLGITIMERSSFEKNPIDFLEAKGYKEVKKDLIIKLPKYSLFELENGRKRMLASAGELQKGNELALPSKYVNFLYLASHYEKLKGSPEDNEQKQLFVEQHKHYLDEIIEQISEFSKRVILADANLDKVLSAYNKHRDKPIREQAENIIHLFTLTNLGAPAAFKYFDTTIDRKRYTSTKEVLDATLIHQSITGLYETRIDLSQLGGDGGPAPGGTVSLQDEHRLFDIPVTTSLPDVWLQDFPQAWAETGGLGRAKCQAPIIIDLKPTAVPVSIKQYPMSLEAHMGIRQHIIKFLELGVLRPCRSPWNTPLLPVKKPGTQDYRPVQDLREINKRTVDIHPTVPNPYNLLSTLKPDYSWYTVLDLKDAFFCLPLAPQSQELFAFEWKDPERGISGQLTWTRLPQGFKNSPTLFNEALHRDLTDFRTQHPEVTLLQYVDDLLLAAPTKKACTQGTRHLLQELGEKGYRASAKKAQICQTKVTYLGYILSEGKRWLTPGRIETVARIPPPRNPREVREFLGTAGFCRLWIPGFAELAAPLYALTKPSTPFTWQTEHQLAFEALKKALLSAPALGLPDTSKPFTLFLDERQGIAKGVLTQKLGPWKRPVAYLSKKLDPVAAGWPPCLRIMAATAMLVKDSAKLTLGQPLTVITPHTLEAIVRQPPDRWITNARLTHYQALLLDTDRVQFGPPVTLNPATLLPVPENQPSPHDCRQVLAETHGTREDLKDQELPDADHTWYTDGSSYLDSGTRRAGAAVVDGHNTIWAQSLPPGTSAQKAELIALTKALELSKGKKANIYTDSRYAFATAHTHGSIYERRGWLTSEGKEIKNKAEIIALLKALFLPQEVAIIHCPGHQKGQDPVAVGNRQADRVARQAAMAEVLTLATEPDNTSHITAGKRTADGSEFEKRTADGSEFESPKKKAKVE

SEQ ID NO: 6472 - protein, 2088 aa, synthetic construct
MPAAKRVKLDGGDKKYSIGLDIGTNSVGWAVITDEYKVPSKKFKVLGNTDRHSIKKNLIGALLFDSGETAEATRLKRTARRRYTRRKNRICYLQEIFSNEMAKVDDSFFHRLEESFLVEEDKKHERHPIFGNIVDEVAYHEKYPTIYHLRKKLVDSTDKADLRLIYLALAHMIKFRGHFLIEGDLNPDNSDVDKLFIQLVQTYNQLFEENPINASGVDAKAILSARLSKSRRLENLIAQLPGEKKNGLFGNLIALSLGLTPNFKSNFDLAEDAKLQLSKDTYDDDLDNLLAQIGDQYADLFLAAKNLSDAILLSDILRVNTEITKAPLSASMIKRYDEHHQDLTLLKALVRQQLPEKYKEIFFDQSKNGYAGYIDGGASQEEFYKFIKPILEKMDGTEELLVKLNREDLLRKQRTFDNGSIPHQIHLGELHAILRRQEDFYPFLKDNREKIEKILTFRIPYYVGPLARGNSRFAWMTRKSEETITPWNFEEVVDKGASAQSFIERMTNFDKNLPNEKVLPKHSLLYEYFTVYNELTKVKYVTEGMRKPAFLSGEQKKAIVDLLFKTNRKVTVKQLKEDYFKKIECFDSVEISGVEDRFNASLGTYHDLLKIIKDKDFLDNEENEDILEDIVLTLTLFEDREMIEERLKTYAHLFDDKVMKQLKRRRYTGWGRLSRKLINGIRDKQSGKTILDFLKSDGFANRNFMQLIHDDSLTFKEDIQKAQVSGQGDSLHEHIANLAGSPAIKKGILQTVKVVDELVKVMGRHKPENIVIEMARENQTTQKGQKNSRERMKRIEEGIKELGSQILKEHPVENTQLQNEKLYLYYLQNGRDMYVDQELDINRLSDYDVDHIVPQSFLKDDSIDNKVLTRSDKARGKSDNVPSEEVVKKMKNYWRQLLNAKLITQRKFDNLTKAERGGLSELDKAGFIKRQLVETRQITKHVAQILDSRMNTKYDENDKLIREVKVITLKSKLVSDFRKDFQFYKVREINNYHHAHDAYLNAVVGTALIKKYPKLESEFVYGDYKVYDVRKMIAKSEQEIGKATAKYFFYSNIMNFFKTEITLANGEIRKRPLIETNGETGEIVWDKGRDFATVRKVLSMPQVNIVKKTEVQTGGFSKESILPKRNSDKLIARKKDWDPKKYGGFDSPTVAYSVLVVAKVEKGKSKKLKSVKELLGITIMERSSFEKNPIDFLEAKGYKEVKKDLIIKLPKYSLFELENGRKRMLASAGELQKGNELALPSKYVNFLYLASHYEKLKGSPEDNEQKQLFVEQHKHYLDEIIEQISEFSKRVILADANLDKVLSAYNKHRDKPIREQAENIIHLFTLTNLGAPAAFKYFDTTIDRKRYTSTKEVLDATLIHQSITGLYETRIDLSQLGGDGGPAPGGTLNLEDEYRLYETSAEPEVSPGSTWLSDFPQAWAETGGMGLAVRQAPLIIPLKATSTPVSIKQYPMSQEAKLGIKPHIQRLLDQGILVPCQSPWNTPLLPVKKPGTNDYRPVQDLREVNKRVEDIHPTVPNPYNLLSGLPPSHRWYTVLDLKDAFFCLRLHPTSQPLFAFEWRDPGMGISGQLTWTRLPQGFKNSPTLFNEALHRDLADFRIQHPDLILLQYVDDILLAATSELDCQQGTRALLLTLGNLGYRASAKKAQLCQKQVKYLGYLLKEGQRWLTEARKETVMGQPTPKTPRQLREFLGKAGFCRLFIPGFAEMAAPLYPLTKPGTLFNWGPDQQKAYQEIKQALLTAPALGLPDLTKPFELFVDEKQGYAKGVLTQKLGPWRRPVAYLSKKLDPVAAGWPPCLRMVAAIAVLRKDAGKLTMGQPLVILAPHAVEALVKQPPDRWLSNARMTHYQAMLLDTDRVQFGPVVALNPATLLPLPEEGAPHDCLEILAETHGTRPDLTDQPIPDADHTWYTDGSSFLQEGQRKAGAAVTTETEVIWARALPAGTSAQRAELIALTQALKMAEGKRLNVYTDSRYAFATAHIHGEIYRRRGWLTSEGREIKNKSEILALLKALFLPKRLSIIHCLGHQKGDSAEARGNRLADQAAREAAIKTPPDTSTLLAGKRTADGSEFEKRTADGSEFESPKKKAKVE

SEQ ID NO: 6473 - protein, 2088 aa, synthetic construct
MPAAKRVKLDGGDKKYSIGLDIGTNSVGWAVITDEYKVPSKKFKVLGNTDRHSIKKNLIGALLFDSGETAEATRLKRTARRRYTRRKNRICYLQEIFSNEMAKVDDSFFHRLEESFLVEEDKKHERHPIFGNIVDEVAYHEKYPTIYHLRKKLVDSTDKADLRLIYLALAHMIKFRGHFLIEGDLNPDNSDVDKLFIQLVQTYNQLFEENPINASGVDAKAILSARLSKSRRLENLIAQLPGEKKNGLFGNLIALSLGLTPNFKSNFDLAEDAKLQLSKDTYDDDLDNLLAQIGDQYADLFLAAKNLSDAILLSDILRVNTEITKAPLSASMIKRYDEHHQDLTLLKALVRQQLPEKYKEIFFDQSKNGYAGYIDGGASQEEFYKFIKPILEKMDGTEELLVKLNREDLLRKQRTFDNGSIPHQIHLGELHAILRRQEDFYPFLKDNREKIEKILTFRIPYYVGPLARGNSRFAWMTRKSEETITPWNFEEVVDKGASAQSFIERMTNFDKNLPNEKVLPKHSLLYEYFTVYNELTKVKYVTEGMRKPAFLSGEQKKAIVDLLFKTNRKVTVKQLKEDYFKKIECFDSVEISGVEDRFNASLGTYHDLLKIIKDKDFLDNEENEDILEDIVLTLTLFEDREMIEERLKTYAHLFDDKVMKQLKRRRYTGWGRLSRKLINGIRDKQSGKTILDFLKSDGFANRNFMQLIHDDSLTFKEDIQKAQVSGQGDSLHEHIANLAGSPAIKKGILQTVKVVDELVKVMGRHKPENIVIEMARENQTTQKGQKNSRERMKRIEEGIKELGSQILKEHPVENTQLQNEKLYLYYLQNGRDMYVDQELDINRLSDYDVDHIVPQSFLKDDSIDNKVLTRSDKARGKSDNVPSEEVVKKMKNYWRQLLNAKLITQRKFDNLTKAERGGLSELDKAGFIKRQLVETRQITKHVAQILDSRMNTKYDENDKLIREVKVITLKSKLVSDFRKDFQFYKVREINNYHHAHDAYLNAVVGTALIKKYPKLESEFVYGDYKVYDVRKMIAKSEQEIGKATAKYFFYSNIMNFFKTEITLANGEIRKRPLIETNGETGEIVWDKGRDFATVRKVLSMPQVNIVKKTEVQTGGFSKESILPKRNSDKLIARKKDWDPKKYGGFDSPTVAYSVLVVAKVEKGKSKKLKSVKELLGITIMERSSFEKNPIDFLEAKGYKEVKKDLIIKLPKYSLFELENGRKRMLASAGELQKGNELALPSKYVNFLYLASHYEKLKGSPEDNEQKQLFVEQHKHYLDEIIEQISEFSKRVILADANLDKVLSAYNKHRDKPIREQAENIIHLFTLTNLGAPAAFKYFDTTIDRKRYTSTKEVLDATLIHQSITGLYETRIDLSQLGGDGGPAPGGTLGIEDEYRLHETSTEPDVSLGSTWLSDFPQAWAETGGMGLAVRQAPLIIPLKATSTPVSIQQYPMSHEARLGIKPHIQRLLDQGILVPCQSPWNTPLLPVKKPGTNDYRPVQDLREVNKRVEDIHPTVPNPYNLLSGLPPSHQWYTVLDLKDAFFCLRLHPTSQPLFAFEWRDPGMGISGQLTWTRLPQGFKNSPTLFNEALHRDLADFRIQHPDLILLQYVDDILLAATSELDCQQGTRALLQTLGDLGYRASAKKAQICQKQVKYLGYLLREGQRWLTEARKETVMGQPVPKTPRQLREFLGTAGFCRLWIPGFAEMAAPLYPLTKPGTLFSWGPDQQKAYQEIKQALLTAPALGLPDLTKPFELFVDEKQGYAKGVLTQKLGPWRRPVAYLSKKLDPVAAGWPPCLRMVAAIAVLTKDAGKLTMGQPLVILAPHAVEALVKQPPDRWLSNARMTHYQAMLLDTDRVQFGPVVALNPATLLPLPEEGAPHDCLEILAETHGTRPDLTDQPIPDADHTWYTDGSSFLQEGQRKAGAAVTTETEVIWAGALPAGTSAQRAELIALTQALKMAEGKRLNVYTDSRYAFATAHIHGEIYRRRGWLTSEGREIKNKSEILALLKALFLPKRLSIIHCLGHQKGDSAEARGNRLADQAAREAAIKTPPDTSTLLAGKRTADGSEFEKRTADGSEFESPKKKAKVE

SEQ ID NO: 6474 - protein, 2088 aa, synthetic construct
MPAAKRVKLDGGDKKYSIGLDIGTNSVGWAVITDEYKVPSKKFKVLGNTDRHSIKKNLIGALLFDSGETAEATRLKRTARRRYTRRKNRICYLQEIFSNEMAKVDDSFFHRLEESFLVEEDKKHERHPIFGNIVDEVAYHEKYPTIYHLRKKLVDSTDKADLRLIYLALAHMIKFRGHFLIEGDLNPDNSDVDKLFIQLVQTYNQLFEENPINASGVDAKAILSARLSKSRRLENLIAQLPGEKKNGLFGNLIALSLGLTPNFKSNFDLAEDAKLQLSKDTYDDDLDNLLAQIGDQYADLFLAAKNLSDAILLSDILRVNTEITKAPLSASMIKRYDEHHQDLTLLKALVRQQLPEKYKEIFFDQSKNGYAGYIDGGASQEEFYKFIKPILEKMDGTEELLVKLNREDLLRKQRTFDNGSIPHQIHLGELHAILRRQEDFYPFLKDNREKIEKILTFRIPYYVGPLARGNSRFAWMTRKSEETITPWNFEEVVDKGASAQSFIERMTNFDKNLPNEKVLPKHSLLYEYFTVYNELTKVKYVTEGMRKPAFLSGEQKKAIVDLLFKTNRKVTVKQLKEDYFKKIECFDSVEISGVEDRFNASLGTYHDLLKIIKDKDFLDNEENEDILEDIVLTLTLFEDREMIEERLKTYAHLFDDKVMKQLKRRRYTGWGRLSRKLINGIRDKQSGKTILDFLKSDGFANRNFMQLIHDDSLTFKEDIQKAQVSGQGDSLHEHIANLAGSPAIKKGILQTVKVVDELVKVMGRHKPENIVIEMARENQTTQKGQKNSRERMKRIEEGIKELGSQILKEHPVENTQLQNEKLYLYYLQNGRDMYVDQELDINRLSDYDVDHIVPQSFLKDDSIDNKVLTRSDKARGKSDNVPSEEVVKKMKNYWRQLLNAKLITQRKFDNLTKAERGGLSELDKAGFIKRQLVETRQITKHVAQILDSRMNTKYDENDKLIREVKVITLKSKLVSDFRKDFQFYKVREINNYHHAHDAYLNAVVGTALIKKYPKLESEFVYGDYKVYDVRKMIAKSEQEIGKATAKYFFYSNIMNFFKTEITLANGEIRKRPLIETNGETGEIVWDKGRDFATVRKVLSMPQVNIVKKTEVQTGGFSKESILPKRNSDKLIARKKDWDPKKYGGFDSPTVAYSVLVVAKVEKGKSKKLKSVKELLGITIMERSSFEKNPIDFLEAKGYKEVKKDLIIKLPKYSLFELENGRKRMLASAGELQKGNELALPSKYVNFLYLASHYEKLKGSPEDNEQKQLFVEQHKHYLDEIIEQISEFSKRVILADANLDKVLSAYNKHRDKPIREQAENIIHLFTLTNLGAPAAFKYFDTTIDRKRYTSTKEVLDATLIHQSITGLYETRIDLSQLGGDGGPAPGGTLNIEDEYRLHETSKGPDVPLGSTWLSDFPQAWAETGGMGLAVRQAPLIIPLKATSTPVSIKQYPMSQEARLGIKPHIQRLLDQGILVPCQSPWNTPLLPVKKPGTNDYRPVQDLREVNKRVEDIHPTVPNPYNLLSGLPPSHQWYTVLDLKDAFFCLRLHPTSQSLFAFEWRDPEMGISGQLTWTRLPQGFKNSPTLFDEALHRDLADFRIQHPDLILLQYVDDLLLAATSELDCQQGTRALLQTLGDLGYRASAKKAQICQKQVKYLGYLLKEGQRWLTEARKETVMGQPTPKTPRQLREFLGTAGFCRLWIPGFAEMAAPLYPLTKTGTLFEWGPDQQKAYQEIKQALLTAPALGLPDLTKPFELFVDEKQGYAKGVLTQKLGPWRRPVAYLSKKLDPVAAGWPPCLRMVAAIAVLTKDAGKLTMGQPLVILAPHAVEALVKQPPDRWLSNARMTHYQALLLDTDRVQFGPIVALNPATLLPLPEEGLQHDCLDILAEAHGTRPDLTDQPLPDADHTWYTDGSSFLQEGQRKAGAAVTTETEVVWAKALPAGTSAQRAELIALTQALKMAEGKKLNVYTDSRYAFATAHIHGEIYRRRGLLTSEGKEIKNKDEILALLKALFLPKRLSIIHCPGHQKGNRAEARGNRMADQAAREVATRETPETSTLLAGKRTADGSEFEKRTADGSEFESPKKKAKVE

SEQ ID NO: 6475 - protein, 2088 aa, synthetic construct
MPAAKRVKLDGGDKKYSIGLDIGTNSVGWAVITDEYKVPSKKFKVLGNTDRHSIKKNLIGALLFDSGETAEATRLKRTARRRYTRRKNRICYLQEIFSNEMAKVDDSFFHRLEESFLVEEDKKHERHPIFGNIVDEVAYHEKYPTIYHLRKKLVDSTDKADLRLIYLALAHMIKFRGHFLIEGDLNPDNSDVDKLFIQLVQTYNQLFEENPINASGVDAKAILSARLSKSRRLENLIAQLPGEKKNGLFGNLIALSLGLTPNFKSNFDLAEDAKLQLSKDTYDDDLDNLLAQIGDQYADLFLAAKNLSDAILLSDILRVNTEITKAPLSASMIKRYDEHHQDLTLLKALVRQQLPEKYKEIFFDQSKNGYAGYIDGGASQEEFYKFIKPILEKMDGTEELLVKLNREDLLRKQRTFDNGSIPHQIHLGELHAILRRQEDFYPFLKDNREKIEKILTFRIPYYVGPLARGNSRFAWMTRKSEETITPWNFEEVVDKGASAQSFIERMTNFDKNLPNEKVLPKHSLLYEYFTVYNELTKVKYVTEGMRKPAFLSGEQKKAIVDLLFKTNRKVTVKQLKEDYFKKIECFDSVEISGVEDRFNASLGTYHDLLKIIKDKDFLDNEENEDILEDIVLTLTLFEDREMIEERLKTYAHLFDDKVMKQLKRRRYTGWGRLSRKLINGIRDKQSGKTILDFLKSDGFANRNFMQLIHDDSLTFKEDIQKAQVSGQGDSLHEHIANLAGSPAIKKGILQTVKVVDELVKVMGRHKPENIVIEMARENQTTQKGQKNSRERMKRIEEGIKELGSQILKEHPVENTQLQNEKLYLYYLQNGRDMYVDQELDINRLSDYDVDHIVPQSFLKDDSIDNKVLTRSDKARGKSDNVPSEEVVKKMKNYWRQLLNAKLITQRKFDNLTKAERGGLSELDKAGFIKRQLVETRQITKHVAQILDSRMNTKYDENDKLIREVKVITLKSKLVSDFRKDFQFYKVREINNYHHAHDAYLNAVVGTALIKKYPKLESEFVYGDYKVYDVRKMIAKSEQEIGKATAKYFFYSNIMNFFKTEITLANGEIRKRPLIETNGETGEIVWDKGRDFATVRKVLSMPQVNIVKKTEVQTGGFSKESILPKRNSDKLIARKKDWDPKKYGGFDSPTVAYSVLVVAKVEKGKSKKLKSVKELLGITIMERSSFEKNPIDFLEAKGYKEVKKDLIIKLPKYSLFELENGRKRMLASAGELQKGNELALPSKYVNFLYLASHYEKLKGSPEDNEQKQLFVEQHKHYLDEIIEQISEFSKRVILADANLDKVLSAYNKHRDKPIREQAENIIHLFTLTNLGAPAAFKYFDTTIDRKRYTSTKEVLDATLIHQSITGLYETRIDLSQLGGDGGPAPGGTLNIEDEYRLHEISTEPDVSPGSTWLSDFPQAWAETGGMGLAVRQAPLIIPLKATSTPVSIKQYPMSQEAKLGIKPHIQRLLDQGILVPCQSPWNTPLLPVKKPGTNDYRPVQGLREVNKRVEDIHPTVPNPYNLLSGLPTSHRWYTVLDLKDAFFCLRLHPTSQPLFASEWRDPGMGISGQLTWTRLPQGFKNSPTLFNEALHRGLADFRIQHPDLILLQYVDDLLLAATSELDCQQGTRALLKTLGNLGYRASAKKAQICQKQVKYLGYLLREGQRWLTEARKETVMGQPTPKTPRQLREFLGTAGFCRLWIPRFAEMAAPLYPLTKPGTLFNWGPDQQKAYHEIKQALLTAPALGLPDLTKPFELFVDEKQGYAKGVLTQKLGPWRRPVAYLSKKLDPVAAGWPPCLRMVAAIAVLTKDAGKLTMGQPLVILAPHAVEALVKQPPDRWLSNARMTHYQAMLLDTDRVQFGPVVALNPATLLPLPEEGAPHDCLEILAETHGTEPDLTDQPIPDADHTWYTDGSSFLQEGQRKAGAAVTTETEVIWARALPAGTSAQRAELIALTQALKMAEGKRLNVYTDSRYAFATAHIHGEIYKRRGWLTSEGREIKNKSEILALLKALFLPKRLSIIHCLGHQKGDSAEARGNRLADQAAREAAIKTPPDTSTLLAGKRTADGSEFEKRTADGSEFESPKKKAKVE

SEQ ID NO: 6476 - protein, 2082 aa, synthetic construct
MPAAKRVKLDGGDKKYSIGLDIGTNSVGWAVITDEYKVPSKKFKVLGNTDRHSIKKNLIGALLFDSGETAEATRLKRTARRRYTRRKNRICYLQEIFSNEMAKVDDSFFHRLEESFLVEEDKKHERHPIFGNIVDEVAYHEKYPTIYHLRKKLVDSTDKADLRLIYLALAHMIKFRGHFLIEGDLNPDNSDVDKLFIQLVQTYNQLFEENPINASGVDAKAILSARLSKSRRLENLIAQLPGEKKNGLFGNLIALSLGLTPNFKSNFDLAEDAKLQLSKDTYDDDLDNLLAQIGDQYADLFLAAKNLSDAILLSDILRVNTEITKAPLSASMIKRYDEHHQDLTLLKALVRQQLPEKYKEIFFDQSKNGYAGYIDGGASQEEFYKFIKPILEKMDGTEELLVKLNREDLLRKQRTFDNGSIPHQIHLGELHAILRRQEDFYPFLKDNREKIEKILTFRIPYYVGPLARGNSRFAWMTRKSEETITPWNFEEVVDKGASAQSFIERMTNFDKNLPNEKVLPKHSLLYEYFTVYNELTKVKYVTEGMRKPAFLSGEQKKAIVDLLFKTNRKVTVKQLKEDYFKKIECFDSVEISGVEDRFNASLGTYHDLLKIIKDKDFLDNEENEDILEDIVLTLTLFEDREMIEERLKTYAHLFDDKVMKQLKRRRYTGWGRLSRKLINGIRDKQSGKTILDFLKSDGFANRNFMQLIHDDSLTFKEDIQKAQVSGQGDSLHEHIANLAGSPAIKKGILQTVKVVDELVKVMGRHKPENIVIEMARENQTTQKGQKNSRERMKRIEEGIKELGSQILKEHPVENTQLQNEKLYLYYLQNGRDMYVDQELDINRLSDYDVDHIVPQSFLKDDSIDNKVLTRSDKARGKSDNVPSEEVVKKMKNYWRQLLNAKLITQRKFDNLTKAERGGLSELDKAGFIKRQLVETRQITKHVAQILDSRMNTKYDENDKLIREVKVITLKSKLVSDFRKDFQFYKVREINNYHHAHDAYLNAVVGTALIKKYPKLESEFVYGDYKVYDVRKMIAKSEQEIGKATAKYFFYSNIMNFFKTEITLANGEIRKRPLIETNGETGEIVWDKGRDFATVRKVLSMPQVNIVKKTEVQTGGFSKESILPKRNSDKLIARKKDWDPKKYGGFDSPTVAYSVLVVAKVEKGKSKKLKSVKELLGITIMERSSFEKNPIDFLEAKGYKEVKKDLIIKLPKYSLFELENGRKRMLASAGELQKGNELALPSKYVNFLYLASHYEKLKGSPEDNEQKQLFVEQHKHYLDEIIEQISEFSKRVILADANLDKVLSAYNKHRDKPIREQAENIIHLFTLTNLGAPAAFKYFDTTIDRKRYTSTKEVLDATLIHQSITGLYETRIDLSQLGGDGGPAPGGTLQLDDEYRLYSPLVKPDQNIQFWLEQFPQAWAETAGMGLAKQVPPQVIQLKASATPVSVRQYPLSKEAQEGIRPHVQRLIQQGILVPVQSPWNTPLLPVRKPGTNDYRPVQDLREVNKRVQDIHPTVPNPYNLLCALPPQRSWYTVLDLKDAFFCLRLHPTSQPLFAFEWRDPGTGRTGQLTWTRLPQGFKNSPTIFDEALHRDLANFRIQHPQVTLLQYVDDLLLAGATKQDCLEGTKALLLELSDLGYRASAKKAQICRREVTYLGYSLRDGQRWLTEARKKTVVQIPAPTTAKQVREFLGTAGFCRLWIPGFATLAAPLYPLTKEKGEFSWAPEHQKAFDAIKKALLSAPALALPDVTKPFTLYVDERKGVARGVLTQTLGPWRRPVAYLSKKLDPVASGWPVCLKAIAAVAILVKDADKLTLGQNITVIAPHALENIVRQPPDRWMTNARMTHYQSLLLTERVTFAPPAALNPATLLPEETDEPVTHDCHQLLIEETGVRKDLTDIPLTGEVLTWFTDGSSYVVEGKRMAGAAVVDGTRTIWASSLPEGTSAQKAELMALTQALRLAEGKSINIYTDSRYAFATAHVHGAIYKQRGLLTSAGREIKNKEEILSLLEALHLPKRLAIIHCPGHQKAKDPISRGNQMADRVAKQAAQGVNLLAGKRTADGSEFEKRTADGSEFESPKKKAKVE

SEQ ID NO: 6477 - protein, 2168 aa, synthetic construct
MPAAKRVKLDGGDKKYSIGLDIGTNSVGWAVITDEYKVPSKKFKVLGNTDRHSIKKNLIGALLFDSGETAEATRLKRTARRRYTRRKNRICYLQEIFSNEMAKVDDSFFHRLEESFLVEEDKKHERHPIFGNIVDEVAYHEKYPTIYHLRKKLVDSTDKADLRLIYLALAHMIKFRGHFLIEGDLNPDNSDVDKLFIQLVQTYNQLFEENPINASGVDAKAILSARLSKSRRLENLIAQLPGEKKNGLFGNLIALSLGLTPNFKSNFDLAEDAKLQLSKDTYDDDLDNLLAQIGDQYADLFLAAKNLSDAILLSDILRVNTEITKAPLSASMIKRYDEHHQDLTLLKALVRQQLPEKYKEIFFDQSKNGYAGYIDGGASQEEFYKFIKPILEKMDGTEELLVKLNREDLLRKQRTFDNGSIPHQIHLGELHAILRRQEDFYPFLKDNREKIEKILTFRIPYYVGPLARGNSRFAWMTRKSEETITPWNFEEVVDKGASAQSFIERMTNFDKNLPNEKVLPKHSLLYEYFTVYNELTKVKYVTEGMRKPAFLSGEQKKAIVDLLFKTNRKVTVKQLKEDYFKKIECFDSVEISGVEDRFNASLGTYHDLLKIIKDKDFLDNEENEDILEDIVLTLTLFEDREMIEERLKTYAHLFDDKVMKQLKRRRYTGWGRLSRKLINGIRDKQSGKTILDFLKSDGFANRNFMQLIHDDSLTFKEDIQKAQVSGQGDSLHEHIANLAGSPAIKKGILQTVKVVDELVKVMGRHKPENIVIEMARENQTTQKGQKNSRERMKRIEEGIKELGSQILKEHPVENTQLQNEKLYLYYLQNGRDMYVDQELDINRLSDYDVDHIVPQSFLKDDSIDNKVLTRSDKARGKSDNVPSEEVVKKMKNYWRQLLNAKLITQRKFDNLTKAERGGLSELDKAGFIKRQLVETRQITKHVAQILDSRMNTKYDENDKLIREVKVITLKSKLVSDFRKDFQFYKVREINNYHHAHDAYLNAVVGTALIKKYPKLESEFVYGDYKVYDVRKMIAKSEQEIGKATAKYFFYSNIMNFFKTEITLANGEIRKRPLIETNGETGEIVWDKGRDFATVRKVLSMPQVNIVKKTEVQTGGFSKESILPKRNSDKLIARKKDWDPKKYGGFDSPTVAYSVLVVAKVEKGKSKKLKSVKELLGITIMERSSFEKNPIDFLEAKGYKEVKKDLIIKLPKYSLFELENGRKRMLASAGELQKGNELALPSKYVNFLYLASHYEKLKGSPEDNEQKQLFVEQHKHYLDEIIEQISEFSKRVILADANLDKVLSAYNKHRDKPIREQAENIIHLFTLTNLGAPAAFKYFDTTIDRKRYTSTKEVLDATLIHQSITGLYETRIDLSQLGGDGGPAPGGMDPLQLLQPLEAEIKGTKLKAHWNSGATITCVPQAFLEEEVPIKNIWIKTIHGEKEQPVYYLTFKIQGRKVEAEVISSPYDYILVSPSDIPWLMKKPLQLTTLVPLQEYEERLLKQTMLTGSYKEKLQSLFLKYDALWQHWENQVGHRRIKPHHIATGTVNPRPQKQYPINPKAKASIQTVINDLLKQGVLIQQNSIMNTPVYPVPKPDGKWRMVLDYREVNKTIPLIAAQNQHSAGILSSIFRGKYKTTLDLSNGFWAHSITPESYWLTAFTWLGQQYCWTRLPQGFLNSPALFNADVVDLLKEVPNVQVYVDDIYISHDDPREHLEQLEKVFSLLLNAGYVVSLKKSEIAQHEVEFLGFNITKEGRGLTETFKQKLLNITPPRDLKQLQSILGKLNFARNFIPNFSELVKPLYNIIATAPGKYITWTTDNSQQLQNIISMLNSAENLEERNPEVRLIMKVNTSPSAGYIRFYNEFAKRPIMYLNYVYTKAEVKFTNTEKLLTTIHKGLIKALDLGMGQEILVYSPIVSMTKIQKTPLPERKALPIRWITWMSYLEDPRIQFHYDKTLPELQQVPTVTDDIIAKIKHPSEFSMVFYTDGSAIKHPNVNKSHNAGMGIAQVQFKPEFTVINTWSIPLGDHTAQLAEVAAVEFACKKALKIDGPVLIVTDSFYVAESVNKELPYWQSNGFFNNKKKPLKHVSKWKSIADCIQLKPDIIIIHEKGHQPTASTFHTEGNNLADKLATQGSYVVNAGKRTADGSEFEKRTADGSEFESPKKKAKVE

SEQ ID NO: 6478 - protein, 2086 aa, synthetic construct
MPAAKRVKLDGGDKKYSIGLDIGTNSVGWAVITDEYKVPSKKFKVLGNTDRHSIKKNLIGALLFDSGETAEATRLKRTARRRYTRRKNRICYLQEIFSNEMAKVDDSFFHRLEESFLVEEDKKHERHPIFGNIVDEVAYHEKYPTIYHLRKKLVDSTDKADLRLIYLALAHMIKFRGHFLIEGDLNPDNSDVDKLFIQLVQTYNQLFEENPINASGVDAKAILSARLSKSRRLENLIAQLPGEKKNGLFGNLIALSLGLTPNFKSNFDLAEDAKLQLSKDTYDDDLDNLLAQIGDQYADLFLAAKNLSDAILLSDILRVNTEITKAPLSASMIKRYDEHHQDLTLLKALVRQQLPEKYKEIFFDQSKNGYAGYIDGGASQEEFYKFIKPILEKMDGTEELLVKLNREDLLRKQRTFDNGSIPHQIHLGELHAILRRQEDFYPFLKDNREKIEKILTFRIPYYVGPLARGNSRFAWMTRKSEETITPWNFEEVVDKGASAQSFIERMTNFDKNLPNEKVLPKHSLLYEYFTVYNELTKVKYVTEGMRKPAFLSGEQKKAIVDLLFKTNRKVTVKQLKEDYFKKIECFDSVEISGVEDRFNASLGTYHDLLKIIKDKDFLDNEENEDILEDIVLTLTLFEDREMIEERLKTYAHLFDDKVMKQLKRRRYTGWGRLSRKLINGIRDKQSGKTILDFLKSDGFANRNFMQLIHDDSLTFKEDIQKAQVSGQGDSLHEHIANLAGSPAIKKGILQTVKVVDELVKVMGRHKPENIVIEMARENQTTQKGQKNSRERMKRIEEGIKELGSQILKEHPVENTQLQNEKLYLYYLQNGRDMYVDQELDINRLSDYDVDHIVPQSFLKDDSIDNKVLTRSDKARGKSDNVPSEEVVKKMKNYWRQLLNAKLITQRKFDNLTKAERGGLSELDKAGFIKRQLVETRQITKHVAQILDSRMNTKYDENDKLIREVKVITLKSKLVSDFRKDFQFYKVREINNYHHAHDAYLNAVVGTALIKKYPKLESEFVYGDYKVYDVRKMIAKSEQEIGKATAKYFFYSNIMNFFKTEITLANGEIRKRPLIETNGETGEIVWDKGRDFATVRKVLSMPQVNIVKKTEVQTGGFSKESILPKRNSDKLIARKKDWDPKKYGGFDSPTVAYSVLVVAKVEKGKSKKLKSVKELLGITIMERSSFEKNPIDFLEAKGYKEVKKDLIIKLPKYSLFELENGRKRMLASAGELQKGNELALPSKYVNFLYLASHYEKLKGSPEDNEQKQLFVEQHKHYLDEIIEQISEFSKRVILADANLDKVLSAYNKHRDKPIREQAENIIHLFTLTNLGAPAAFKYFDTTIDRKRYTSTKEVLDATLIHQSITGLYETRIDLSQLGGDGGPAPGGVLNLEEEYRLHEKPVPSSIDPSWLQLFPTVWAERAGMGLANQVPPVVVELRSGASPVAVRQYPMSKEAREGIRPHIQRFLDLGVLVPCQSPWNTPLLPVKKPGTNDYRPVQDLREINKRVQDIHPTVPNPYNLLSSLPPSHTWYSVLDLKDAFFCLKLHPNSQPLFAFEWRDPEKGNTGQLTWTRLPQGFKNSPTLFNEALHRDLAPFRALNPQVVLLQYVDDLLVAAPTYRDCKEGTQKLLQELSKLGYRVSAKKAQLCQKEVTYLGYLLKEGKRWLTPARKATVMKIPPPTTPRQVREFLGTAGFCRLWIPGFASLAAPLYPLTKPSIPFIWTEEHQKAFDRIKEALLSAPALALPDLTKPFTLYVDERAGVARGVLTQTLGPWRRPVAYLSKKLDPVASGWPTCLKAVAAVALLLKDADKLTLGQNVTVIASHSLESIVRQPPDRWMTNARMTHYQSLLLNERVSFAPPAVLNPATLLPVESEATPVHRCSEILAEETGTRRDLKDQPLPGVPAWYTDGSSFIAEGKRRAGAAIVDGKRTVWASSLPEGTSAQKAELVALTQALRLAEGKDINIYTDSRYAFATAHIHGAIYKQRGWLTSAGKDIKNKEEILALLEAIHLPKRVAIIHCPGHQKGNDPVATGNRRADEAAKQAALSTRVLAETTKPAGKRTADGSEFEKRTADGSEFESPKKKAKVE

SEQ ID NO: 6479 - protein, 2086 aa, synthetic construct
MPAAKRVKLDGGDKKYSIGLDIGTNSVGWAVITDEYKVPSKKFKVLGNTDRHSIKKNLIGALLFDSGETAEATRLKRTARRRYTRRKNRICYLQEIFSNEMAKVDDSFFHRLEESFLVEEDKKHERHPIFGNIVDEVAYHEKYPTIYHLRKKLVDSTDKADLRLIYLALAHMIKFRGHFLIEGDLNPDNSDVDKLFIQLVQTYNQLFEENPINASGVDAKAILSARLSKSRRLENLIAQLPGEKKNGLFGNLIALSLGLTPNFKSNFDLAEDAKLQLSKDTYDDDLDNLLAQIGDQYADLFLAAKNLSDAILLSDILRVNTEITKAPLSASMIKRYDEHHQDLTLLKALVRQQLPEKYKEIFFDQSKNGYAGYIDGGASQEEFYKFIKPILEKMDGTEELLVKLNREDLLRKQRTFDNGSIPHQIHLGELHAILRRQEDFYPFLKDNREKIEKILTFRIPYYVGPLARGNSRFAWMTRKSEETITPWNFEEVVDKGASAQSFIERMTNFDKNLPNEKVLPKHSLLYEYFTVYNELTKVKYVTEGMRKPAFLSGEQKKAIVDLLFKTNRKVTVKQLKEDYFKKIECFDSVEISGVEDRFNASLGTYHDLLKIIKDKDFLDNEENEDILEDIVLTLTLFEDREMIEERLKTYAHLFDDKVMKQLKRRRYTGWGRLSRKLINGIRDKQSGKTILDFLKSDGFANRNFMQLIHDDSLTFKEDIQKAQVSGQGDSLHEHIANLAGSPAIKKGILQTVKVVDELVKVMGRHKPENIVIEMARENQTTQKGQKNSRERMKRIEEGIKELGSQILKEHPVENTQLQNEKLYLYYLQNGRDMYVDQELDINRLSDYDVDHIVPQSFLKDDSIDNKVLTRSDKARGKSDNVPSEEVVKKMKNYWRQLLNAKLITQRKFDNLTKAERGGLSELDKAGFIKRQLVETRQITKHVAQILDSRMNTKYDENDKLIREVKVITLKSKLVSDFRKDFQFYKVREINNYHHAHDAYLNAVVGTALIKKYPKLESEFVYGDYKVYDVRKMIAKSEQEIGKATAKYFFYSNIMNFFKTEITLANGEIRKRPLIETNGETGEIVWDKGRDFATVRKVLSMPQVNIVKKTEVQTGGFSKESILPKRNSDKLIARKKDWDPKKYGGFDSPTVAYSVLVVAKVEKGKSKKLKSVKELLGITIMERSSFEKNPIDFLEAKGYKEVKKDLIIKLPKYSLFELENGRKRMLASAGELQKGNELALPSKYVNFLYLASHYEKLKGSPEDNEQKQLFVEQHKHYLDEIIEQISEFSKRVILADANLDKVLSAYNKHRDKPIREQAENIIHLFTLTNLGAPAAFKYFDTTIDRKRYTSTKEVLDATLIHQSITGLYETRIDLSQLGGDGGPAPGGVLNLEEEYRLHEKPVPSSIDPSWLQLFPTVWAERAGMGLANQVPPVVVELRSGASPVAVRQYPMSKEAREGIRPHIQRFLDLGVLVPCQSPWNTPLLPVKKPGTNDYRPVQDLREINKRVQDIHPTVPNPYNLLSSLPPSHTWYSVLDLKDAFFCLKLHPNSQPLFAFEWRDPEKGNTGQLTWTRLPQGFKNSPTLFNEALHRDLAPFRALNPQVVLLQYVDDLLVAAPTYRDCKEGTQKLLQELSKLGYRVSAKKAQLCQKEVTYLGYLLKEGKRWLTPARKATVMKIPPPTTPRQVREFLGKAGFCRLFIPGFASLAAPLYPLTKPSIPFIWTEEHQKAFDRIKEALLSAPALALPDLTKPFTLYVDERAGVARGVLTQTLGPWRRPVAYLSKKLDPVASGWPTCLKAVAAVALLLKDADKLTLGQNVTVIASHSLESIVRQPPDRWMTNARMTHYQSLLLNERVSFAPPAVLNPATLLPVESEATPVHRCSEILAEETGTRRDLKDQPLPGVPAWYTDGSSFIAEGKRRAGAAIVDGKRTVWASSLPEGTSAQKAELVALTQALRLAEGKDINIYTDSRYAFATAHIHGAIYKQRGWLTSAGKDIKNKEEILALLEAIHLPKRVAIIHCPGHQKGNDPVATGNRRADEAAKQAALSTRVLAETTKPAGKRTADGSEFEKRTADGSEFESPKKKAKVE

SEQ ID NO: 6480 - protein, 2088 aa, synthetic construct
MPAAKRVKLDGGDKKYSIGLDIGTNSVGWAVITDEYKVPSKKFKVLGNTDRHSIKKNLIGALLFDSGETAEATRLKRTARRRYTRRKNRICYLQEIFSNEMAKVDDSFFHRLEESFLVEEDKKHERHPIFGNIVDEVAYHEKYPTIYHLRKKLVDSTDKADLRLIYLALAHMIKFRGHFLIEGDLNPDNSDVDKLFIQLVQTYNQLFEENPINASGVDAKAILSARLSKSRRLENLIAQLPGEKKNGLFGNLIALSLGLTPNFKSNFDLAEDAKLQLSKDTYDDDLDNLLAQIGDQYADLFLAAKNLSDAILLSDILRVNTEITKAPLSASMIKRYDEHHQDLTLLKALVRQQLPEKYKEIFFDQSKNGYAGYIDGGASQEEFYKFIKPILEKMDGTEELLVKLNREDLLRKQRTFDNGSIPHQIHLGELHAILRRQEDFYPFLKDNREKIEKILTFRIPYYVGPLARGNSRFAWMTRKSEETITPWNFEEVVDKGASAQSFIERMTNFDKNLPNEKVLPKHSLLYEYFTVYNELTKVKYVTEGMRKPAFLSGEQKKAIVDLLFKTNRKVTVKQLKEDYFKKIECFDSVEISGVEDRFNASLGTYHDLLKIIKDKDFLDNEENEDILEDIVLTLTLFEDREMIEERLKTYAHLFDDKVMKQLKRRRYTGWGRLSRKLINGIRDKQSGKTILDFLKSDGFANRNFMQLIHDDSLTFKEDIQKAQVSGQGDSLHEHIANLAGSPAIKKGILQTVKVVDELVKVMGRHKPENIVIEMARENQTTQKGQKNSRERMKRIEEGIKELGSQILKEHPVENTQLQNEKLYLYYLQNGRDMYVDQELDINRLSDYDVDHIVPQSFLKDDSIDNKVLTRSDKARGKSDNVPSEEVVKKMKNYWRQLLNAKLITQRKFDNLTKAERGGLSELDKAGFIKRQLVETRQITKHVAQILDSRMNTKYDENDKLIREVKVITLKSKLVSDFRKDFQFYKVREINNYHHAHDAYLNAVVGTALIKKYPKLESEFVYGDYKVYDVRKMIAKSEQEIGKATAKYFFYSNIMNFFKTEITLANGEIRKRPLIETNGETGEIVWDKGRDFATVRKVLSMPQVNIVKKTEVQTGGFSKESILPKRNSDKLIARKKDWDPKKYGGFDSPTVAYSVLVVAKVEKGKSKKLKSVKELLGITIMERSSFEKNPIDFLEAKGYKEVKKDLIIKLPKYSLFELENGRKRMLASAGELQKGNELALPSKYVNFLYLASHYEKLKGSPEDNEQKQLFVEQHKHYLDEIIEQISEFSKRVILADANLDKVLSAYNKHRDKPIREQAENIIHLFTLTNLGAPAAFKYFDTTIDRKRYTSTKEVLDATLIHQSITGLYETRIDLSQLGGDGGPAPGGTLNIEDEYRLHETSKEPDVPLGSTWLSDFPQAWAETGGMGLAVRQAPLIIPLKATSTPVSIKQYPMSQEARLGIKPHIQRLLDQGILVPCQSPWNTPLLPVKKPGTNDYRPVQDLREVNKRVEDIHPTVPNPYNLLSGLPPSHQWYTVLDLKDAFFCLRLHPTSQPLFAFEWRDPEMGISGQLTWTRLPQGFKNSPTLFNEALHRDLADFRIQHPDLILLQYVDDLLLAATSEQDCQRGTRALLQTLGNLGYRASAKKAQICQKQVKYLGYLLKEGQRWLTEARKETVMGQPTPKTPRQLREFLGKAGFCRLFIPGFAEMAAPLYPLTKPGTLFNWGPDQQKAYQEIKQALLTAPALGLPDLTKPFELFVDEKQGYAKGVLTQKLGPWRRPVAYLSKKLDPVAAGWPPCLRMVAAIAVLTKDAGKLTMGQPLVILAPHAVEALVKQPPDRWLSNARMTHYQAMLLDTDRVQFGPVVALNPATLLPLPEKEAPHDCLEILAETHGTRPDLTDQPIPDADYTWYTDGSSFLQEGQRRAGAAVTTETEVIWARALPAGTSAQRAELIALTQALKMAEGKKLNVYTDSRYAFATAHVHGEIYRRRGWLTSEGREIKNKNEILALLKALFLPKRLSIIHCPGHQKGNSAEARGNRMADQAAREAAMKAVLETSTLLAGKRTADGSEFEKRTADGSEFESPKKKAKVE

SEQ ID NO: 6481 - protein, 2167 aa, synthetic construct
MPAAKRVKLDGGDKKYSIGLDIGTNSVGWAVITDEYKVPSKKFKVLGNTDRHSIKKNLIGALLFDSGETAEATRLKRTARRRYTRRKNRICYLQEIFSNEMAKVDDSFFHRLEESFLVEEDKKHERHPIFGNIVDEVAYHEKYPTIYHLRKKLVDSTDKADLRLIYLALAHMIKFRGHFLIEGDLNPDNSDVDKLFIQLVQTYNQLFEENPINASGVDAKAILSARLSKSRRLENLIAQLPGEKKNGLFGNLIALSLGLTPNFKSNFDLAEDAKLQLSKDTYDDDLDNLLAQIGDQYADLFLAAKNLSDAILLSDILRVNTEITKAPLSASMIKRYDEHHQDLTLLKALVRQQLPEKYKEIFFDQSKNGYAGYIDGGASQEEFYKFIKPILEKMDGTEELLVKLNREDLLRKQRTFDNGSIPHQIHLGELHAILRRQEDFYPFLKDNREKIEKILTFRIPYYVGPLARGNSRFAWMTRKSEETITPWNFEEVVDKGASAQSFIERMTNFDKNLPNEKVLPKHSLLYEYFTVYNELTKVKYVTEGMRKPAFLSGEQKKAIVDLLFKTNRKVTVKQLKEDYFKKIECFDSVEISGVEDRFNASLGTYHDLLKIIKDKDFLDNEENEDILEDIVLTLTLFEDREMIEERLKTYAHLFDDKVMKQLKRRRYTGWGRLSRKLINGIRDKQSGKTILDFLKSDGFANRNFMQLIHDDSLTFKEDIQKAQVSGQGDSLHEHIANLAGSPAIKKGILQTVKVVDELVKVMGRHKPENIVIEMARENQTTQKGQKNSRERMKRIEEGIKELGSQILKEHPVENTQLQNEKLYLYYLQNGRDMYVDQELDINRLSDYDVDHIVPQSFLKDDSIDNKVLTRSDKARGKSDNVPSEEVVKKMKNYWRQLLNAKLITQRKFDNLTKAERGGLSELDKAGFIKRQLVETRQITKHVAQILDSRMNTKYDENDKLIREVKVITLKSKLVSDFRKDFQFYKVREINNYHHAHDAYLNAVVGTALIKKYPKLESEFVYGDYKVYDVRKMIAKSEQEIGKATAKYFFYSNIMNFFKTEITLANGEIRKRPLIETNGETGEIVWDKGRDFATVRKVLSMPQVNIVKKTEVQTGGFSKESILPKRNSDKLIARKKDWDPKKYGGFDSPTVAYSVLVVAKVEKGKSKKLKSVKELLGITIMERSSFEKNPIDFLEAKGYKEVKKDLIIKLPKYSLFELENGRKRMLASAGELQKGNELALPSKYVNFLYLASHYEKLKGSPEDNEQKQLFVEQHKHYLDEIIEQISEFSKRVILADANLDKVLSAYNKHRDKPIREQAENIIHLFTLTNLGAPAAFKYFDTTIDRKRYTSTKEVLDATLIHQSITGLYETRIDLSQLGGDGGPAPAPGGMDLLKPLTVERKGVKIKGYWNSQADITCVPKDLLQGEEPVRQQNVTTIHGTQEGDVYYVNLKIDGRRINTEVIGTTLDYAIITPGDVPWILKKPLELTIKLDLEEQQGTLLNNSILSKKGKEELKQLFEKYSALWQSWENQVGHRRIRPHKIATGTVKPTPQKQYHINPKAKPDIQIVINDLLKQGVLIQKESTMNTPVYPVPKPNGRWRMVLDYRAVNKVTPLIAVQNQHSYGILGSLFKGRYKTTIDLSNGFWAHPIVPEDYWITAFTWQGKQYCWTVLPQGFLNSPGLFNGDVVDLLQGIPNVEVYVDDVYISHDSEKEHLEYLDILFNRLKEAGYIISLKKSNIANSIVDFLGFQITNEGRGLTDTFKEKLENITAPTTLKQLQSILGLLNFARNFIPDFTELIAPLYALIPKSPKNYVPWQIEHSTTLETLITKLNGAEYLQGRKGDKTLIMKVNASYTTGYIRYYNEGEKKPISYVSIVFSKTELKFTELEKLLTTVHKGLLKALDLSMGQNIHVYSPIVSMQNIQKTPQTAKKALASRWLSWLSYLEDPRIRFFYDPQMPALKDLPAVDTGKDNKKHPSNFQHIFYTDGSAITSPTKEGHLNAGMGIVYFINKDGNLQKQQEWSISLGNHTAQFAEIAAFEFALKKCLPLGGNILVVTDSNYVAKAYNEELDVWASNGFVNNRKKPLKHISKWKSVADLKRLRPDVVVTHEPGHQKLDSSPHAYGNNLADQLATQASFKVHAGKRTADGSEFEKRTADGSEFESPKKKAKVE

SEQ ID NO: 6482 - protein, 2089 aa, synthetic construct
MPAAKRVKLDGGDKKYSIGLDIGTNSVGWAVITDEYKVPSKKFKVLGNTDRHSIKKNLIGALLFDSGETAEATRLKRTARRRYTRRKNRICYLQEIFSNEMAKVDDSFFHRLEESFLVEEDKKHERHPIFGNIVDEVAYHEKYPTIYHLRKKLVDSTDKADLRLIYLALAHMIKFRGHFLIEGDLNPDNSDVDKLFIQLVQTYNQLFEENPINASGVDAKAILSARLSKSRRLENLIAQLPGEKKNGLFGNLIALSLGLTPNFKSNFDLAEDAKLQLSKDTYDDDLDNLLAQIGDQYADLFLAAKNLSDAILLSDILRVNTEITKAPLSASMIKRYDEHHQDLTLLKALVRQQLPEKYKEIFFDQSKNGYAGYIDGGASQEEFYKFIKPILEKMDGTEELLVKLNREDLLRKQRTFDNGSIPHQIHLGELHAILRRQEDFYPFLKDNREKIEKILTFRIPYYVGPLARGNSRFAWMTRKSEETITPWNFEEVVDKGASAQSFIERMTNFDKNLPNEKVLPKHSLLYEYFTVYNELTKVKYVTEGMRKPAFLSGEQKKAIVDLLFKTNRKVTVKQLKEDYFKKIECFDSVEISGVEDRFNASLGTYHDLLKIIKDKDFLDNEENEDILEDIVLTLTLFEDREMIEERLKTYAHLFDDKVMKQLKRRRYTGWGRLSRKLINGIRDKQSGKTILDFLKSDGFANRNFMQLIHDDSLTFKEDIQKAQVSGQGDSLHEHIANLAGSPAIKKGILQTVKVVDELVKVMGRHKPENIVIEMARENQTTQKGQKNSRERMKRIEEGIKELGSQILKEHPVENTQLQNEKLYLYYLQNGRDMYVDQELDINRLSDYDVDHIVPQSFLKDDSIDNKVLTRSDKARGKSDNVPSEEVVKKMKNYWRQLLNAKLITQRKFDNLTKAERGGLSELDKAGFIKRQLVETRQITKHVAQILDSRMNTKYDENDKLIREVKVITLKSKLVSDFRKDFQFYKVREINNYHHAHDAYLNAVVGTALIKKYPKLESEFVYGDYKVYDVRKMIAKSEQEIGKATAKYFFYSNIMNFFKTEITLANGEIRKRPLIETNGETGEIVWDKGRDFATVRKVLSMPQVNIVKKTEVQTGGFSKESILPKRNSDKLIARKKDWDPKKYGGFDSPTVAYSVLVVAKVEKGKSKKLKSVKELLGITIMERSSFEKNPIDFLEAKGYKEVKKDLIIKLPKYSLFELENGRKRMLASAGELQKGNELALPSKYVNFLYLASHYEKLKGSPEDNEQKQLFVEQHKHYLDEIIEQISEFSKRVILADANLDKVLSAYNKHRDKPIREQAENIIHLFTLTNLGAPAAFKYFDTTIDRKRYTSTKEVLDATLIHQSITGLYETRIDLSQLGGDGGPAPAPGGTLQLEEEYRLFEPESTQKQEMDIWLKNFPQAWAETGGMGTAHCQAPVLIQLKATATPISIRQYPMPHEAYQGIKPHIRRMLDQGILKPCQSPWNTPLLPVKKPGTEDYRPVQDLREVNKRVEDIHPTVPNPYNLLSTLPPSHPWYTVLDLKDAFFCLRLHSESQLLFAFEWRDPEIGLSGQLTWTRLPQGFKNSPTLFNEALHSDLADFRVRYPALVLLQYVDDLLLAAATRTECLEGTKALLETLGNKGYRASAKKAQICLQEVTYLGYSLKDGQRWLTKARKEAILSIPVPKNSRQVREFLGTAGYCRLWIPGFAELAAPLYPLTRPGTLFQWGTEQQLAFEDIKKALLSSPALGLPDITKPFELFIDENSGFAKGVLVQKLGPWKRPVAYLSKKLDTVASGWPPCLRMVAAIAILVKDAGKLTLGQPLTILTSHPVEALVRQPPNKWLSNARMTHYQAMLLDAERVHFGPTVSLNPATLLPLPSGGNHHDCLQILAETHGTRPDLTDQPLPDADLTWYTDGSSFIRNGEREAGAAVTTESEVIWAAPLPPGTSAQRAELIALTQALKMAEGKKLTVYTDSRYAFATTHVHGEIYRRRGWLTSEGKEIKNKNEILALLEALFLPKRLSIIHCPGHQKGDSPQAKGNRLADDTAKKAATETHSSLTVLPAGKRTADGSEFEKRTADGSEFESPKKKAKVE

SEQ ID NO: 6483 - protein, 2003 aa, synthetic construct
MPAAKRVKLDGGDKKYSIGLDIGTNSVGWAVITDEYKVPSKKFKVLGNTDRHSIKKNLIGALLFDSGETAEATRLKRTARRRYTRRKNRICYLQEIFSNEMAKVDDSFFHRLEESFLVEEDKKHERHPIFGNIVDEVAYHEKYPTIYHLRKKLVDSTDKADLRLIYLALAHMIKFRGHFLIEGDLNPDNSDVDKLFIQLVQTYNQLFEENPINASGVDAKAILSARLSKSRRLENLIAQLPGEKKNGLFGNLIALSLGLTPNFKSNFDLAEDAKLQLSKDTYDDDLDNLLAQIGDQYADLFLAAKNLSDAILLSDILRVNTEITKAPLSASMIKRYDEHHQDLTLLKALVRQQLPEKYKEIFFDQSKNGYAGYIDGGASQEEFYKFIKPILEKMDGTEELLVKLNREDLLRKQRTFDNGSIPHQIHLGELHAILRRQEDFYPFLKDNREKIEKILTFRIPYYVGPLARGNSRFAWMTRKSEETITPWNFEEVVDKGASAQSFIERMTNFDKNLPNEKVLPKHSLLYEYFTVYNELTKVKYVTEGMRKPAFLSGEQKKAIVDLLFKTNRKVTVKQLKEDYFKKIECFDSVEISGVEDRFNASLGTYHDLLKIIKDKDFLDNEENEDILEDIVLTLTLFEDREMIEERLKTYAHLFDDKVMKQLKRRRYTGWGRLSRKLINGIRDKQSGKTILDFLKSDGFANRNFMQLIHDDSLTFKEDIQKAQVSGQGDSLHEHIANLAGSPAIKKGILQTVKVVDELVKVMGRHKPENIVIEMARENQTTQKGQKNSRERMKRIEEGIKELGSQILKEHPVENTQLQNEKLYLYYLQNGRDMYVDQELDINRLSDYDVDHIVPQSFLKDDSIDNKVLTRSDKARGKSDNVPSEEVVKKMKNYWRQLLNAKLITQRKFDNLTKAERGGLSELDKAGFIKRQLVETRQITKHVAQILDSRMNTKYDENDKLIREVKVITLKSKLVSDFRKDFQFYKVREINNYHHAHDAYLNAVVGTALIKKYPKLESEFVYGDYKVYDVRKMIAKSEQEIGKATAKYFFYSNIMNFFKTEITLANGEIRKRPLIETNGETGEIVWDKGRDFATVRKVLSMPQVNIVKKTEVQTGGFSKESILPKRNSDKLIARKKDWDPKKYGGFDSPTVAYSVLVVAKVEKGKSKKLKSVKELLGITIMERSSFEKNPIDFLEAKGYKEVKKDLIIKLPKYSLFELENGRKRMLASAGELQKGNELALPSKYVNFLYLASHYEKLKGSPEDNEQKQLFVEQHKHYLDEIIEQISEFSKRVILADANLDKVLSAYNKHRDKPIREQAENIIHLFTLTNLGAPAAFKYFDTTIDRKRYTSTKEVLDATLIHQSITGLYETRIDLSQLGGDGGPAPAPGGGLEHLPPPPEVSQFPLNPERLQALTDLVSRALEAKHIEPYQGPGNNPIFPVKKPNGKWRFIHDLRATNSLTRDLASPSPGPPDLTSLPQDLPHLRTIDLTDAFFQIPLPAVFQPYFAFTLPQPNNHGPGTRYSWRVLPQGFKNSPTLFQQQLSHILAPVRKAFPNSLIIQYMDDILLASPALRELTALTDKVTNALTKEGLPMSLEKTQATPGSIHFLGQVISPDCITYETLPSIHVKSIWSLAELQSMLGELQWVSKGTPVLRSSLHQLYLALRGHRDPRDTIELTSTQVQALKTIQKALALNCRSRLVSQLPILALIILRPTGTTAVLFQTKQKWPLVWLHTPHPATSLRPWGQLLANAIITLDKYSLQHYGQICKSFHHNISNQALTYYLHTSDQSSVAILLQHSHRFHNLGAQPSGPWRSLLQVPQIFQNIDVLRPPFIISPVVIDHAPCLFSDGATSKAAFILWDKQVIHQQVLPLPSTCSAQAGELFGLLAGLQKSKPWPALNIFLDSKFLIGHLRRMAWGAFLGPSTQCDLHARLFPLLQGKTVYVHHVRSHTLLQDPISRLNEATDALMLAPLLPLAGKRTADGSEFEKRTADGSEFESPKKKAKVE

SEQ ID NO: 6484 - protein, 2090 aa, synthetic construct
MPAAKRVKLDGGDKKYSIGLDIGTNSVGWAVITDEYKVPSKKFKVLGNTDRHSIKKNLIGALLFDSGETAEATRLKRTARRRYTRRKNRICYLQEIFSNEMAKVDDSFFHRLEESFLVEEDKKHERHPIFGNIVDEVAYHEKYPTIYHLRKKLVDSTDKADLRLIYLALAHMIKFRGHFLIEGDLNPDNSDVDKLFIQLVQTYNQLFEENPINASGVDAKAILSARLSKSRRLENLIAQLPGEKKNGLFGNLIALSLGLTPNFKSNFDLAEDAKLQLSKDTYDDDLDNLLAQIGDQYADLFLAAKNLSDAILLSDILRVNTEITKAPLSASMIKRYDEHHQDLTLLKALVRQQLPEKYKEIFFDQSKNGYAGYIDGGASQEEFYKFIKPILEKMDGTEELLVKLNREDLLRKQRTFDNGSIPHQIHLGELHAILRRQEDFYPFLKDNREKIEKILTFRIPYYVGPLARGNSRFAWMTRKSEETITPWNFEEVVDKGASAQSFIERMTNFDKNLPNEKVLPKHSLLYEYFTVYNELTKVKYVTEGMRKPAFLSGEQKKAIVDLLFKTNRKVTVKQLKEDYFKKIECFDSVEISGVEDRFNASLGTYHDLLKIIKDKDFLDNEENEDILEDIVLTLTLFEDREMIEERLKTYAHLFDDKVMKQLKRRRYTGWGRLSRKLINGIRDKQSGKTILDFLKSDGFANRNFMQLIHDDSLTFKEDIQKAQVSGQGDSLHEHIANLAGSPAIKKGILQTVKVVDELVKVMGRHKPENIVIEMARENQTTQKGQKNSRERMKRIEEGIKELGSQILKEHPVENTQLQNEKLYLYYLQNGRDMYVDQELDINRLSDYDVDHIVPQSFLKDDSIDNKVLTRSDKARGKSDNVPSEEVVKKMKNYWRQLLNAKLITQRKFDNLTKAERGGLSELDKAGFIKRQLVETRQITKHVAQILDSRMNTKYDENDKLIREVKVITLKSKLVSDFRKDFQFYKVREINNYHHAHDAYLNAVVGTALIKKYPKLESEFVYGDYKVYDVRKMIAKSEQEIGKATAKYFFYSNIMNFFKTEITLANGEIRKRPLIETNGETGEIVWDKGRDFATVRKVLSMPQVNIVKKTEVQTGGFSKESILPKRNSDKLIARKKDWDPKKYGGFDSPTVAYSVLVVAKVEKGKSKKLKSVKELLGITIMERSSFEKNPIDFLEAKGYKEVKKDLIIKLPKYSLFELENGRKRMLASAGELQKGNELALPSKYVNFLYLASHYEKLKGSPEDNEQKQLFVEQHKHYLDEIIEQISEFSKRVILADANLDKVLSAYNKHRDKPIREQAENIIHLFTLTNLGAPAAFKYFDTTIDRKRYTSTKEVLDATLIHQSITGLYETRIDLSQLGGDGGPAPAPGGTLNLEDEYRLYETSAEPEVSPGSTWLSDFPQAWAETGGMGLAVRQAPLIIPLKATSTPVSIKQYPMSQEAKLGIKPHIQRLLDQGILVPCQSPWNTPLLPVKKPGTNDYRPVQDLREVNKRVEDIHPTVPNPYNLLSGLPPSHRWYTVLDLKDAFFCLRLHPTSQPLFAFEWRDPGMGISGQLTWTRLPQGFKNSPTLFNEALHRDLADFRIQHPDLILLQYVDDILLAATSELDCQQGTRALLLTLGNLGYRASAKKAQLCQKQVKYLGYLLKEGQRWLTEARKETVMGQPTPKTPRQLREFLGKAGFCRLFIPGFAEMAAPLYPLTKPGTLFNWGPDQQKAYQEIKQALLTAPALGLPDLTKPFELFVDEKQGYAKGVLTQKLGPWRRPVAYLSKKLDPVAAGWPPCLRMVAAIAVLRKDAGKLTMGQPLVILAPHAVEALVKQPPDRWLSNARMTHYQAMLLDTDRVQFGPVVALNPATLLPLPEEGAPHDCLEILAETHGTRPDLTDQPIPDADHTWYTDGSSFLQEGQRKAGAAVTTETEVIWARALPAGTSAQRAELIALTQALKMAEGKRLNVYTDSRYAFATAHIHGEIYRRRGWLTSEGREIKNKSEILALLKALFLPKRLSIIHCLGHQKGDSAEARGNRLADQAAREAAIKTPPDTSTLLAGKRTADGSEFEKRTADGSEFESPKKKAKVE

SEQ ID NO: 6485 - protein, 2110 aa, synthetic construct
MPAAKRVKLDGGDKKYSIGLDIGTNSVGWAVITDEYKVPSKKFKVLGNTDRHSIKKNLIGALLFDSGETAEATRLKRTARRRYTRRKNRICYLQEIFSNEMAKVDDSFFHRLEESFLVEEDKKHERHPIFGNIVDEVAYHEKYPTIYHLRKKLVDSTDKADLRLIYLALAHMIKFRGHFLIEGDLNPDNSDVDKLFIQLVQTYNQLFEENPINASGVDAKAILSARLSKSRRLENLIAQLPGEKKNGLFGNLIALSLGLTPNFKSNFDLAEDAKLQLSKDTYDDDLDNLLAQIGDQYADLFLAAKNLSDAILLSDILRVNTEITKAPLSASMIKRYDEHHQDLTLLKALVRQQLPEKYKEIFFDQSKNGYAGYIDGGASQEEFYKFIKPILEKMDGTEELLVKLNREDLLRKQRTFDNGSIPHQIHLGELHAILRRQEDFYPFLKDNREKIEKILTFRIPYYVGPLARGNSRFAWMTRKSEETITPWNFEEVVDKGASAQSFIERMTNFDKNLPNEKVLPKHSLLYEYFTVYNELTKVKYVTEGMRKPAFLSGEQKKAIVDLLFKTNRKVTVKQLKEDYFKKIECFDSVEISGVEDRFNASLGTYHDLLKIIKDKDFLDNEENEDILEDIVLTLTLFEDREMIEERLKTYAHLFDDKVMKQLKRRRYTGWGRLSRKLINGIRDKQSGKTILDFLKSDGFANRNFMQLIHDDSLTFKEDIQKAQVSGQGDSLHEHIANLAGSPAIKKGILQTVKVVDELVKVMGRHKPENIVIEMARENQTTQKGQKNSRERMKRIEEGIKELGSQILKEHPVENTQLQNEKLYLYYLQNGRDMYVDQELDINRLSDYDVDHIVPQSFLKDDSIDNKVLTRSDKARGKSDNVPSEEVVKKMKNYWRQLLNAKLITQRKFDNLTKAERGGLSELDKAGFIKRQLVETRQITKHVAQILDSRMNTKYDENDKLIREVKVITLKSKLVSDFRKDFQFYKVREINNYHHAHDAYLNAVVGTALIKKYPKLESEFVYGDYKVYDVRKMIAKSEQEIGKATAKYFFYSNIMNFFKTEITLANGEIRKRPLIETNGETGEIVWDKGRDFATVRKVLSMPQVNIVKKTEVQTGGFSKESILPKRNSDKLIARKKDWDPKKYGGFDSPTVAYSVLVVAKVEKGKSKKLKSVKELLGITIMERSSFEKNPIDFLEAKGYKEVKKDLIIKLPKYSLFELENGRKRMLASAGELQKGNELALPSKYVNFLYLASHYEKLKGSPEDNEQKQLFVEQHKHYLDEIIEQISEFSKRVILADANLDKVLSAYNKHRDKPIREQAENIIHLFTLTNLGAPAAFKYFDTTIDRKRYTSTKEVLDATLIHQSITGLYETRIDLSQLGGDGGPAPAPGGTLNIEDEYRLHETSKEPDVSLGSTWLSDFPQAWAETGGMGLAVRQAPLIIPLKATSTPVSIKQYPMSQEARLGIKPHIQRLLDQGILVPCQSPWNTPLLPVKKPGTNDYRPVQDLREVNKRVEDIHPTVPNPYNLLSGLPPSHQWYTVLDLKDAFFCLRLHPTSQPLFAFEWRDPEMGISGQLTWTRLPQGFKNSPTLFNEALHRDLADFRIQHPDLILLQYVDDLLLAATSELDCQQGTRALLQTLGNLGYRASAKKAQICQKQVKYLGYLLKEGQRWLTEARKETVMGQPTPKTPRQLREFLGKAGFCRLFIPGFAEMAAPLYPLTKPGTLFNWGPDQQKAYQEIKQALLTAPALGLPDLTKPFELFVDEKQGYAKGVLTQKLGPWRRPVAYLSKKLDPVAAGWPPCLRMVAAIAVLTKDAGKLTMGQPLVILAPHAVEALVKQPPDRWLSNARMTHYQALLLDTDRVQFGPVVALNPATLLPLPEEGLQHNCLDILAEAHGTRPDLTDQPLPDADHTWYTDGSSLLQEGQRKAGAAVTTETEVIWAKALPAGTSAQRAELIALTQALKMAEGKKLNVYTDSRYAFATAHIHGEIYRRRGWLTSEGKEIKNKDEILALLKALFLPKRLSIIHCPGHQKGHSAEARGNRMADQAARKAAITETPDTSTLLIENSSPSGGSKRTADGSEFEAGKRTADGSEFEKRTADGSEFESPKKKAKVE

SEQ ID NO: 6486 - protein, 2110 aa, synthetic construct; identical to SEQ ID NO: 6485

SEQ ID NO: 6487 - protein, 2110 aa, synthetic construct
MPAAKRVKLDGGDKKYSIGLDIGTNSVGWAVITDEYKVPSKKFKVLGNTDRHSIKKNLIGALLFDSGETAEATRLKRTARRRYTRRKNRICYLQEIFSNEMAKVDDSFFHRLEESFLVEEDKKHERHPIFGNIVDEVAYHEKYPTIYHLRKKLVDSTDKADLRLIYLALAHMIKFRGHFLIEGDLNPDNSDVDKLFIQLVQTYNQLFEENPINASGVDAKAILSARLSKSRRLENLIAQLPGEKKNGLFGNLIALSLGLTPNFKSNFDLAEDAKLQLSKDTYDDDLDNLLAQIGDQYADLFLAAKNLSDAILLSDILRVNTEITKAPLSASMIKRYDEHHQDLTLLKALVRQQLPEKYKEIFFDQSKNGYAGYIDGGASQEEFYKFIKPILEKMDGTEELLVKLNREDLLRKQRTFDNGSIPHQIHLGELHAILRRQEDFYPFLKDNREKIEKILTFRIPYYVGPLARGNSRFAWMTRKSEETITPWNFEEVVDKGASAQSFIERMTNFDKNLPNEKVLPKHSLLYEYFTVYNELTKVKYVTEGMRKPAFLSGEQKKAIVDLLFKTNRKVTVKQLKEDYFKKIECFDSVEISGVEDRFNASLGTYHDLLKIIKDKDFLDNEENEDILEDIVLTLTLFEDREMIEERLKTYAHLFDDKVMKQLKRRRYTGWGRLSRKLINGIRDKQSGKTILDFLKSDGFANRNFMQLIHDDSLTFKEDIQKAQVSGQGDSLHEHIANLAGSPAIKKGILQTVKVVDELVKVMGRHKPENIVIEMARENQTTQKGQKNSRERMKRIEEGIKELGSQILKEHPVENTQLQNEKLYLYYLQNGRDMYVDQELDINRLSDYDVDHIVPQSFLKDDSIDNKVLTRSDKARGKSDNVPSEEVVKKMKNYWRQLLNAKLITQRKFDNLTKAERGGLSELDKAGFIKRQLVETRQITKHVAQILDSRMNTKYDENDKLIREVKVITLKSKLVSDFRKDFQFYKVREINNYHHAHDAYLNAVVGTALIKKYPKLESEFVYGDYKVYDVRKMIAKSEQEIGKATAKYFFYSNIMNFFKTEITLANGEIRKRPLIETNGETGEIVWDKGRDFATVRKVLSMPQVNIVKKTEVQTGGFSKESILPKRNSDKLIARKKDWDPKKYGGFDSPTVAYSVLVVAKVEKGKSKKLKSVKELLGITIMERSSFEKNPIDFLEAKGYKEVKKDLIIKLPKYSLFELENGRKRMLASAGELQKGNELALPSKYVNFLYLASHYEKLKGSPEDNEQKQLFVEQHKHYLDEIIEQISEFSKRVILADANLDKVLSAYNKHRDKPIREQAENIIHLFTLTNLGAPAAFKYFDTTIDRKRYTSTKEVLDATLIHQSITGLYETRIDLSQLGGDGGPAPAPGGVQEISDSRPMLHIYLNGRRFLGLLDTGADKTCIAGRDWPANWPIHQTESSLQGLGMACGVARSSQPLRWQHEDKSGIIHPFVIPTLPFTLWGRDIMKDIKVRLMTDSPDDSQDLMIGAIESNLFADQISWKSDQPVWLNQWPLKQEKLQALQQLVTEQLQLGHLEESNSPWNTPVFVIKKKSGKWRLLQDLRAVNATMHDMGALQPGLPSPVAVPKGWEIIIIDLQDCFFNIKLHPEDCKRFAFSVPSPNFKRPYQRFQWKVLPQGMKNSPTLCQKFVDKAILTVRDKYQDSYIVHYMDDILLAHPSRSIVDEILTSMIQALNKHGLVVSTEKIQKYDNLKYLGTHIQGDSVSYQKLQIRTDKLRTLNDFQKLLGNINWIRPFLKLTTGELKPLFEILNGDSNPISTRKLTPEACKALQLMNERLSTARVKRLDLSQPWSLCILKTEYTPTACLWQDGVVEWIHLPHISPKVITPYDIFCTQLIIKGRHRSKELFSKDPDYIVVPYTKVQFDLLLQEKEDWPISLLGFLGEVHFHLPKDPLLTFTLQTAIIFPHMTSTTPLEKGIVIFTDGSANGRSVTYIQGREPIIKENTQNTAQQAEIVAVITAFEEVSQPFNLYTDSKYVTGLFPEIETATLSPRTKIYTELKHLQRLIHKRQEKFYIGHIRGHTGLPGPLAQGNAYADSLTRILTAAGKRTADGSEFEKRTADGSEFESPKKKAKVE

SEQ ID NO: 6488 - protein, 2084 aa, synthetic construct
MPAAKRVKLDGGDKKYSIGLDIGTNSVGWAVITDEYKVPSKKFKVLGNTDRHSIKKNLIGALLFDSGETAEATRLKRTARRRYTRRKNRICYLQEIFSNEMAKVDDSFFHRLEESFLVEEDKKHERHPIFGNIVDEVAYHEKYPTIYHLRKKLVDSTDKADLRLIYLALAHMIKFRGHFLIEGDLNPDNSDVDKLFIQLVQTYNQLFEENPINASGVDAKAILSARLSKSRRLENLIAQLPGEKKNGLFGNLIALSLGLTPNFKSNFDLAEDAKLQLSKDTYDDDLDNLLAQIGDQYADLFLAAKNLSDAILLSDILRVNTEITKAPLSASMIKRYDEHHQDLTLLKALVRQQLPEKYKEIFFDQSKNGYAGYIDGGASQEEFYKFIKPILEKMDGTEELLVKLNREDLLRKQRTFDNGSIPHQIHLGELHAILRRQEDFYPFLKDNREKIEKILTFRIPYYVGPLARGNSRFAWMTRKSEETITPWNFEEVVDKGASAQSFIERMTNFDKNLPNEKVLPKHSLLYEYFTVYNELTKVKYVTEGMRKPAFLSGEQKKAIVDLLFKTNRKVTVKQLKEDYFKKIECFDSVEISGVEDRFNASLGTYHDLLKIIKDKDFLDNEENEDILEDIVLTLTLFEDREMIEERLKTYAHLFDDKVMKQLKRRRYTGWGRLSRKLINGIRDKQSGKTILDFLKSDGFANRNFMQLIHDDSLTFKEDIQKAQVSGQGDSLHEHIANLAGSPAIKKGILQTVKVVDELVKVMGRHKPENIVIEMARENQTTQKGQKNSRERMKRIEEGIKELGSQILKEHPVENTQLQNEKLYLYYLQNGRDMYVDQELDINRLSDYDVDHIVPQSFLKDDSIDNKVLTRSDKARGKSDNVPSEEVVKKMKNYWRQLLNAKLITQRKFDNLTKAERGGLSELDKAGFIKRQLVETRQITKHVAQILDSRMNTKYDENDKLIREVKVITLKSKLVSDFRKDFQFYKVREINNYHHAHDAYLNAVVGTALIKKYPKLESEFVYGDYKVYDVRKMIAKSEQEIGKATAKYFFYSNIMNFFKTEITLANGEIRKRPLIETNGETGEIVWDKGRDFATVRKVLSMPQVNIVKKTEVQTGGFSKESILPKRNSDKLIARKKDWDPKKYGGFDSPTVAYSVLVVAKVEKGKSKKLKSVKELLGITIMERSSFEKNPIDFLEAKGYKEVKKDLIIKLPKYSLFELENGRKRMLASAGELQKGNELALPSKYVNFLYLASHYEKLKGSPEDNEQKQLFVEQHKHYLDEIIEQISEFSKRVILADANLDKVLSAYNKHRDKPIREQAENIIHLFTLTNLGAPAAFKYFDTTIDRKRYTSTKEVLDATLIHQSITGLYETRIDLSQLGGDGGPAPAPGGTLQLDDEYRLYSPLVKPDQNIQFWLEQFPQAWAETAGMGLAKQVPPQVIQLKASATPVSVRQYPLSKEAQEGIRPHVQRLIQQGILVPVQSPWNTPLLPVRKPGTNDYRPVQDLREVNKRVQDIHPTVPNPYNLLCALPPQRSWYTVLDLKDAFFCLRLHPTSQPLFAFEWRDPGTGRTGQLTWTRLPQGFKNSPTIFDEALHRDLANFRIQHPQVTLLQYVDDLLLAGATKQDCLEGTKALLLELSDLGYRASAKKAQICRREVTYLGYSLRDGQRWLTEARKKTVVQIPAPTTAKQVREFLGTAGFCRLWIPGFATLAAPLYPLTKEKGEFSWAPEHQKAFDAIKKALLSAPALALPDVTKPFTLYVDERKGVARGVLTQTLGPWRRPVAYLSKKLDPVASGWPVCLKAIAAVAILVKDADKLTLGQNITVIAPHALENIVRQPPDRWMTNARMTHYQSLLLTERVTFAPPAALNPATLLPEETDEPVTHDCHQLLIEETGVRKDLTDIPLTGEVLTWFTDGSSYVVEGKRMAGAAVVDGTRTIWASSLPEGTSAQKAELMALTQALRLAEGKSINIYTDSRYAFATAHVHGAIYKQRGLLTSAGREIKNKEEILSLLEALHLPKRLAIIHCPGHQKAKDPISRGNQMADRVAKQAAQGVNLLAGKRTADGSEFEKRTADGSEFESPKKKAKVE

SEQ ID NO: 6489 - protein, 2081 aa, synthetic construct
MPAAKRVKLDGGDKKYSIGLDIGTNSVGWAVITDEYKVPSKKFKVLGNTDRHSIKKNLIGALLFDSGETAEATRLKRTARRRYTRRKNRICYLQEIFSNEMAKVDDSFFHRLEESFLVEEDKKHERHPIFGNIVDEVAYHEKYPTIYHLRKKLVDSTDKADLRLIYLALAHMIKFRGHFLIEGDLNPDNSDVDKLFIQLVQTYNQLFEENPINASGVDAKAILSARLSKSRRLENLIAQLPGEKKNGLFGNLIALSLGLTPNFKSNFDLAEDAKLQLSKDTYDDDLDNLLAQIGDQYADLFLAAKNLSDAILLSDILRVNTEITKAPLSASMIKRYDEHHQDLTLLKALVRQQLPEKYKEIFFDQSKNGYAGYIDGGASQEEFYKFIKPILEKMDGTEELLVKLNREDLLRKQRTFDNGSIPHQIHLGELHAILRRQEDFYPFLKDNREKIEKILTFRIPYYVGPLARGNSRFAWMTRKSEETITPWNFEEVVDKGASAQSFIERMTNFDKNLPNEKVLPKHSLLYEYFTVYNELTKVKYVTEGMRKPAFLSGEQKKAIVDLLFKTNRKVTVKQLKEDYFKKIECFDSVEISGVEDRFNASLGTYHDLLKIIKDKDFLDNEENEDILEDIVLTLTLFEDREMIEERLKTYAHLFDDKVMKQLKRRRYTGWGRLSRKLINGIRDKQSGKTILDFLKSDGFANRNFMQLIHDDSLTFKEDIQKAQVSGQGDSLHEHIANLAGSPAIKKGILQTVKVVDELVKVMGRHKPENIVIEMARENQTTQKGQKNSRERMKRIEEGIKELGSQILKEHPVENTQLQNEKLYLYYLQNGRDMYVDQELDINRLSDYDVDHIVPQSFLKDDSIDNKVLTRSDKARGKSDNVPSEEVVKKMKNYWRQLLNAKLITQRKFDNLTKAERGGLSELDKAGFIKRQLVETRQITKHVAQILDSRMNTKYDENDKLIREVKVITLKSKLVSDFRKDFQFYKVREINNYHHAHDAYLNAVVGTALIKKYPKLESEFVYGDYKVYDVRKMIAKSEQEIGKATAKYFFYSNIMNFFKTEITLANGEIRKRPLIETNGETGEIVWDKGRDFATVRKVLSMPQVNIVKKTEVQTGGFSKESILPKRNSDKLIARKKDWDPKKYGGFDSPTVAYSVLVVAKVEKGKSKKLKSVKELLGITIMERSSFEKNPIDFLEAKGYKEVKKDLIIKLPKYSLFELENGRKRMLASAGELQKGNELALPSKYVNFLYLASHYEKLKGSPEDNEQKQLFVEQHKHYLDEIIEQISEFSKRVILADANLDKVLSAYNKHRDKPIREQAENIIHLFTLTNLGAPAAFKYFDTTIDRKRYTSTKEVLDATLIHQSITGLYETRIDLSQLGGDGGPAPAPGGIPWLMKKPLQLTTLVPLQEYEERLLKQTMLTGSYKEKLQSLFLKYDALWQHWENQVGHRRIKPHHIATGTVNPRPQKQYPINPKAKASIQTVINDLLKQGVLIQQNSIMNTPVYPVPKPDGKWRMVLDYREVNKTIPLIAAQNQHSAGILSSIFRGKYKTTLDLSNGFWAHSITPESYWLTAFTWLGQQYCWTRLPQGFLNSPALFNADVVDLLKEVPNVQVYVDDIYISHDDPREHLEQLEKVFSLLLNAGYVVSLKKSEIAQHEVEFLGFNITKEGRGLTETFKQKLLNITPPRDLKQLQSILGKLNFARNFIPNFSELVKPLYNIIATAPGKYITWTTDNSQQLQNIISMLNSAENLEERNPEVRLIMKVNTSPSAGYIRFYNEFAKRPIMYLNYVYTKAEVKFTNTEKLLTTIHKGLIKALDLGMGQEILVYSPIVSMTKIQKTPLPERKALPIRWITWMSYLEDPRIQFHYDKTLPELQQVPTVTDDIIAKIKHPSEFSMVFYTDGSAIKHPNVNKSHNAGMGIAQVQFKPEFTVINTWSIPLGDHTAQLAEVAAVEFACKKALKIDGPVLIVTDSFYVAESVNKELPYWQSNGFFNNKKKPLKHVSKWKSIADCIQLKPDIIIIHEKGHQPTASTFHTEGNNLADKLATQGSYVVNAGKRTADGSEFEKRTADGSEFESPKKKAKVE

SEQ ID NO: 6490 - protein, 2170 aa, synthetic construct
MPAAKRVKLDGGDKKYSIGLDIGTNSVGWAVITDEYKVPSKKFKVLGNTDRHSIKKNLIGALLFDSGETAEATRLKRTARRRYTRRKNRICYLQEIFSNEMAKVDDSFFHRLEESFLVEEDKKHERHPIFGNIVDEVAYHEKYPTIYHLRKKLVDSTDKADLRLIYLALAHMIKFRGHFLIEGDLNPDNSDVDKLFIQLVQTYNQLFEENPINASGVDAKAILSARLSKSRRLENLIAQLPGEKKNGLFGNLIALSLGLTPNFKSNFDLAEDAKLQLSKDTYDDDLDNLLAQIGDQYADLFLAAKNLSDAILLSDILRVNTEITKAPLSASMIKRYDEHHQDLTLLKALVRQQLPEKYKEIFFDQSKNGYAGYIDGGASQEEFYKFIKPILEKMDGTEELLVKLNREDLLRKQRTFDNGSIPHQIHLGELHAILRRQEDFYPFLKDNREKIEKILTFRIPYYVGPLARGNSRFAWMTRKSEETITPWNFEEVVDKGASAQSFIERMTNFDKNLPNEKVLPKHSLLYEYFTVYNELTKVKYVTEGMRKPAFLSGEQKKAIVDLLFKTNRKVTVKQLKEDYFKKIECFDSVEISGVEDRFNASLGTYHDLLKIIKDKDFLDNEENEDILEDIVLTLTLFEDREMIEERLKTYAHLFDDKVMKQLKRRRYTGWGRLSRKLINGIRDKQSGKTILDFLKSDGFANRNFMQLIHDDSLTFKEDIQKAQVSGQGDSLHEHIANLAGSPAIKKGILQTVKVVDELVKVMGRHKPENIVIEMARENQTTQKGQKNSRERMKRIEEGIKELGSQILKEHPVENTQLQNEKLYLYYLQNGRDMYVDQELDINRLSDYDVDHIVPQSFLKDDSIDNKVLTRSDKARGKSDNVPSEEVVKKMKNYWRQLLNAKLITQRKFDNLTKAERGGLSELDKAGFIKRQLVETRQITKHVAQILDSRMNTKYDENDKLIREVKVITLKSKLVSDFRKDFQFYKVREINNYHHAHDAYLNAVVGTALIKKYPKLESEFVYGDYKVYDVRKMIAKSEQEIGKATAKYFFYSNIMNFFKTEITLANGEIRKRPLIETNGETGEIVWDKGRDFATVRKVLSMPQVNIVKKTEVQTGGFSKESILPKRNSDKLIARKKDWDPKKYGGFDSPTVAYSVLVVAKVEKGKSKKLKSVKELLGITIMERSSFEKNPIDFLEAKGYKEVKKDLIIKLPKYSLFELENGRKRMLASAGELQKGNELALPSKYVNFLYLASHYEKLKGSPEDNEQKQLFVEQHKHYLDEIIEQISEFSKRVILADANLDKVLSAYNKHRDKPIREQAENIIHLFTLTNLGAPAAFKYFDTTIDRKRYTSTKEVLDATLIHQSITGLYETRIDLSQLGGDGGPAPAPGGMDPLQLLQPLEAEIKGTKLKAHWNSGATITCVPQAFLEEEVPIKNIWIKTIHGEKEQPVYYLTFKIQGRKVEAEVISSPYDYILVSPSDIPWLMKKPLQLTTLVPLQEYEERLLKQTMLTGSYKEKLQSLFLKYDALWQHWENQVGHRRIKPHHIATGTVNPRPQKQYPINPKAKASIQTVINDLLKQGVLIQQNSIMNTPVYPVPKPDGKWRMVLDYREVNKTIPLIAAQNQHSAGILSSIFRGKYKTTLDLSNGFWAHSITPESYWLTAFTWLGQQYCWTRLPQGFLNSPALFNADVVDLLKEVPNVQVYVDDIYISHDDPREHLEQLEKVFSLLLNAGYVVSLKKSEIAQHEVEFLGFNITKEGRGLTETFKQKLLNITPPRDLKQLQSILGKLNFARNFIPNFSELVKPLYNIIATAPGKYITWTTDNSQQLQNIISMLNSAENLEERNPEVRLIMKVNTSPSAGYIRFYNEFAKRPIMYLNYVYTKAEVKFTNTEKLLTTIHKGLIKALDLGMGQEILVYSPIVSMTKIQKTPLPERKALPIRWITWMSYLEDPRIQFHYDKTLPELQQVPTVTDDIIAKIKHPSEFSMVFYTDGSAIKHPNVNKSHNAGMGIAQVQFKPEFTVINTWSIPLGDHTAQLAEVAAVEFACKKALKIDGPVLIVTDSFYVAESVNKELPYWQSNGFFNNKKKPLKHVSKWKSIADCIQLKPDIIIIHEKGHQPTASTFHTEGNNLADKLATQGSYVVNAGKRTADGSEFEKRTADGSEFESPKKKAKVE

SEQ ID NO: 6491 - protein, 2090 aa, synthetic construct
MPAAKRVKLDGGDKKYSIGLDIGTNSVGWAVITDEYKVPSKKFKVLGNTDRHSIKKNLIGALLFDSGETAEATRLKRTARRRYTRRKNRICYLQEIFSNEMAKVDDSFFHRLEESFLVEEDKKHERHPIFGNIVDEVAYHEKYPTIYHLRKKLVDSTDKADLRLIYLALAHMIKFRGHFLIEGDLNPDNSDVDKLFIQLVQTYNQLFEENPINASGVDAKAILSARLSKSRRLENLIAQLPGEKKNGLFGNLIALSLGLTPNFKSNFDLAEDAKLQLSKDTYDDDLDNLLAQIGDQYADLFLAAKNLSDAILLSDILRVNTEITKAPLSASMIKRYDEHHQDLTLLKALVRQQLPEKYKEIFFDQSKNGYAGYIDGGASQEEFYKFIKPILEKMDGTEELLVKLNREDLLRKQRTFDNGSIPHQIHLGELHAILRRQEDFYPFLKDNREKIEKILTFRIPYYVGPLARGNSRFAWMTRKSEETITPWNFEEVVDKGASAQSFIERMTNFDKNLPNEKVLPKHSLLYEYFTVYNELTKVKYVTEGMRKPAFLSGEQKKAIVDLLFKTNRKVTVKQLKEDYFKKIECFDSVEISGVEDRFNASLGTYHDLLKIIKDKDFLDNEENEDILEDIVLTLTLFEDREMIEERLKTYAHLFDDKVMKQLKRRRYTGWGRLSRKLINGIRDKQSGKTILDFLKSDGFANRNFMQLIHDDSLTFKEDIQKAQVSGQGDSLHEHIANLAGSPAIKKGILQTVKVVDELVKVMGRHKPENIVIEMARENQTTQKGQKNSRERMKRIEEGIKELGSQILKEHPVENTQLQNEKLYLYYLQNGRDMYVDQELDINRLSDYDVDHIVPQSFLKDDSIDNKVLTRSDKARGKSDNVPSEEVVKKMKNYWRQLLNAKLITQRKFDNLTKAERGGLSELDKAGFIKRQLVETRQITKHVAQILDSRMNTKYDENDKLIREVKVITLKSKLVSDFRKDFQFYKVREINNYHHAHDAYLNAVVGTALIKKYPKLESEFVYGDYKVYDVRKMIAKSEQEIGKATAKYFFYSNIMNFFKTEITLANGEIRKRPLIETNGETGEIVWDKGRDFATVRKVLSMPQVNIVKKTEVQTGGFSKESILPKRNSDKLIARKKDWDPKKYGGFDSPTVAYSVLVVAKVEKGKSKKLKSVKELLGITIMERSSFEKNPIDFLEAKGYKEVKKDLIIKLPKYSLFELENGRKRMLASAGELQKGNELALPSKYVNFLYLASHYEKLKGSPEDNEQKQLFVEQHKHYLDEIIEQISEFSKRVILADANLDKVLSAYNKHRDKPIREQAENIIHLFTLTNLGAPAAFKYFDTTIDRKRYTSTKEVLDATLIHQSITGLYETRIDLSQLGGDGGPAPAPGGTLNIEDEYRLHETSKEPDVPLGSTWLSDFPQAWAETGGMGLAVRQAPLIIPLKATSTPVSIKQYPMSQEARLGIKPHIQRLLDQGILVPCQSPWNTPLLPVKKPGTNDYRPVQDLREVNKRVEDIHPTVPNPYNLLSGLPPSHQWYTVLDLKDAFFCLRLHPTSQPLFAFEWRDPEMGISGQLTWTRLPQGFKNSPTLFNEALHRDLADFRIQHPDLILLQYVDDLLLAATSEQDCQRGTRALLQTLGNLGYRASAKKAQICQKQVKYLGYLLKEGQRWLTEARKETVMGQPTPKTPRQLREFLGKAGFCRLFIPGFAEMAAPLYPLTKPGTLFNWGPDQQKAYQEIKQALLTAPALGLPDLTKPFELFVDEKQGYAKGVLTQKLGPWRRPVAYLSKKLDPVAAGWPPCLRMVAAIAVLTKDAGKLTMGQPLVILAPHAVEALVKQPPDRWLSNARMTHYQAMLLDTDRVQFGPVVALNPATLLPLPEKEAPHDCLEILAETHGTRPDLTDQPIPDADYTWYTDGSSFLQEGQRRAGAAVTTETEVIWARALPAGTSAQRAELIALTQALKMAEGKKLNVYTDSRYAFATAHVHGEIYRRRGWLTSEGREIKNKNEILALLKALFLPKRLSIIHCPGHQKGNSAEARGNRMADQAAREAAMKAVLETSTLLAGKRTADGSEFEKRTADGSEFESPKKKAKVE

SEQ ID NO: 6492 - protein, 2094 aa, synthetic construct
MPAAKRVKLDGGDKKYSIGLDIGTNSVGWAVITDEYKVPSKKFKVLGNTDRHSIKKNLIGALLFDSGETAEATRLKRTARRRYTRRKNRICYLQEIFSNEMAKVDDSFFHRLEESFLVEEDKKHERHPIFGNIVDEVAYHEKYPTIYHLRKKLVDSTDKADLRLIYLALAHMIKFRGHFLIEGDLNPDNSDVDKLFIQLVQTYNQLFEENPINASGVDAKAILSARLSKSRRLENLIAQLPGEKKNGLFGNLIALSLGLTPNFKSNFDLAEDAKLQLSKDTYDDDLDNLLAQIGDQYADLFLAAKNLSDAILLSDILRVNTEITKAPLSASMIKRYDEHHQDLTLLKALVRQQLPEKYKEIFFDQSKNGYAGYIDGGASQEEFYKFIKPILEKMDGTEELLVKLNREDLLRKQRTFDNGSIPHQIHLGELHAILRRQEDFYPFLKDNREKIEKILTFRIPYYVGPLARGNSRFAWMTRKSEETITPWNFEEVVDKGASAQSFIERMTNFDKNLPNEKVLPKHSLLYEYFTVYNELTKVKYVTEGMRKPAFLSGEQKKAIVDLLFKTNRKVTVKQLKEDYFKKIECFDSVEISGVEDRFNASLGTYHDLLKIIKDKDFLDNEENEDILEDIVLTLTLFEDREMIEERLKTYAHLFDDKVMKQLKRRRYTGWGRLSRKLINGIRDKQSGKTILDFLKSDGFANRNFMQLIHDDSLTFKEDIQKAQVSGQGDSLHEHIANLAGSPAIKKGILQTVKVVDELVKVMGRHKPENIVIEMARENQTTQKGQKNSRERMKRIEEGIKELGSQILKEHPVENTQLQNEKLYLYYLQNGRDMYVDQELDINRLSDYDVDHIVPQSFLKDDSIDNKVLTRSDKARGKSDNVPSEEVVKKMKNYWRQLLNAKLITQRKFDNLTKAERGGLSELDKAGFIKRQLVETRQITKHVAQILDSRMNTKYDENDKLIREVKVITLKSKLVSDFRKDFQFYKVREINNYHHAHDAYLNAVVGTALIKKYPKLESEFVYGDYKVYDVRKMIAKSEQEIGKATAKYFFYSNIMNFFKTEITLANGEIRKRPLIETNGETGEIVWDKGRDFATVRKVLSMPQVNIVKKTEVQTGGFSKESILPKRNSDKLIARKKDWDPKKYGGFDSPTVAYSVLVVAKVEKGKSKKLKSVKELLGITIMERSSFEKNPIDFLEAKGYKEVKKDLIIKLPKYSLFELENGRKRMLASAGELQKGNELALPSKYVNFLYLASHYEKLKGSPEDNEQKQLFVEQHKHYLDEIIEQISEFSKRVILADANLDKVLSAYNKHRDKPIREQAENIIHLFTLTNLGAPAAFKYFDTTIDRKRYTSTKEVLDATLIHQSITGLYETRIDLSQLGGDGGPAPAPAPGGTAPLEEEYRLFLEAPIQNVTLLEQWKREIPKVWAEINPPGLASTQAPIHVQLLSTALPVRVRQYPITLEAKRSLRETIRKFRAAGILRPVHSPWNTPLLPVRKSGTSEYRMVQDLREVNKRVETIHPTVPNPYTLLSLLPPDRIWYSVLDLKDAFFCIPLAPESQLIFAFEWADAEEGESGQLTWTRLPQGFKNSPTLFNEALNRDLQGFRLDHPSVSLLQYVDDLLIAADTQAACLSATRDLLMTLAELGYRVSGKKAQLCQEEVTYLGFKIHKGSRSLSNSRTQAILQIPVPKTKRQVREFLGTIGYCRLWIPGFAELAQPLYAATRPGNDPLVWGEKEEEAFQSLKLALTQPPALALPSLDKPFQLFVEETSGAAKGVLTQALGPWKRPVAYLSKRLDPVAAGWPRCLRAIAAAALLTREASKLTFGQDIEITSSHNLESLLRSPPDKWLTNARITQYQVLLLDPPRVRFKQTAALNPATLLPETDDTLPIHHCLDTLDSLTSTRPDLTDQPLAQAEATLFTDGSSYIRDGKRYAGAAVVTLDSVIWAEPLPIGTSAQKAELIALTKALEWSKDKSVNIYTDSRYAFATLHVHGMIYRERGWLTAGGKAIKNAPEILALLTAVWLPKRVAVMHCKGHQKDDAPTSTGNRRADEVAREVAIRPLSTQATISAGKRTADGSEFEKRTADGSEFESPKKKAKVE

SEQ ID NO: 6493 - protein, 2098 aa, synthetic construct
MPAAKRVKLDGGDKKYSIGLDIGTNSVGWAVITDEYKVPSKKFKVLGNTDRHSIKKNLIGALLFDSGETAEATRLKRTARRRYTRRKNRICYLQEIFSNEMAKVDDSFFHRLEESFLVEEDKKHERHPIFGNIVDEVAYHEKYPTIYHLRKKLVDSTDKADLRLIYLALAHMIKFRGHFLIEGDLNPDNSDVDKLFIQLVQTYNQLFEENPINASGVDAKAILSARLSKSRRLENLIAQLPGEKKNGLFGNLIALSLGLTPNFKSNFDLAEDAKLQLSKDTYDDDLDNLLAQIGDQYADLFLAAKNLSDAILLSDILRVNTEITKAPLSASMIKRYDEHHQDLTLLKALVRQQLPEKYKEIFFDQSKNGYAGYIDGGASQEEFYKFIKPILEKMDGTEELLVKLNREDLLRKQRTFDNGSIPHQIHLGELHAILRRQEDFYPFLKDNREKIEKILTFRIPYYVGPLARGNSRFAWMTRKSEETITPWNFEEVVDKGASAQSFIERMTNFDKNLPNEKVLPKHSLLYEYFTVYNELTKVKYVTEGMRKPAFLSGEQKKAIVDLLFKTNRKVTVKQLKEDYFKKIECFDSVEISGVEDRFNASLGTYHDLLKIIKDKDFLDNEENEDILEDIVLTLTLFEDREMIEERLKTYAHLFDDKVMKQLKRRRYTGWGRLSRKLINGIRDKQSGKTILDFLKSDGFANRNFMQLIHDDSLTFKEDIQKAQVSGQGDSLHEHIANLAGSPAIKKGILQTVKVVDELVKVMGRHKPENIVIEMARENQTTQKGQKNSRERMKRIEEGIKELGSQILKEHPVENTQLQNEKLYLYYLQNGRDMYVDQELDINRLSDYDVDHIVPQSFLKDDSIDNKVLTRSDKARGKSDNVPSEEVVKKMKNYWRQLLNAKLITQRKFDNLTKAERGGLSELDKAGFIKRQLVETRQITKHVAQILDSRMNTKYDENDKLIREVKVITLKSKLVSDFRKDFQFYKVREINNYHHAHDAYLNAVVGTALIKKYPKLESEFVYGDYKVYDVRKMIAKSEQEIGKATAKYFFYSNIMNFFKTEITLANGEIRKRPLIETNGETGEIVWDKGRDFATVRKVLSMPQVNIVKKTEVQTGGFSKESILPKRNSDKLIARKKDWDPKKYGGFDSPTVAYSVLVVAKVEKGKSKKLKSVKELLGITIMERSSFEKNPIDFLEAKGYKEVKKDLIIKLPKYSLFELENGRKRMLASAGELQKGNELALPSKYVNFLYLASHYEKLKGSPEDNEQKQLFVEQHKHYLDEIIEQISEFSKRVILADANLDKVLSAYNKHRDKPIREQAENIIHLFTLTNLGAPAAFKYFDTTIDRKRYTSTKEVLDATLIHQSITGLYETRIDLSQLGGDGGPAPAPAPGGTVSLQDEHRLFDIPVTTSLPDVWLQDFPQAWAETGGLGRAKCQAPIIIDLKPTAVPVSIKQYPMSLEAHMGIRQHIIKFLELGVLRPCRSPWNTPLLPVKKPGTQDYRPVQDLREINKRTVDIHPTVPNPYNLLSTLKPDYSWYTVLDLKDAFFCLPLAPQSQELFAFEWKDPERGISGQLTWTRLPQGFKNSPTLFNEALHRDLTDFRTQHPEVTLLQYVDDLLLAAPTKKACTQGTRHLLQELGEKGYRASAKKAQICQTKVTYLGYILSEGKRWLTPGRIETVARIPPPRNPREVREFLGTAGFCRLWIPGFAELAAPLYALTKPSTPFTWQTEHQLAFEALKKALLSAPALGLPDTSKPFTLFLDERQGIAKGVLTQKLGPWKRPVAYLSKKLDPVAAGWPPCLRIMAATAMLVKDSAKLTLGQPLTVITPHTLEAIVRQPPDRWITNARLTHYQALLLDTDRVQFGPPVTLNPATLLPVPENQPSPHDCRQVLAETHGTREDLKDQELPDADHTWYTDGSSYLDSGTRRAGAAVVDGHNTIWAQSLPPGTSAQKAELIALTKALELSKGKKANIYTDSRYAFATAHTHGSIYERRGWLTSEGKEIKNKAEIIALLKALFLPQEVAIIHCPGHQKGQDPVAVGNRQADRVARQAAMAEVLTLATEPDNTSHITAGKRTADGSEFEKRTADGSEFESPKKKAKVE

SEQ ID NO: 6494 - protein, 2169 aa, synthetic construct
MPAAKRVKLDGGDKKYSIGLDIGTNSVGWAVITDEYKVPSKKFKVLGNTDRHSIKKNLIGALLFDSGETAEATRLKRTARRRYTRRKNRICYLQEIFSNEMAKVDDSFFHRLEESFLVEEDKKHERHPIFGNIVDEVAYHEKYPTIYHLRKKLVDSTDKADLRLIYLALAHMIKFRGHFLIEGDLNPDNSDVDKLFIQLVQTYNQLFEENPINASGVDAKAILSARLSKSRRLENLIAQLPGEKKNGLFGNLIALSLGLTPNFKSNFDLAEDAKLQLSKDTYDDDLDNLLAQIGDQYADLFLAAKNLSDAILLSDILRVNTEITKAPLSASMIKRYDEHHQDLTLLKALVRQQLPEKYKEIFFDQSKNGYAGYIDGGASQEEFYKFIKPILEKMDGTEELLVKLNREDLLRKQRTFDNGSIPHQIHLGELHAILRRQEDFYPFLKDNREKIEKILTFRIPYYVGPLARGNSRFAWMTRKSEETITPWNFEEVVDKGASAQSFIERMTNFDKNLPNEKVLPKHSLLYEYFTVYNELTKVKYVTEGMRKPAFLSGEQKKAIVDLLFKTNRKVTVKQLKEDYFKKIECFDSVEISGVEDRFNASLGTYHDLLKIIKDKDFLDNEENEDILEDIVLTLTLFEDREMIEERLKTYAHLFDDKVMKQLKRRRYTGWGRLSRKLINGIRDKQSGKTILDFLKSDGFANRNFMQLIHDDSLTFKEDIQKAQVSGQGDSLHEHIANLAGSPAIKKGILQTVKVVDELVKVMGRHKPENIVIEMARENQTTQKGQKNSRERMKRIEEGIKELGSQILKEHPVENTQLQNEKLYLYYLQNGRDMYVDQELDINRLSDYDVDHIVPQSFLKDDSIDNKVLTRSDKARGKSDNVPSEEVVKKMKNYWRQLLNAKLITQRKFDNLTKAERGGLSELDKAGFIKRQLVETRQITKHVAQILDSRMNTKYDENDKLIREVKVITLKSKLVSDFRKDFQFYKVREINNYHHAHDAYLNAVVGTALIKKYPKLESEFVYGDYKVYDVRKMIAKSEQEIGKATAKYFFYSNIMNFFKTEITLANGEIRKRPLIETNGETGEIVWDKGRDFATVRKVLSMPQVNIVKKTEVQTGGFSKESILPKRNSDKLIARKKDWDPKKYGGFDSPTVAYSVLVVAKVEKGKSKKLKSVKELLGITIMERSSFEKNPIDFLEAKGYKEVKKDLIIKLPKYSLFELENGRKRMLASAGELQKGNELALPSKYVNFLYLASHYEKLKGSPEDNEQKQLFVEQHKHYLDEIIEQISEFSKRVILADANLDKVLSAYNKHRDKPIREQAENIIHLFTLTNLGAPAAFKYFDTTIDRKRYTSTKEVLDATLIHQSITGLYETRIDLSQLGGDGGPAPAPAPGGMDLLKPLTVERKGVKIKGYWNSQADITCVPKDLLQGEEPVRQQNVTTIHGTQEGDVYYVNLKIDGRRINTEVIGTTLDYAIITPGDVPWILKKPLELTIKLDLEEQQGTLLNNSILSKKGKEELKQLFEKYSALWQSWENQVGHRRIRPHKIATGTVKPTPQKQYHINPKAKPDIQIVINDLLKQGVLIQKESTMNTPVYPVPKPNGRWRMVLDYRAVNKVTPLIAVQNQHSYGILGSLFKGRYKTTIDLSNGFWAHPIVPEDYWITAFTWQGKQYCWTVLPQGFLNSPGLFNGDVVDLLQGIPNVEVYVDDVYISHDSEKEHLEYLDILFNRLKEAGYIISLKKSNIANSIVDFLGFQITNEGRGLTDTFKEKLENITAPTTLKQLQSILGLLNFARNFIPDFTELIAPLYALIPKSPKNYVPWQIEHSTTLETLITKLNGAEYLQGRKGDKTLIMKVNASYTTGYIRYYNEGEKKPISYVSIVFSKTELKFTELEKLLTTVHKGLLKALDLSMGQNIHVYSPIVSMQNIQKTPQTAKKALASRWLSWLSYLEDPRIRFFYDPQMPALKDLPAVDTGKDNKKHPSNFQHIFYTDGSAITSPTKEGHLNAGMGIVYFINKDGNLQKQQEWSISLGNHTAQFAEIAAFEFALKKCLPLGGNILVVTDSNYVAKAYNEELDVWASNGFVNNRKKPLKHISKWKSVADLKRLRPDVVVTHEPGHQKLDSSPHAYGNNLADQLATQASFKVHAGKRTADGSEFEKRTADGSEFESPKKKAKVE

SEQ ID NO: 6495 - protein, 2091 aa, synthetic construct
MPAAKRVKLDGGDKKYSIGLDIGTNSVGWAVITDEYKVPSKKFKVLGNTDRHSIKKNLIGALLFDSGETAEATRLKRTARRRYTRRKNRICYLQEIFSNEMAKVDDSFFHRLEESFLVEEDKKHERHPIFGNIVDEVAYHEKYPTIYHLRKKLVDSTDKADLRLIYLALAHMIKFRGHFLIEGDLNPDNSDVDKLFIQLVQTYNQLFEENPINASGVDAKAILSARLSKSRRLENLIAQLPGEKKNGLFGNLIALSLGLTPNFKSNFDLAEDAKLQLSKDTYDDDLDNLLAQIGDQYADLFLAAKNLSDAILLSDILRVNTEITKAPLSASMIKRYDEHHQDLTLLKALVRQQLPEKYKEIFFDQSKNGYAGYIDGGASQEEFYKFIKPILEKMDGTEELLVKLNREDLLRKQRTFDNGSIPHQIHLGELHAILRRQEDFYPFLKDNREKIEKILTFRIPYYVGPLARGNSRFAWMTRKSEETITPWNFEEVVDKGASAQSFIERMTNFDKNLPNEKVLPKHSLLYEYFTVYNELTKVKYVTEGMRKPAFLSGEQKKAIVDLLFKTNRKVTVKQLKEDYFKKIECFDSVEISGVEDRFNASLGTYHDLLKIIKDKDFLDNEENEDILEDIVLTLTLFEDREMIEERLKTYAHLFDDKVMKQLKRRRYTGWGRLSRKLINGIRDKQSGKTILDFLKSDGFANRNFMQLIHDDSLTFKEDIQKAQVSGQGDSLHEHIANLAGSPAIKKGILQTVKVVDELVKVMGRHKPENIVIEMARENQTTQKGQKNSRERMKRIEEGIKELGSQILKEHPVENTQLQNEKLYLYYLQNGRDMYVDQELDINRLSDYDVDHIVPQSFLKDDSIDNKVLTRSDKARGKSDNVPSEEVVKKMKNYWRQLLNAKLITQRKFDNLTKAERGGLSELDKAGFIKRQLVETRQITKHVAQILDSRMNTKYDENDKLIREVKVITLKSKLVSDFRKDFQFYKVREINNYHHAHDAYLNAVVGTALIKKYPKLESEFVYGDYKVYDVRKMIAKSEQEIGKATAKYFFYSNIMNFFKTEITLANGEIRKRPLIETNGETGEIVWDKGRDFATVRKVLSMPQVNIVKKTEVQTGGFSKESILPKRNSDKLIARKKDWDPKKYGGFDSPTVAYSVLVVAKVEKGKSKKLKSVKELLGITIMERSSFEKNPIDFLEAKGYKEVKKDLIIKLPKYSLFELENGRKRMLASAGELQKGNELALPSKYVNFLYLASHYEKLKGSPEDNEQKQLFVEQHKHYLDEIIEQISEFSKRVILADANLDKVLSAYNKHRDKPIREQAENIIHLFTLTNLGAPAAFKYFDTTIDRKRYTSTKEVLDATLIHQSITGLYETRIDLSQLGGDGGPAPAPAPGGTLQLEEEYRLFEPESTQKQEMDIWLKNFPQAWAETGGMGTAHCQAPVLIQLKATATPISIRQYPMPHEAYQGIKPHIRRMLDQGILKPCQSPWNTPLLPVKKPGTEDYRPVQDLREVNKRVEDIHPTVPNPYNLLSTLPPSHPWYTVLDLKDAFFCLRLHSESQLLFAFEWRDPEIGLSGQLTWTRLPQGFKNSPTLFNEALHSDLADFRVRYPALVLLQYVDDLLLAAATRTECLEGTKALLETLGNKGYRASAKKAQICLQEVTYLGYSLKDGQRWLTKARKEAILSIPVPKNSRQVREFLGTAGYCRLWIPGFAELAAPLYPLTRPGTLFQWGTEQQLAFEDIKKALLSSPALGLPDITKPFELFIDENSGFAKGVLVQKLGPWKRPVAYLSKKLDTVASGWPPCLRMVAAIAILVKDAGKLTLGQPLTILTSHPVEALVRQPPNKWLSNARMTHYQAMLLDAERVHFGPTVSLNPATLLPLPSGGNHHDCLQILAETHGTRPDLTDQPLPDADLTWYTDGSSFIRNGEREAGAAVTTESEVIWAAPLPPGTSAQRAELIALTQALKMAEGKKLTVYTDSRYAFATTHVHGEIYRRRGWLTSEGKEIKNKNEILALLEALFLPKRLSIIHCPGHQKGDSPQAKGNRLADDTAKKAATETHSSLTVLPAGKRTADGSEFEKRTADGSEFESPKKKAKVE

SEQ ID NO: 6496 - protein, 2091 aa, synthetic construct
MPAAKRVKLDGGDKKYSIGLDIGTNSVGWAVITDEYKVPSKKFKVLGNTDRHSIKKNLIGALLFDSGETAEATRLKRTARRRYTRRKNRICYLQEIFSNEMAKVDDSFFHRLEESFLVEEDKKHERHPIFGNIVDEVAYHEKYPTIYHLRKKLVDSTDKADLRLIYLALAHMIKFRGHFLIEGDLNPDNSDVDKLFIQLVQTYNQLFEENPINASGVDAKAILSARLSKSRRLENLIAQLPGEKKNGLFGNLIALSLGLTPNFKSNFDLAEDAKLQLSKDTYDDDLDNLLAQIGDQYADLFLAAKNLSDAILLSDILRVNTEITKAPLSASMIKRYDEHHQDLTLLKALVRQQLPEKYKEIFFDQSKNGYAGYIDGGASQEEFYKFIKPILEKMDGTEELLVKLNREDLLRKQRTFDNGSIPHQIHLGELHAILRRQEDFYPFLKDNREKIEKILTFRIPYYVGPLARGNSRFAWMTRKSEETITPWNFEEVVDKGASAQSFIERMTNFDKNLPNEKVLPKHSLLYEYFTVYNELTKVKYVTEGMRKPAFLSGEQKKAIVDLLFKTNRKVTVKQLKEDYFKKIECFDSVEISGVEDRFNASLGTYHDLLKIIKDKDFLDNEENEDILEDIVLTLTLFEDREMIEERLKTYAHLFDDKVMKQLKRRRYTGWGRLSRKLINGIRDKQSGKTILDFLKSDGFANRNFMQLIHDDSLTFKEDIQKAQVSGQGDSLHEHIANLAGSPAIKKGILQTVKVVDELVKVMGRHKPENIVIEMARENQTTQKGQKNSRERMKRIEEGIKELGSQILKEHPVENTQLQNEKLYLYYLQNGRDMYVDQELDINRLSDYDVDHIVPQSFLKDDSIDNKVLTRSDKARGKSDNVPSEEVVKKMKNYWRQLLNAKLITQRKFDNLTKAERGGLSELDKAGFIKRQLVETRQITKHVAQILDSRMNTKYDENDKLIREVKVITLKSKLVSDFRKDFQFYKVREINNYHHAHDAYLNAVVGTALIKKYPKLESEFVYGDYKVYDVRKMIAKSEQEIGKATAKYFFYSNIMNFFKTEITLANGEIRKRPLIETNGETGEIVWDKGRDFATVRKVLSMPQVNIVKKTEVQTGGFSKESILPKRNSDKLIARKKDWDPKKYGGFDSPTVAYSVLVVAKVEKGKSKKLKSVKELLGITIMERSSFEKNPIDFLEAKGYKEVKKDLIIKLPKYSLFELENGRKRMLASAGELQKGNELALPSKYVNFLYLASHYEKLKGSPEDNEQKQLFVEQHKHYLDEIIEQISEFSKRVILADANLDKVLSAYNKHRDKPIREQAENIIHLFTLTNLGAPAAFKYFDTTIDRKRYTSTKEVLDATLIHQSITGLYETRIDLSQLGGDGGPAPAPAPGGTLQLEEEYRLFEPESTQKQEMDIWLKNFPQAWAETGGMGTAHCQAPVLIQLKATATPISIRQYPMPHEAYQGIKPHIRRMLDQGILKPCQSPWNTPLLPVKKPGTEDYRPVQDLREVNKRVEDIHPTVPNPYNLLSTLPPSHPWYTVLDLKDAFFCLRLHSESQLLFAFEWRDPEIGLSGQLTWTRLPQGFKNSPTLFNEALHSDLADFRVRYPALVLLQYVDDLLLAAATRTECLEGTKALLETLGNKGYRASAKKAQICLQEVTYLGYSLKDGQRWLTKARKEAILSIPVPKNSRQVREFLGKAGYCRLFIPGFAELAAPLYPLTRPGTLFQWGTEQQLAFEDIKKALLSSPALGLPDITKPFELFIDENSGFAKGVLVQKLGPWKRPVAYLSKKLDTVASGWPPCLRMVAAIAILVKDAGKLTLGQPLTILTSHPVEALVRQPPNKWLSNARMTHYQAMLLDAERVHFGPTVSLNPATLLPLPSGGNHHDCLQILAETHGTRPDLTDQPLPDADLTWYTDGSSFIRNGEREAGAAVTTESEVIWAAPLPPGTSAQRAELIALTQALKMAEGKKLTVYTDSRYAFATTHVHGEIYRRRGWLTSEGKEIKNKNEILALLEALFLPKRLSIIHCPGHQKGDSPQAKGNRLADDTAKKAATETHSSLTVLPAGKRTADGSEFEKRTADGSEFESPKKKAKVE

SEQ ID NO: 6497 - protein, 2090 aa, synthetic construct
MPAAKRVKLDGGDKKYSIGLDIGTNSVGWAVITDEYKVPSKKFKVLGNTDRHSIKKNLIGALLFDSGETAEATRLKRTARRRYTRRKNRICYLQEIFSNEMAKVDDSFFHRLEESFLVEEDKKHERHPIFGNIVDEVAYHEKYPTIYHLRKKLVDSTDKADLRLIYLALAHMIKFRGHFLIEGDLNPDNSDVDKLFIQLVQTYNQLFEENPINASGVDAKAILSARLSKSRRLENLIAQLPGEKKNGLFGNLIALSLGLTPNFKSNFDLAEDAKLQLSKDTYDDDLDNLLAQIGDQYADLFLAAKNLSDAILLSDILRVNTEITKAPLSASMIKRYDEHHQDLTLLKALVRQQLPEKYKEIFFDQSKNGYAGYIDGGASQEEFYKFIKPILEKMDGTEELLVKLNREDLLRKQRTFDNGSIPHQIHLGELHAILRRQEDFYPFLKDNREKIEKILTFRIPYYVGPLARGNSRFAWMTRKSEETITPWNFEEVVDKGASAQSFIERMTNFDKNLPNEKVLPKHSLLYEYFTVYNELTKVKYVTEGMRKPAFLSGEQKKAIVDLLFKTNRKVTVKQLKEDYFKKIECFDSVEISGVEDRFNASLGTYHDLLKIIKDKDFLDNEENEDILEDIVLTLTLFEDREMIEERLKTYAHLFDDKVMKQLKRRRYTGWGRLSRKLINGIRDKQSGKTILDFLKSDGFANRNFMQLIHDDSLTFKEDIQKAQVSGQGDSLHEHIANLAGSPAIKKGILQTVKVVDELVKVMGRHKPENIVIEMARENQTTQKGQKNSRERMKRIEEGIKELGSQILKEHPVENTQLQNEKLYLYYLQNGRDMYVDQELDINRLSDYDVDHIVPQSFLKDDSIDNKVLTRSDKARGKSDNVPSEEVVKKMKNYWRQLLNAKLITQRKFDNLTKAERGGLSELDKAGFIKRQLVETRQITKHVAQILDSRMNTKYDENDKLIREVKVITLKSKLVSDFRKDFQFYKVREINNYHHAHDAYLNAVVGTALIKKYPKLESEFVYGDYKVYDVRKMIAKSEQEIGKATAKYFFYSNIMNFFKTEITLANGEIRKRPLIETNGETGEIVWDKGRDFATVRKVLSMPQVNIVKKTEVQTGGFSKESILPKRNSDKLIARKKDWDPKKYGGFDSPTVAYSVLVVAKVEKGKSKKLKSVKELLGITIMERSSFEKNPIDFLEAKGYKEVKKDLIIKLPKYSLFELENGRKRMLASAGELQKGNELALPSKYVNFLYLASHYEKLKGSPEDNEQKQLFVEQHKHYLDEIIEQISEFSKRVILADANLDKVLSAYNKHRDKPIREQAENIIHLFTLTNLGAPAAFKYFDTTIDRKRYTSTKEVLDATLIHQSITGLYETRIDLSQLGGDGGPAPAPAPGGVLNLEEEYRLHEKPVPSSIDPSWLQLFPTVWAERAGMGLANQVPPVVVELRSGASPVAVRQYPMSKEAREGIRPHIQKFLDLGVLVPCRSPWNTPLLPVKKPGTNDYRPVQDLREINKRVQDIHPTVPNPYNLLSSLPPSYTWYSVLDLKDAFFCLRLHPNSQPLFAFEWKDPEKGNTGQLTWTRLPQGFKNSPTLFNEALHRDLAPFRALNPQVVLLQYVDDLLVAAPTYEDCKKGTQKLLQELSKLGYRVSAKKAQLCQREVTYLGYLLKEGKRWLTPARKATVMKIPVPTTPRQVREFLGKAGFCRLFIPGFASLAAPLYPLTKPSIPFIWTEEHQQAFDHIKKALLSAPALALPDLTKPFTLYIDERAGVARGVLTQTLGPWRRPVAYLSKKLDPVASGWPTCLKAVAAVALLLKDADKLTLGQNVTVIASHSLESIVRQPPDRWMTNARMTHYQSLLLNERVSFAPPAVLNPATLLPVESEATPVHRCSEILAEETGTRRDLEDQPLPGVPTWYTDGSSFITEGKRRAGAPIVDGKRTVWASSLPEGTSAQKAELVALTQALRLAEGKNINIYTDSRYAFATAHIHGAIYKQRGWLTSAGKDIKNKEEILALLEAIHLPRRVAIIHCPGHQRGSNPVATGNRRADEAAKQAALSTRVLAGTTKPAGKRTADGSEFEKRTADGSEFESPKKKAKVE

SEQ ID NO: 6498 - protein, 2005 aa, synthetic construct
MPAAKRVKLDGGDKKYSIGLDIGTNSVGWAVITDEYKVPSKKFKVLGNTDRHSIKKNLIGALLFDSGETAEATRLKRTARRRYTRRKNRICYLQEIFSNEMAKVDDSFFHRLEESFLVEEDKKHERHPIFGNIVDEVAYHEKYPTIYHLRKKLVDSTDKADLRLIYLALAHMIKFRGHFLIEGDLNPDNSDVDKLFIQLVQTYNQLFEENPINASGVDAKAILSARLSKSRRLENLIAQLPGEKKNGLFGNLIALSLGLTPNFKSNFDLAEDAKLQLSKDTYDDDLDNLLAQIGDQYADLFLAAKNLSDAILLSDILRVNTEITKAPLSASMIKRYDEHHQDLTLLKALVRQQLPEKYKEIFFDQSKNGYAGYIDGGASQEEFYKFIKPILEKMDGTEELLVKLNREDLLRKQRTFDNGSIPHQIHLGELHAILRRQEDFYPFLKDNREKIEKILTFRIPYYVGPLARGNSRFAWMTRKSEETITPWNFEEVVDKGASAQSFIERMTNFDKNLPNEKVLPKHSLLYEYFTVYNELTKVKYVTEGMRKPAFLSGEQKKAIVDLLFKTNRKVTVKQLKEDYFKKIECFDSVEISGVEDRFNASLGTYHDLLKIIKDKDFLDNEENEDILEDIVLTLTLFEDREMIEERLKTYAHLFDDKVMKQLKRRRYTGWGRLSRKLINGIRDKQSGKTILDFLKSDGFANRNFMQLIHDDSLTFKEDIQKAQVSGQGDSLHEHIANLAGSPAIKKGILQTVKVVDELVKVMGRHKPENIVIEMARENQTTQKGQKNSRERMKRIEEGIKELGSQILKEHPVENTQLQNEKLYLYYLQNGRDMYVDQELDINRLSDYDVDHIVPQSFLKDDSIDNKVLTRSDKARGKSDNVPSEEVVKKMKNYWRQLLNAKLITQRKFDNLTKAERGGLSELDKAGFIKRQLVETRQITKHVAQILDSRMNTKYDENDKLIREVKVITLKSKLVSDFRKDFQFYKVREINNYHHAHDAYLNAVVGTALIKKYPKLESEFVYGDYKVYDVRKMIAKSEQEIGKATAKYFFYSNIMNFFKTEITLANGEIRKRPLIETNGETGEIVWDKGRDFATVRKVLSMPQVNIVKKTEVQTGGFSKESILPKRNSDKLIARKKDWDPKKYGGFDSPTVAYSVLVVAKVEKGKSKKLKSVKELLGITIMERSSFEKNPIDFLEAKGYKEVKKDLIIKLPKYSLFELENGRKRMLASAGELQKGNELALPSKYVNFLYLASHYEKLKGSPEDNEQKQLFVEQHKHYLDEIIEQISEFSKRVILADANLDKVLSAYNKHRDKPIREQAENIIHLFTLTNLGAPAAFKYFDTTIDRKRYTSTKEVLDATLIHQSITGLYETRIDLSQLGGDGGPAPAPAPGGHLPPPPQVDQFPLNLPERLQALNDLVSKALEAGHIEPYSGPGNNPVFPVKKPNGKWRFIHDLRATNAITTTLTSPSPGPPDLTSLPTALPHLQTIDLTDAFFQIPLPKQYQPYFAFTIPQPCNYGPGTRYAWTVLPQGFKNSPTLFQQQLAAVLNPMRKMFPTSTIVQYMDDILLASPTNEELQQLSQLTLQALTTHGLPISQEKTQQTPGQIRFLGQVISPNHITYESTPTIPIKSQWTLTELQVILGEIQWVSKGTPILRKHLQSLYSALHPYRDPRACITLTPQQLHALHAIQQALQHNCRGRLNPALPLLGLISLSTSGTTSVIFQPKQNWPLAWLHTPHPPTSLCPWGHLLACTILTLDKYTLQHYGQLCQSFHHNMSKQALCDFLRNSPHPSVGILIHHMGRFHNLGSQPSGPWKTLLHLPTLLQEPRLLRPIFTLSPVVLDTAPCLFSDGSPQKAAYVLWDQTILQQDITPLPSHETHSAQKGELLALICGLRAAKPWPSLNIFLDSKYLIKYLHSLAIGAFLGTSAHQTLQAALPPLLQGKTIYLHHVRSHTNLPDPISTFNEYTDSLILAPLVPLAGKRTADGSEFEKRTADGSEFESPKKKAKVE

SEQ ID NO: 6499 - protein, 2214 aa, synthetic construct
MPAAKRVKLDGGDKKYSIGLDIGTNSVGWAVITDEYKVPSKKFKVLGNTDRHSIKKNLIGALLFDSGETAEATRLKRTARRRYTRRKNRICYLQEIFSNEMAKVDDSFFHRLEESFLVEEDKKHERHPIFGNIVDEVAYHEKYPTIYHLRKKLVDSTDKADLRLIYLALAHMIKFRGHFLIEGDLNPDNSDVDKLFIQLVQTYNQLFEENPINASGVDAKAILSARLSKSRRLENLIAQLPGEKKNGLFGNLIALSLGLTPNFKSNFDLAEDAKLQLSKDTYDDDLDNLLAQIGDQYADLFLAAKNLSDAILLSDILRVNTEITKAPLSASMIKRYDEHHQDLTLLKALVRQQLPEKYKEIFFDQSKNGYAGYIDGGASQEEFYKFIKPILEKMDGTEELLVKLNREDLLRKQRTFDNGSIPHQIHLGELHAILRRQEDFYPFLKDNREKIEKILTFRIPYYVGPLARGNSRFAWMTRKSEETITPWNFEEVVDKGASAQSFIERMTNFDKNLPNEKVLPKHSLLYEYFTVYNELTKVKYVTEGMRKPAFLSGEQKKAIVDLLFKTNRKVTVKQLKEDYFKKIECFDSVEISGVEDRFNASLGTYHDLLKIIKDKDFLDNEENEDILEDIVLTLTLFEDREMIEERLKTYAHLFDDKVMKQLKRRRYTGWGRLSRKLINGIRDKQSGKTILDFLKSDGFANRNFMQLIHDDSLTFKEDIQKAQVSGQGDSLHEHIANLAGSPAIKKGILQTVKVVDELVKVMGRHKPENIVIEMARENQTTQKGQKNSRERMKRIEEGIKELGSQILKEHPVENTQLQNEKLYLYYLQNGRDMYVDQELDINRLSDYDVDHIVPQSFLKDDSIDNKVLTRSDKARGKSDNVPSEEVVKKMKNYWRQLLNAKLITQRKFDNLTKAERGGLSELDKAGFIKRQLVETRQITKHVAQILDSRMNTKYDENDKLIREVKVITLKSKLVSDFRKDFQFYKVREINNYHHAHDAYLNAVVGTALIKKYPKLESEFVYGDYKVYDVRKMIAKSEQEIGKATAKYFFYSNIMNFFKTEITLANGEIRKRPLIETNGETGEIVWDKGRDFATVRKVLSMPQVNIVKKTEVQTGGFSKESILPKRNSDKLIARKKDWDPKKYGGFDSPTVAYSVLVVAKVEKGKSKKLKSVKELLGITIMERSSFEKNPIDFLEAKGYKEVKKDLIIKLPKYSLFELENGRKRMLASAGELQKGNELALPSKYVNFLYLASHYEKLKGSPEDNEQKQLFVEQHKHYLDEIIEQISEFSKRVILADANLDKVLSAYNKHRDKPIREQAENIIHLFTLTNLGAPAAFKYFDTTIDRKRYTSTKEVLDATLIHQSITGLYETRIDLSQLGGDGGPAPAPAPGGTLGDQGSRGSDPLPEPRVTLTVEGIPTEFLVNTGAEHSVLTKPMGKMGSKRTVVAGATGSKVYPWTTKRLLKIGQKQVTHSFLVIPECPAPLLGRDLLTKLKAQIQFSTEGPQVTWEDRPAMCLVLNLEEEYRLHEKPVPPSIDPSWLQLFPMVWAEKAGMGLANQVPPVVVELKSDASPVAVRQYPMSKEAREGIRPHIQRFLDLGILVPCQSPWNTPLLPVKKPGTNDYRPVQDLREVNKRVQDIHPTVPNPYNLLSSLPPSHTWYSVLDLKDAFFCLKLHPNSQPLFAFEWRDPEKGNTGQLTWTRLPQGFKNSPTLFNEALHRDLASFRALNPQVVMLQYVDDLLVAAPTYRDCKEGTRRLLQELSKLGYRVSAKKAQLCREEVTYLGYLLKGGKRWLTPARKATVMKIPTPTTPRQVREFLGKAGFCRLFIPGFASLAAPLYPLTRPKVPFTWTEAHQEAFGRIKEALLSAPALALPDLTKPFALYVDEKEGVARGVLTQTLGPWRRPVAYLSKKLDPVASGWPTCLKAIAAVALLLKDADKLTLGQNVLVIAPHNLESIVRQPPDRWMTNARMTHYQSLLLNERVSFAPPAILNPATLLPVESDDTPIHICSEILAEETGTRPDLRDQPLPGVPAWYTDGSSFIMDGRRQAGAAIVDNKRTVWASNLPEGTSAQKAELIALTQALRLAEGKSINIYTDSRYAFATAHVHGAIYKQRGWLTSAGKDIKNKEEILALLEAIHLPKRVAIIHCPGHQRGTDPVATGNRKADEAAKQAAQSTRILTETTKNAGKRTADGSEFEKRTADGSEFESPKKKAKVE

SEQ ID NO: 6500 - protein, 2092 aa, synthetic construct
MPAAKRVKLDGGDKKYSIGLDIGTNSVGWAVITDEYKVPSKKFKVLGNTDRHSIKKNLIGALLFDSGETAEATRLKRTARRRYTRRKNRICYLQEIFSNEMAKVDDSFFHRLEESFLVEEDKKHERHPIFGNIVDEVAYHEKYPTIYHLRKKLVDSTDKADLRLIYLALAHMIKFRGHFLIEGDLNPDNSDVDKLFIQLVQTYNQLFEENPINASGVDAKAILSARLSKSRRLENLIAQLPGEKKNGLFGNLIALSLGLTPNFKSNFDLAEDAKLQLSKDTYDDDLDNLLAQIGDQYADLFLAAKNLSDAILLSDILRVNTEITKAPLSASMIKRYDEHHQDLTLLKALVRQQLPEKYKEIFFDQSKNGYAGYIDGGASQEEFYKFIKPILEKMDGTEELLVKLNREDLLRKQRTFDNGSIPHQIHLGELHAILRRQEDFYPFLKDNREKIEKILTFRIPYYVGPLARGNSRFAWMTRKSEETITPWNFEEVVDKGASAQSFIERMTNFDKNLPNEKVLPKHSLLYEYFTVYNELTKVKYVTEGMRKPAFLSGEQKKAIVDLLFKTNRKVTVKQLKEDYFKKIECFDSVEISGVEDRFNASLGTYHDLLKIIKDKDFLDNEENEDILEDIVLTLTLFEDREMIEERLKTYAHLFDDKVMKQLKRRRYTGWGRLSRKLINGIRDKQSGKTILDFLKSDGFANRNFMQLIHDDSLTFKEDIQKAQVSGQGDSLHEHIANLAGSPAIKKGILQTVKVVDELVKVMGRHKPENIVIEMARENQTTQKGQKNSRERMKRIEEGIKELGSQILKEHPVENTQLQNEKLYLYYLQNGRDMYVDQELDINRLSDYDVDHIVPQSFLKDDSIDNKVLTRSDKARGKSDNVPSEEVVKKMKNYWRQLLNAKLITQRKFDNLTKAERGGLSELDKAGFIKRQLVETRQITKHVAQILDSRMNTKYDENDKLIREVKVITLKSKLVSDFRKDFQFYKVREINNYHHAHDAYLNAVVGTALIKKYPKLESEFVYGDYKVYDVRKMIAKSEQEIGKATAKYFFYSNIMNFFKTEITLANGEIRKRPLIETNGETGEIVWDKGRDFATVRKVLSMPQVNIVKKTEVQTGGFSKESILPKRNSDKLIARKKDWDPKKYGGFDSPTVAYSVLVVAKVEKGKSKKLKSVKELLGITIMERSSFEKNPIDFLEAKGYKEVKKDLIIKLPKYSLFELENGRKRMLASAGELQKGNELALPSKYVNFLYLASHYEKLKGSPEDNEQKQLFVEQHKHYLDEIIEQISEFSKRVILADANLDKVLSAYNKHRDKPIREQAENIIHLFTLTNLGAPAAFKYFDTTIDRKRYTSTKEVLDATLIHQSITGLYETRIDLSQLGGDGGPAPAPAPGGTLNLEDEYRLYETSAEPEVSPGSTWLSDFPQAWAETGGMGLAVRQAPLIIPLKATSTPVSIKQYPMSQEAKLGIKPHIQRLLDQGILVPCQSPWNTPLLPVKKPGTNDYRPVQDLREVNKRVEDIHPTVPNPYNLLSGLPPSHRWYTVLDLKDAFFCLRLHPTSQPLFAFEWRDPGMGISGQLTWTRLPQGFKNSPTLFNEALHRDLADFRIQHPDLILLQYVDDILLAATSELDCQQGTRALLLTLGNLGYRASAKKAQLCQKQVKYLGYLLKEGQRWLTEARKETVMGQPTPKTPRQLREFLGTAGFCRLWIPGFAEMAAPLYPLTKPGTLFNWGPDQQKAYQEIKQALLTAPALGLPDLTKPFELFVDEKQGYAKGVLTQKLGPWRRPVAYLSKKLDPVAAGWPPCLRMVAAIAVLRKDAGKLTMGQPLVILAPHAVEALVKQPPDRWLSNARMTHYQAMLLDTDRVQFGPVVALNPATLLPLPEEGAPHDCLEILAETHGTRPDLTDQPIPDADHTWYTDGSSFLQEGQRKAGAAVTTETEVIWARALPAGTSAQRAELIALTQALKMAEGKRLNVYTDSRYAFATAHIHGEIYRRRGWLTSEGREIKNKSEILALLKALFLPKRLSIIHCLGHQKGDSAEARGNRLADQAAREAAIKTPPDTSTLLAGKRTADGSEFEKRTADGSEFESPKKKAKVE

SEQ ID NO: 6501 - protein, 2092 aa, synthetic construct
MPAAKRVKLDGGDKKYSIGLDIGTNSVGWAVITDEYKVPSKKFKVLGNTDRHSIKKNLIGALLFDSGETAEATRLKRTARRRYTRRKNRICYLQEIFSNEMAKVDDSFFHRLEESFLVEEDKKHERHPIFGNIVDEVAYHEKYPTIYHLRKKLVDSTDKADLRLIYLALAHMIKFRGHFLIEGDLNPDNSDVDKLFIQLVQTYNQLFEENPINASGVDAKAILSARLSKSRRLENLIAQLPGEKKNGLFGNLIALSLGLTPNFKSNFDLAEDAKLQLSKDTYDDDLDNLLAQIGDQYADLFLAAKNLSDAILLSDILRVNTEITKAPLSASMIKRYDEHHQDLTLLKALVRQQLPEKYKEIFFDQSKNGYAGYIDGGASQEEFYKFIKPILEKMDGTEELLVKLNREDLLRKQRTFDNGSIPHQIHLGELHAILRRQEDFYPFLKDNREKIEKILTFRIPYYVGPLARGNSRFAWMTRKSEETITPWNFEEVVDKGASAQSFIERMTNFDKNLPNEKVLPKHSLLYEYFTVYNELTKVKYVTEGMRKPAFLSGEQKKAIVDLLFKTNRKVTVKQLKEDYFKKIECFDSVEISGVEDRFNASLGTYHDLLKIIKDKDFLDNEENEDILEDIVLTLTLFEDREMIEERLKTYAHLFDDKVMKQLKRRRYTGWGRLSRKLINGIRDKQSGKTILDFLKSDGFANRNFMQLIHDDSLTFKEDIQKAQVSGQGDSLHEHIANLAGSPAIKKGILQTVKVVDELVKVMGRHKPENIVIEMARENQTTQKGQKNSRERMKRIEEGIKELGSQILKEHPVENTQLQNEKLYLYYLQNGRDMYVDQELDINRLSDYDVDHIVPQSFLKDDSIDNKVLTRSDKARGKSDNVPSEEVVKKMKNYWRQLLNAKLITQRKFDNLTKAERGGLSELDKAGFIKRQLVETRQITKHVAQILDSRMNTKYDENDKLIREVKVITLKSKLVSDFRKDFQFYKVREINNYHHAHDAYLNAVVGTALIKKYPKLESEFVYGDYKVYDVRKMIAKSEQEIGKATAKYFFYSNIMNFFKTEITLANGEIRKRPLIETNGETGEIVWDKGRDFATVRKVLSMPQVNIVKKTEVQTGGFSKESILPKRNSDKLIARKKDWDPKKYGGFDSPTVAYSVLVVAKVEKGKSKKLKSVKELLGITIMERSSFEKNPIDFLEAKGYKEVKKDLIIKLPKYSLFELENGRKRMLASAGELQKGNELALPSKYVNFLYLASHYEKLKGSPEDNEQKQLFVEQHKHYLDEIIEQISEFSKRVILADANLDKVLSAYNKHRDKPIREQAENIIHLFTLTNLGAPAAFKYFDTTIDRKRYTSTKEVLDATLIHQSITGLYETRIDLSQLGGDGGPAPAPAPGGTLGIEDEYRLHETSTEPDVSLGSTWLSDFPQAWAETGGMGLAVRQAPLIIPLKATSTPVSIQQYPMSHEARLGIKPHIQRLLDQGILVPCQSPWNTPLLPVKKPGTNDYRPVQDLREVNKRVEDIHPTVPNPYNLLSGLPPSHQWYTVLDLKDAFFCLRLHPTSQPLFAFEWRDPGMGISGQLTWTRLPQGFKNSPTLFNEALHRDLADFRIQHPDLILLQYVDDILLAATSELDCQQGTRALLQTLGDLGYRASAKKAQICQKQVKYLGYLLREGQRWLTEARKETVMGQPVPKTPRQLREFLGTAGFCRLWIPGFAEMAAPLYPLTKPGTLFSWGPDQQKAYQEIKQALLTAPALGLPDLTKPFELFVDEKQGYAKGVLTQKLGPWRRPVAYLSKKLDPVAAGWPPCLRMVAAIAVLTKDAGKLTMGQPLVILAPHAVEALVKQPPDRWLSNARMTHYQAMLLDTDRVQFGPVVALNPATLLPLPEEGAPHDCLEILAETHGTRPDLTDQPIPDADHTWYTDGSSFLQEGQRKAGAAVTTETEVIWAGALPAGTSAQRAELIALTQALKMAEGKRLNVYTDSRYAFATAHIHGEIYRRRGWLTSEGREIKNKSEILALLKALFLPKRLSIIHCLGHQKGDSAEARGNRLADQAAREAAIKTPPDTSTLLAGKRTADGSEFEKRTADGSEFESPKKKAKVE

SEQ ID NO: 6502 - protein, 2092 aa, synthetic construct
MPAAKRVKLDGGDKKYSIGLDIGTNSVGWAVITDEYKVPSKKFKVLGNTDRHSIKKNLIGALLFDSGETAEATRLKRTARRRYTRRKNRICYLQEIFSNEMAKVDDSFFHRLEESFLVEEDKKHERHPIFGNIVDEVAYHEKYPTIYHLRKKLVDSTDKADLRLIYLALAHMIKFRGHFLIEGDLNPDNSDVDKLFIQLVQTYNQLFEENPINASGVDAKAILSARLSKSRRLENLIAQLPGEKKNGLFGNLIALSLGLTPNFKSNFDLAEDAKLQLSKDTYDDDLDNLLAQIGDQYADLFLAAKNLSDAILLSDILRVNTEITKAPLSASMIKRYDEHHQDLTLLKALVRQQLPEKYKEIFFDQSKNGYAGYIDGGASQEEFYKFIKPILEKMDGTEELLVKLNREDLLRKQRTFDNGSIPHQIHLGELHAILRRQEDFYPFLKDNREKIEKILTFRIPYYVGPLARGNSRFAWMTRKSEETITPWNFEEVVDKGASAQSFIERMTNFDKNLPNEKVLPKHSLLYEYFTVYNELTKVKYVTEGMRKPAFLSGEQKKAIVDLLFKTNRKVTVKQLKEDYFKKIECFDSVEISGVEDRFNASLGTYHDLLKIIKDKDFLDNEENEDILEDIVLTLTLFEDREMIEERLKTYAHLFDDKVMKQLKRRRYTGWGRLSRKLINGIRDKQSGKTILDFLKSDGFANRNFMQLIHDDSLTFKEDIQKAQVSGQGDSLHEHIANLAGSPAIKKGILQTVKVVDELVKVMGRHKPENIVIEMARENQTTQKGQKNSRERMKRIEEGIKELGSQILKEHPVENTQLQNEKLYLYYLQNGRDMYVDQELDINRLSDYDVDHIVPQSFLKDDSIDNKVLTRSDKARGKSDNVPSEEVVKKMKNYWRQLLNAKLITQRKFDNLTKAERGGLSELDKAGFIKRQLVETRQITKHVAQILDSRMNTKYDENDKLIREVKVITLKSKLVSDFRKDFQFYKVREINNYHHAHDAYLNAVVGTALIKKYPKLESEFVYGDYKVYDVRKMIAKSEQEIGKATAKYFFYSNIMNFFKTEITLANGEIRKRPLIETNGETGEIVWDKGRDFATVRKVLSMPQVNIVKKTEVQTGGFSKESILPKRNSDKLIARKKDWDPKKYGGFDSPTVAYSVLVVAKVEKGKSKKLKSVKELLGITIMERSSFEKNPIDFLEAKGYKEVKKDLIIKLPKYSLFELENGRKRMLASAGELQKGNELALPSKYVNFLYLASHYEKLKGSPEDNEQKQLFVEQHKHYLDEIIEQISEFSKRVILADANLDKVLSAYNKHRDKPIREQAENIIHLFTLTNLGAPAAFKYFDTTIDRKRYTSTKEVLDATLIHQSITGLYETRIDLSQLGGDGGPAPAPAPGGTLNIEDEYRLHETSKGPDVPLGSTWLSDFPQAWAETGGMGLAVRQAPLIIPLKATSTPVSIKQYPMSQEARLGIKPHIQRLLDQGILVPCQSPWNTPLLPVKKPGTNDYRPVQDLREVNKRVEDIHPTVPNPYNLLSGLPPSHQWYTVLDLKDAFFCLRLHPTSQSLFAFEWRDPEMGISGQLTWTRLPQGFKNSPTLFNEALHRDLADFRIQHPDLILLQYVDDLLLAATSELDCQQGTRALLQTLGDLGYRASAKKAQICQKQVKYLGYLLKEGQRWLTEARKETVMGQPTPKTPRQLREFLGTAGFCRLWIPGFAEMAAPLYPLTKPGTLFEWGPDQQKAYQEIKQALLTAPALGLPDLTKPFELFVDEKQGYAKGVLTQKLGPWRRPVAYLSKKLDPVAAGWPPCLRMVAAIAVLTKDAGKLTMGQPLVILAPHAVEALVKQPPDRWLSNARMTHYQALLLDTDRVQFGPIVALNPATLLPLPEEGLQHDCLDILAEAHGTRPDLTDQPLPDADHTWYTDGSSFLQEGQRKAGAAVTTETEVVWAKALPAGTSAQRAELIALTQALKMAEGKKLNVYTDSRYAFATAHIHGEIYRRRGWLTSEGKEIKNKDEILALLKALFLPKRLSIIHCPGHQKGNRAEARGNRMADQAAREVATRETPETSTLLAGKRTADGSEFEKRTADGSEFESPKKKAKVE

SEQ ID NO: 6503 - protein, 2092 aa, synthetic construct
MPAAKRVKLDGGDKKYSIGLDIGTNSVGWAVITDEYKVPSKKFKVLGNTDRHSIKKNLIGALLFDSGETAEATRLKRTARRRYTRRKNRICYLQEIFSNEMAKVDDSFFHRLEESFLVEEDKKHERHPIFGNIVDEVAYHEKYPTIYHLRKKLVDSTDKADLRLIYLALAHMIKFRGHFLIEGDLNPDNSDVDKLFIQLVQTYNQLFEENPINASGVDAKAILSARLSKSRRLENLIAQLPGEKKNGLFGNLIALSLGLTPNFKSNFDLAEDAKLQLSKDTYDDDLDNLLAQIGDQYADLFLAAKNLSDAILLSDILRVNTEITKAPLSASMIKRYDEHHQDLTLLKALVRQQLPEKYKEIFFDQSKNGYAGYIDGGASQEEFYKFIKPILEKMDGTEELLVKLNREDLLRKQRTFDNGSIPHQIHLGELHAILRRQEDFYPFLKDNREKIEKILTFRIPYYVGPLARGNSRFAWMTRKSEETITPWNFEEVVDKGASAQSFIERMTNFDKNLPNEKVLPKHSLLYEYFTVYNELTKVKYVTEGMRKPAFLSGEQKKAIVDLLFKTNRKVTVKQLKEDYFKKIECFDSVEISGVEDRFNASLGTYHDLLKIIKDKDFLDNEENEDILEDIVLTLTLFEDREMIEERLKTYAHLFDDKVMKQLKRRRYTGWGRLSRKLINGIRDKQSGKTILDFLKSDGFANRNFMQLIHDDSLTFKEDIQKAQVSGQGDSLHEHIANLAGSPAIKKGILQTVKVVDELVKVMGRHKPENIVIEMARENQTTQKGQKNSRERMKRIEEGIKELGSQILKEHPVENTQLQNEKLYLYYLQNGRDMYVDQELDINRLSDYDVDHIVPQSFLKDDSIDNKVLTRSDKARGKSDNVPSEEVVKKMKNYWRQLLNAKLITQRKFDNLTKAERGGLSELDKAGFIKRQLVETRQITKHVAQILDSRMNTKYDENDKLIREVKVITLKSKLVSDFRKDFQFYKVREINNYHHAHDAYLNAVVGTALIKKYPKLESEFVYGDYKVYDVRKMIAKSEQEIGKATAKYFFYSNIMNFFKTEITLANGEIRKRPLIETNGETGEIVWDKGRDFATVRKVLSMPQVNIVKKTEVQTGGFSKESILPKRNSDKLIARKKDWDPKKYGGFDSPTVAYSVLVVAKVEKGKSKKLKSVKELLGITIMERSSFEKNPIDFLEAKGYKEVKKDLIIKLPKYSLFELENGRKRMLASAGELQKGNELALPSKYVNFLYLASHYEKLKGSPEDNEQKQLFVEQHKHYLDEIIEQISEFSKRVILADANLDKVLSAYNKHRDKPIREQAENIIHLFTLTNLGAPAAFKYFDTTIDRKRYTSTKEVLDATLIHQSITGLYETRIDLSQLGGDGGPAPAPAPGGTLNIEDEYRLHETSKGPDVPLGSTWLSDFPQAWAETGGMGLAVRQAPLIIPLKATSTPVSIKQYPMSQEARLGIKPHIQRLLDQGILVPCQSPWNTPLLPVKKPGTNDYRPVQDLREVNKRVEDIHPTVPNPYNLLSGLPPSHQWYTVLDLKDAFFCLRLHPTSQSLFAFEWRDPEMGISGQLTWTRLPQGFKNSPTLFNEALHRDLADFRIQHPDLILLQYVDDLLLAATSELDCQQGTRALLQTLGDLGYRASAKKAQICQKQVKYLGYLLKEGQRWLTEARKETVMGQPTPKTPRQLREFLGKAGFCRLFIPGFAEMAAPLYPLTKPGTLFEWGPDQQKAYQEIKQALLTAPALGLPDLTKPFELFVDEKQGYAKGVLTQKLGPWRRPVAYLSKKLDPVAAGWPPCLRMVAAIAVLTKDAGKLTMGQPLVILAPHAVEALVKQPPDRWLSNARMTHYQALLLDTDRVQFGPIVALNPATLLPLPEEGLQHDCLDILAEAHGTRPDLTDQPLPDADHTWYTDGSSFLQEGQRKAGAAVTTETEVVWAKALPAGTSAQRAELIALTQALKMAEGKKLNVYTDSRYAFATAHIHGEIYRRRGWLTSEGKEIKNKDEILALLKALFLPKRLSIIHCPGHQKGNRAEARGNRMADQAAREVATRETPETSTLLAGKRTADGSEFEKRTADGSEFESPKKKAKVE

SEQ ID NO: 6504 - protein, 2112 aa, synthetic construct; identical to SEQ ID NO: 4508

SEQ ID NO: 6505 - protein, 2112 aa, synthetic construct; identical to SEQ ID NO: 4508

SEQ ID NO: 6506 - protein, 2092 aa, synthetic construct
MPAAKRVKLDGGDKKYSIGLDIGTNSVGWAVITDEYKVPSKKFKVLGNTDRHSIKKNLIGALLFDSGETAEATRLKRTARRRYTRRKNRICYLQEIFSNEMAKVDDSFFHRLEESFLVEEDKKHERHPIFGNIVDEVAYHEKYPTIYHLRKKLVDSTDKADLRLIYLALAHMIKFRGHFLIEGDLNPDNSDVDKLFIQLVQTYNQLFEENPINASGVDAKAILSARLSKSRRLENLIAQLPGEKKNGLFGNLIALSLGLTPNFKSNFDLAEDAKLQLSKDTYDDDLDNLLAQIGDQYADLFLAAKNLSDAILLSDILRVNTEITKAPLSASMIKRYDEHHQDLTLLKALVRQQLPEKYKEIFFDQSKNGYAGYIDGGASQEEFYKFIKPILEKMDGTEELLVKLNREDLLRKQRTFDNGSIPHQIHLGELHAILRRQEDFYPFLKDNREKIEKILTFRIPYYVGPLARGNSRFAWMTRKSEETITPWNFEEVVDKGASAQSFIERMTNFDKNLPNEKVLPKHSLLYEYFTVYNELTKVKYVTEGMRKPAFLSGEQKKAIVDLLFKTNRKVTVKQLKEDYFKKIECFDSVEISGVEDRFNASLGTYHDLLKIIKDKDFLDNEENEDILEDIVLTLTLFEDREMIEERLKTYAHLFDDKVMKQLKRRRYTGWGRLSRKLINGIRDKQSGKTILDFLKSDGFANRNFMQLIHDDSLTFKEDIQKAQVSGQGDSLHEHIANLAGSPAIKKGILQTVKVVDELVKVMGRHKPENIVIEMARENQTTQKGQKNSRERMKRIEEGIKELGSQILKEHPVENTQLQNEKLYLYYLQNGRDMYVDQELDINRLSDYDVDHIVPQSFLKDDSIDNKVLTRSDKARGKSDNVPSEEVVKKMKNYWRQLLNAKLITQRKFDNLTKAERGGLSELDKAGFIKRQLVETRQITKHVAQILDSRMNTKYDENDKLIREVKVITLKSKLVSDFRKDFQFYKVREINNYHHAHDAYLNAVVGTALIKKYPKLESEFVYGDYKVYDVRKMIAKSEQEIGKATAKYFFYSNIMNFFKTEITLANGEIRKRPLIETNGETGEIVWDKGRDFATVRKVLSMPQVNIVKKTEVQTGGFSKESILPKRNSDKLIARKKDWDPKKYGGFDSPTVAYSVLVVAKVEKGKSKKLKSVKELLGITIMERSSFEKNPIDFLEAKGYKEVKKDLIIKLPKYSLFELENGRKRMLASAGELQKGNELALPSKYVNFLYLASHYEKLKGSPEDNEQKQLFVEQHKHYLDEIIEQISEFSKRVILADANLDKVLSAYNKHRDKPIREQAENIIHLFTLTNLGAPAAFKYFDTTIDRKRYTSTKEVLDATLIHQSITGLYETRIDLSQLGGDGGPAPAPAPGGTLNIEDEYRLHEISTEPDVSPGSTWLSDFPQAWAETGGMGLAVRQAPLIIPLKATSTPVSIKQYPMSQEAKLGIKPHIQRLLDQGILVPCQSPWNTPLLPVKKPGTNDYRPVQGLREVNKRVEDIHPTVPNPYNLLSGLPTSHRWYTVLDLKDAFFCLRLHPTSQPLFASEWRDPGMGISGQLTWTRLPQGFKNSPTLFNEALHRGLADFRIQHPDLILLQYVDDLLLAATSELDCQQGTRALLKTLGNLGYRASAKKAQICQKQVKYLGYLLREGQRWLTEARKETVMGQPTPKTPRQLREFLGTAGFCRLWIPRFAEMAAPLYPLTKPGTLFNWGPDQQKAYHEIKQALLTAPALGLPDLTKPFELFVDEKQGYAKGVLTQKLGPWRRPVAYLSKKLDPVAAGWPPCLRMVAAIAVLTKDAGKLTMGQPLVILAPHAVEALVKQPPDRWLSNARMTHYQAMLLDTDRVQFGPVVALNPATLLPLPEEGAPHDCLEILAETHGTEPDLTDQPIPDADHTWYTDGSSFLQEGQRKAGAAVTTETEVIWARALPAGTSAQRAELIALTQALKMAEGKRLNVYTDSRYAFATAHIHGEIYKRRGWLTSEGREIKNKSEILALLKALFLPKRLSIIHCLGHQKGDSAEARGNRLADQAAREAAIKTPPDTSTLLAGKRTADGSEFEKRTADGSEFESPKKKAKVE

SEQ ID NO: 6507 - protein, 2006 aa, synthetic construct
MPAAKRVKLDGGDKKYSIGLDIGTNSVGWAVITDEYKVPSKKFKVLGNTDRHSIKKNLIGALLFDSGETAEATRLKRTARRRYTRRKNRICYLQEIFSNEMAKVDDSFFHRLEESFLVEEDKKHERHPIFGNIVDEVAYHEKYPTIYHLRKKLVDSTDKADLRLIYLALAHMIKFRGHFLIEGDLNPDNSDVDKLFIQLVQTYNQLFEENPINASGVDAKAILSARLSKSRRLENLIAQLPGEKKNGLFGNLIALSLGLTPNFKSNFDLAEDAKLQLSKDTYDDDLDNLLAQIGDQYADLFLAAKNLSDAILLSDILRVNTEITKAPLSASMIKRYDEHHQDLTLLKALVRQQLPEKYKEIFFDQSKNGYAGYIDGGASQEEFYKFIKPILEKMDGTEELLVKLNREDLLRKQRTFDNGSIPHQIHLGELHAILRRQEDFYPFLKDNREKIEKILTFRIPYYVGPLARGNSRFAWMTRKSEETITPWNFEEVVDKGASAQSFIERMTNFDKNLPNEKVLPKHSLLYEYFTVYNELTKVKYVTEGMRKPAFLSGEQKKAIVDLLFKTNRKVTVKQLKEDYFKKIECFDSVEISGVEDRFNASLGTYHDLLKIIKDKDFLDNEENEDILEDIVLTLTLFEDREMIEERLKTYAHLFDDKVMKQLKRRRYTGWGRLSRKLINGIRDKQSGKTILDFLKSDGFANRNFMQLIHDDSLTFKEDIQKAQVSGQGDSLHEHIANLAGSPAIKKGILQTVKVVDELVKVMGRHKPENIVIEMARENQTTQKGQKNSRERMKRIEEGIKELGSQILKEHPVENTQLQNEKLYLYYLQNGRDMYVDQELDINRLSDYDVDHIVPQSFLKDDSIDNKVLTRSDKARGKSDNVPSEEVVKKMKNYWRQLLNAKLITQRKFDNLTKAERGGLSELDKAGFIKRQLVETRQITKHVAQILDSRMNTKYDENDKLIREVKVITLKSKLVSDFRKDFQFYKVREINNYHHAHDAYLNAVVGTALIKKYPKLESEFVYGDYKVYDVRKMIAKSEQEIGKATAKYFFYSNIMNFFKTEITLANGEIRKRPLIETNGETGEIVWDKGRDFATVRKVLSMPQVNIVKKTEVQTGGFSKESILPKRNSDKLIARKKDWDPKKYGGFDSPTVAYSVLVVAKVEKGKSKKLKSVKELLGITIMERSSFEKNPIDFLEAKGYKEVKKDLIIKLPKYSLFELENGRKRMLASAGELQKGNELALPSKYVNFLYLASHYEKLKGSPEDNEQKQLFVEQHKHYLDEIIEQISEFSKRVILADANLDKVLSAYNKHRDKPIREQAENIIHLFTLTNLGAPAAFKYFDTTIDRKRYTSTKEVLDATLIHQSITGLYETRIDLSQLGGDGGPAPAPAPGGLTAAIDILAPQQCAEPITWKSDEPVWVDQWPLTNDKLAAAQQLVQEQLEAGHITESSSPWNTPIFVIKKKSGKWRLLQDLRAVNATMVLMGALQPGLPSPVAIPQGYLKIIIDLKDCFFSIPLHPSDQKRFAFSLPSTNFKEPMQRFQWKVLPQGMANSPTLCQKYVATAIHKVRHAWKQMYIIHYMDDILIAGKDGQQVLQCFDQLKQELTAAGLHIAPEKVQLQDPYTYLGFELNGPKITNQKAVIRKDKLQTLNDFQKLLGDINWLRPYLKLTTGDLKPLFDTLKGDSDPNSHRSLSKEALASLEKVETAIAEQFVTHINYSLPLIFLIFNTALTPTGLFWQDNPIMWIHLPASPKKVLLPYYDAIADLIILGRDHSKKYFGIEPSTIIQPYSKSQIDWLMQNTEMWPIACASFVGILDNHYPPNKLIQFCKLHTFVFPQIISKTPLNNALLVFTDGSSTGMAAYTLTDTTIKFQTNLNSAQLVELQALIAVLSAFPNQPLNIYTDSAYLAHSIPLLETVAQIKHISETAKLFLQCQQLIYNRSIPFYIGHVRAHSGLPGPIAQGNQRADLATKIVASNINTAGKRTADGSEFEKRTADGSEFESPKKKAKVE

SEQ ID NO: 6508 - protein, 2086 aa, synthetic construct
MPAAKRVKLDGGDKKYSIGLDIGTNSVGWAVITDEYKVPSKKFKVLGNTDRHSIKKNLIGALLFDSGETAEATRLKRTARRRYTRRKNRICYLQEIFSNEMAKVDDSFFHRLEESFLVEEDKKHERHPIFGNIVDEVAYHEKYPTIYHLRKKLVDSTDKADLRLIYLALAHMIKFRGHFLIEGDLNPDNSDVDKLFIQLVQTYNQLFEENPINASGVDAKAILSARLSKSRRLENLIAQLPGEKKNGLFGNLIALSLGLTPNFKSNFDLAEDAKLQLSKDTYDDDLDNLLAQIGDQYADLFLAAKNLSDAILLSDILRVNTEITKAPLSASMIKRYDEHHQDLTLLKALVRQQLPEKYKEIFFDQSKNGYAGYIDGGASQEEFYKFIKPILEKMDGTEELLVKLNREDLLRKQRTFDNGSIPHQIHLGELHAILRRQEDFYPFLKDNREKIEKILTFRIPYYVGPLARGNSRFAWMTRKSEETITPWNFEEVVDKGASAQSFIERMTNFDKNLPNEKVLPKHSLLYEYFTVYNELTKVKYVTEGMRKPAFLSGEQKKAIVDLLFKTNRKVTVKQLKEDYFKKIECFDSVEISGVEDRFNASLGTYHDLLKIIKDKDFLDNEENEDILEDIVLTLTLFEDREMIEERLKTYAHLFDDKVMKQLKRRRYTGWGRLSRKLINGIRDKQSGKTILDFLKSDGFANRNFMQLIHDDSLTFKEDIQKAQVSGQGDSLHEHIANLAGSPAIKKGILQTVKVVDELVKVMGRHKPENIVIEMARENQTTQKGQKNSRERMKRIEEGIKELGSQILKEHPVENTQLQNEKLYLYYLQNGRDMYVDQELDINRLSDYDVDHIVPQSFLKDDSIDNKVLTRSDKARGKSDNVPSEEVVKKMKNYWRQLLNAKLITQRKFDNLTKAERGGLSELDKAGFIKRQLVETRQITKHVAQILDSRMNTKYDENDKLIREVKVITLKSKLVSDFRKDFQFYKVREINNYHHAHDAYLNAVVGTALIKKYPKLESEFVYGDYKVYDVRKMIAKSEQEIGKATAKYFFYSNIMNFFKTEITLANGEIRKRPLIETNGETGEIVWDKGRDFATVRKVLSMPQVNIVKKTEVQTGGFSKESILPKRNSDKLIARKKDWDPKKYGGFDSPTVAYSVLVVAKVEKGKSKKLKSVKELLGITIMERSSFEKNPIDFLEAKGYKEVKKDLIIKLPKYSLFELENGRKRMLASAGELQKGNELALPSKYVNFLYLASHYEKLKGSPEDNEQKQLFVEQHKHYLDEIIEQISEFSKRVILADANLDKVLSAYNKHRDKPIREQAENIIHLFTLTNLGAPAAFKYFDTTIDRKRYTSTKEVLDATLIHQSITGLYETRIDLSQLGGDGGPAPAPAPGGTLQLDDEYRLYSPLVKPDQNIQFWLEQFPQAWAETAGMGLAKQVPPQVIQLKASATPVSVRQYPLSKEAQEGIRPHVQRLIQQGILVPVQSPWNTPLLPVRKPGTNDYRPVQDLREVNKRVQDIHPTVPNPYNLLCALPPQRSWYTVLDLKDAFFCLRLHPTSQPLFAFEWRDPGTGRTGQLTWTRLPQGFKNSPTIFNEALHRDLANFRIQHPQVTLLQYVDDLLLAGATKQDCLEGTKALLLELSDLGYRASAKKAQICRREVTYLGYSLRDGQRWLTEARKKTVVQIPAPTTAKQVREFLGTAGFCRLWIPGFATLAAPLYPLTKPKGEFSWAPEHQKAFDAIKKALLSAPALALPDVTKPFTLYVDERKGVARGVLTQTLGPWRRPVAYLSKKLDPVASGWPVCLKAIAAVAILVKDADKLTLGQNITVIAPHALENIVRQPPDRWMTNARMTHYQSLLLTERVTFAPPAALNPATLLPEETDEPVTHDCHQLLIEETGVRKDLTDIPLTGEVLTWFTDGSSYVVEGKRMAGAAVVDGTRTIWASSLPEGTSAQKAELMALTQALRLAEGKSINIYTDSRYAFATAHVHGAIYKQRGWLTSAGREIKNKEEILSLLEALHLPKRLAIIHCPGHQKAKDPISRGNQMADRVAKQAAQGVNLLAGKRTADGSEFEKRTADGSEFESPKKKAKVE

SEQ ID NO: 6509 - protein, 2086 aa, synthetic construct; identical to SEQ ID NO: 6508

SEQ ID NO: 6510 - protein, 2083 aa, synthetic construct
MPAAKRVKLDGGDKKYSIGLDIGTNSVGWAVITDEYKVPSKKFKVLGNTDRHSIKKNLIGALLFDSGETAEATRLKRTARRRYTRRKNRICYLQEIFSNEMAKVDDSFFHRLEESFLVEEDKKHERHPIFGNIVDEVAYHEKYPTIYHLRKKLVDSTDKADLRLIYLALAHMIKFRGHFLIEGDLNPDNSDVDKLFIQLVQTYNQLFEENPINASGVDAKAILSARLSKSRRLENLIAQLPGEKKNGLFGNLIALSLGLTPNFKSNFDLAEDAKLQLSKDTYDDDLDNLLAQIGDQYADLFLAAKNLSDAILLSDILRVNTEITKAPLSASMIKRYDEHHQDLTLLKALVRQQLPEKYKEIFFDQSKNGYAGYIDGGASQEEFYKFIKPILEKMDGTEELLVKLNREDLLRKQRTFDNGSIPHQIHLGELHAILRRQEDFYPFLKDNREKIEKILTFRIPYYVGPLARGNSRFAWMTRKSEETITPWNFEEVVDKGASAQSFIERMTNFDKNLPNEKVLPKHSLLYEYFTVYNELTKVKYVTEGMRKPAFLSGEQKKAIVDLLFKTNRKVTVKQLKEDYFKKIECFDSVEISGVEDRFNASLGTYHDLLKIIKDKDFLDNEENEDILEDIVLTLTLFEDREMIEERLKTYAHLFDDKVMKQLKRRRYTGWGRLSRKLINGIRDKQSGKTILDFLKSDGFANRNFMQLIHDDSLTFKEDIQKAQVSGQGDSLHEHIANLAGSPAIKKGILQTVKVVDELVKVMGRHKPENIVIEMARENQTTQKGQKNSRERMKRIEEGIKELGSQILKEHPVENTQLQNEKLYLYYLQNGRDMYVDQELDINRLSDYDVDHIVPQSFLKDDSIDNKVLTRSDKARGKSDNVPSEEVVKKMKNYWRQLLNAKLITQRKFDNLTKAERGGLSELDKAGFIKRQLVETRQITKHVAQILDSRMNTKYDENDKLIREVKVITLKSKLVSDFRKDFQFYKVREINNYHHAHDAYLNAVVGTALIKKYPKLESEFVYGDYKVYDVRKMIAKSEQEIGKATAKYFFYSNIMNFFKTEITLANGEIRKRPLIETNGETGEIVWDKGRDFATVRKVLSMPQVNIVKKTEVQTGGFSKESILPKRNSDKLIARKKDWDPKKYGGFDSPTVAYSVLVVAKVEKGKSKKLKSVKELLGITIMERSSFEKNPIDFLEAKGYKEVKKDLIIKLPKYSLFELENGRKRMLASAGELQKGNELALPSKYVNFLYLASHYEKLKGSPEDNEQKQLFVEQHKHYLDEIIEQISEFSKRVILADANLDKVLSAYNKHRDKPIREQAENIIHLFTLTNLGAPAAFKYFDTTIDRKRYTSTKEVLDATLIHQSITGLYETRIDLSQLGGDGGPAPAPAPGGVPWLMKKPLQLTVLVPLHEYQERLLQQTALPKEQKELLQKLFLKYDALWQHWENQVGHRRIKPHNIATGTLAPRPQKQYPINPKAKPSIQIVIDDLLKQGVLIQQNSTMNTPVYPVPKPDGKWRMVLDYREVNKTIPLIAAQNQHSAGILSSIYRGKYKTTLDLTNGFWAHPITPESYWLTAFTWQGKQYCWTRLPQGFLNSPALFNADVVDLLKEIPNVQAYVDDIYISHDDPQEHLEQLEKIFSILLNAGYVVSLKKSEIAQREVEFLGFNITKEGRGLTDTFKQKLLNITPPKDLKQLQSILGLLNFARNFIPNYSELVKPLYTIVAPANGKFISWTEDNSNQLQHIISVLNQADNLEERNPETRLIIKVNSSPSAGYIRYYNEGSKRPIMYVNYIFSKAEAKFTQTEKLLTTMHKGLIKAMDLAMGQEILVYSPIVSMTKIQRTPLPERKALPVRWITWMTYLEDPRIQFHYDKSLPELQQIPNVTEDVIAKTKHPSEFAMVFYTDGSAIKHPDVNKSHSAGMGIAQVQFIPEYKIVHQWSIPLGDHTAQLAEIAAVEFACKKALKISGPVLIVTDSFYVAESANKELPYWKSNGFLNNKKKPLRHVSKWKSIAECLQLKPDIIIMHEKGHQQPMTTLHTEGNNLADKLATQGSYVVHAGKRTADGSEFEKRTADGSEFESPKKKAKVE

SEQ ID NO: 6511 - protein, 2172 aa, synthetic construct
MPAAKRVKLDGGDKKYSIGLDIGTNSVGWAVITDEYKVPSKKFKVLGNTDRHSIKKNLIGALLFDSGETAEATRLKRTARRRYTRRKNRICYLQEIFSNEMAKVDDSFFHRLEESFLVEEDKKHERHPIFGNIVDEVAYHEKYPTIYHLRKKLVDSTDKADLRLIYLALAHMIKFRGHFLIEGDLNPDNSDVDKLFIQLVQTYNQLFEENPINASGVDAKAILSARLSKSRRLENLIAQLPGEKKNGLFGNLIALSLGLTPNFKSNFDLAEDAKLQLSKDTYDDDLDNLLAQIGDQYADLFLAAKNLSDAILLSDILRVNTEITKAPLSASMIKRYDEHHQDLTLLKALVRQQLPEKYKEIFFDQSKNGYAGYIDGGASQEEFYKFIKPILEKMDGTEELLVKLNREDLLRKQRTFDNGSIPHQIHLGELHAILRRQEDFYPFLKDNREKIEKILTFRIPYYVGPLARGNSRFAWMTRKSEETITPWNFEEVVDKGASAQSFIERMTNFDKNLPNEKVLPKHSLLYEYFTVYNELTKVKYVTEGMRKPAFLSGEQKKAIVDLLFKTNRKVTVKQLKEDYFKKIECFDSVEISGVEDRFNASLGTYHDLLKIIKDKDFLDNEENEDILEDIVLTLTLFEDREMIEERLKTYAHLFDDKVMKQLKRRRYTGWGRLSRKLINGIRDKQSGKTILDFLKSDGFANRNFMQLIHDDSLTFKEDIQKAQVSGQGDSLHEHIANLAGSPAIKKGILQTVKVVDELVKVMGRHKPENIVIEMARENQTTQKGQKNSRERMKRIEEGIKELGSQILKEHPVENTQLQNEKLYLYYLQNGRDMYVDQELDINRLSDYDVDHIVPQSFLKDDSIDNKVLTRSDKARGKSDNVPSEEVVKKMKNYWRQLLNAKLITQRKFDNLTKAERGGLSELDKAGFIKRQLVETRQITKHVAQILDSRMNTKYDENDKLIREVKVITLKSKLVSDFRKDFQFYKVREINNYHHAHDAYLNAVVGTALIKKYPKLESEFVYGDYKVYDVRKMIAKSEQEIGKATAKYFFYSNIMNFFKTEITLANGEIRKRPLIETNGETGEIVWDKGRDFATVRKVLSMPQVNIVKKTEVQTGGFSKESILPKRNSDKLIARKKDWDPKKYGGFDSPTVAYSVLVVAKVEKGKSKKLKSVKELLGITIMERSSFEKNPIDFLEAKGYKEVKKDLIIKLPKYSLFELENGRKRMLASAGELQKGNELALPSKYVNFLYLASHYEKLKGSPEDNEQKQLFVEQHKHYLDEIIEQISEFSKRVILADANLDKVLSAYNKHRDKPIREQAENIIHLFTLTNLGAPAAFKYFDTTIDRKRYTSTKEVLDATLIHQSITGLYETRIDLSQLGGDGGPAPAPAPGGMDPLQLLQPLEAEIKGTKLKAHWNSGATITCVPQAFLEEEVPIKNIWIKTIHGEKEQPVYYLTFKIQGRKVEAEVISSPYDYILVSPSDIPWLMKKPLQLTTLVPLQEYEERLLKQTMLTGSYKEKLQSLFLKYDALWQHWENQVGHRRIKPHHIATGTVNPRPQKQYPINPKAKASIQTVINDLLKQGVLIQQNSIMNTPVYPVPKPDGKWRMVLDYREVNKTIPLIAAQNQHSAGILSSIFRGKYKTTLDLSNGFWAHSITPESYWLTAFTWLGQQYCWTRLPQGFLNSPALFNADVVDLLKEVPNVQVYVDDIYISHDDPREHLEQLEKVFSLLLNAGYVVSLKKSEIAQHEVEFLGFNITKEGRGLTETFKQKLLNITPPRDLKQLQSILGKLNFARNFIPNFSELVKPLYNIIATAPGKYITWTTDNSQQLQNIISMLNSAENLEERNPEVRLIMKVNTSPSAGYIRFYNEFAKRPIMYLNYVYTKAEVKFTNTEKLLTTIHKGLIKALDLGMGQEILVYSPIVSMTKIQKTPLPERKALPIRWITWMSYLEDPRIQFHYDKTLPELQQVPTVTDDIIAKIKHPSEFSMVFYTDGSAIKHPNVNKSHNAGMGIAQVQFKPEFTVINTWSIPLGDHTAQLAEVAAVEFACKKALKIDGPVLIVTDSFYVAESVNKELPYWQSNGFFNNKKKPLKHVSKWKSIADCIQLKPDIIIIHEKGHQPTASTFHTEGNNLADKLATQGSYVVNAGKRTADGSEFEKRTADGSEFESPKKKAKVE

SEQ ID NO: 6512 - protein, 2092 aa, synthetic construct
MPAAKRVKLDGGDKKYSIGLDIGTNSVGWAVITDEYKVPSKKFKVLGNTDRHSIKKNLIGALLFDSGETAEATRLKRTARRRYTRRKNRICYLQEIFSNEMAKVDDSFFHRLEESFLVEEDKKHERHPIFGNIVDEVAYHEKYPTIYHLRKKLVDSTDKADLRLIYLALAHMIKFRGHFLIEGDLNPDNSDVDKLFIQLVQTYNQLFEENPINASGVDAKAILSARLSKSRRLENLIAQLPGEKKNGLFGNLIALSLGLTPNFKSNFDLAEDAKLQLSKDTYDDDLDNLLAQIGDQYADLFLAAKNLSDAILLSDILRVNTEITKAPLSASMIKRYDEHHQDLTLLKALVRQQLPEKYKEIFFDQSKNGYAGYIDGGASQEEFYKFIKPILEKMDGTEELLVKLNREDLLRKQRTFDNGSIPHQIHLGELHAILRRQEDFYPFLKDNREKIEKILTFRIPYYVGPLARGNSRFAWMTRKSEETITPWNFEEVVDKGASAQSFIERMTNFDKNLPNEKVLPKHSLLYEYFTVYNELTKVKYVTEGMRKPAFLSGEQKKAIVDLLFKTNRKVTVKQLKEDYFKKIECFDSVEISGVEDRFNASLGTYHDLLKIIKDKDFLDNEENEDILEDIVLTLTLFEDREMIEERLKTYAHLFDDKVMKQLKRRRYTGWGRLSRKLINGIRDKQSGKTILDFLKSDGFANRNFMQLIHDDSLTFKEDIQKAQVSGQGDSLHEHIANLAGSPAIKKGILQTVKVVDELVKVMGRHKPENIVIEMARENQTTQKGQKNSRERMKRIEEGIKELGSQILKEHPVENTQLQNEKLYLYYLQNGRDMYVDQELDINRLSDYDVDHIVPQSFLKDDSIDNKVLTRSDKARGKSDNVPSEEVVKKMKNYWRQLLNAKLITQRKFDNLTKAERGGLSELDKAGFIKRQLVETRQITKHVAQILDSRMNTKYDENDKLIREVKVITLKSKLVSDFRKDFQFYKVREINNYHHAHDAYLNAVVGTALIKKYPKLESEFVYGDYKVYDVRKMIAKSEQEIGKATAKYFFYSNIMNFFKTEITLANGEIRKRPLIETNGETGEIVWDKGRDFATVRKVLSMPQVNIVKKTEVQTGGFSKESILPKRNSDKLIARKKDWDPKKYGGFDSPTVAYSVLVVAKVEKGKSKKLKSVKELLGITIMERSSFEKNPIDFLEAKGYKEVKKDLIIKLPKYSLFELENGRKRMLASAGELQKGNELALPSKYVNFLYLASHYEKLKGSPEDNEQKQLFVEQHKHYLDEIIEQISEFSKRVILADANLDKVLSAYNKHRDKPIREQAENIIHLFTLTNLGAPAAFKYFDTTIDRKRYTSTKEVLDATLIHQSITGLYETRIDLSQLGGDGGPAPAPAPGGTLNIEDEYRLHETSKEPDVPLGSTWLSDFPQAWAETGGMGLAVRQAPLIIPLKATSTPVSIKQYPMSQEARLGIKPHIQRLLDQGILVPCQSPWNTPLLPVKKPGTNDYRPVQDLREVNKRVEDIHPTVPNPYNLLSGLPPSHQWYTVLDLKDAFFCLRLHPTSQPLFAFEWRDPEMGISGQLTWTRLPQGFKNSPTLFNEALHRDLADFRIQHPDLILLQYVDDLLLAATSEQDCQRGTRALLQTLGNLGYRASAKKAQICQKQVKYLGYLLKEGQRWLTEARKETVMGQPTPKTPRQLREFLGKAGFCRLFIPGFAEMAAPLYPLTKPGTLFNWGPDQQKAYQEIKQALLTAPALGLPDLTKPFELFVDEKQGYAKGVLTQKLGPWRRPVAYLSKKLDPVAAGWPPCLRMVAAIAVLTKDAGKLTMGQPLVILAPHAVEALVKQPPDRWLSNARMTHYQAMLLDTDRVQFGPVVALNPATLLPLPEKEAPHDCLEILAETHGTRPDLTDQPIPDADYTWYTDGSSFLQEGQRRAGAAVTTETEVIWARALPAGTSAQRAELIALTQALKMAEGKKLNVYTDSRYAFATAHVHGEIYRRRGWLTSEGREIKNKNEILALLKALFLPKRLSIIHCPGHQKGNSAEARGNRMADQAAREAAMKAVLETSTLLAGKRTADGSEFEKRTADGSEFESPKKKAKVE

SEQ ID NO: 6513 - protein, 2096 aa, synthetic construct
MPAAKRVKLDGGDKKYSIGLDIGTNSVGWAVITDEYKVPSKKFKVLGNTDRHSIKKNLIGALLFDSGETAEATRLKRTARRRYTRRKNRICYLQEIFSNEMAKVDDSFFHRLEESFLVEEDKKHERHPIFGNIVDEVAYHEKYPTIYHLRKKLVDSTDKADLRLIYLALAHMIKFRGHFLIEGDLNPDNSDVDKLFIQLVQTYNQLFEENPINASGVDAKAILSARLSKSRRLENLIAQLPGEKKNGLFGNLIALSLGLTPNFKSNFDLAEDAKLQLSKDTYDDDLDNLLAQIGDQYADLFLAAKNLSDAILLSDILRVNTEITKAPLSASMIKRYDEHHQDLTLLKALVRQQLPEKYKEIFFDQSKNGYAGYIDGGASQEEFYKFIKPILEKMDGTEELLVKLNREDLLRKQRTFDNGSIPHQIHLGELHAILRRQEDFYPFLKDNREKIEKILTFRIPYYVGPLARGNSRFAWMTRKSEETITPWNFEEVVDKGASAQSFIERMTNFDKNLPNEKVLPKHSLLYEYFTVYNELTKVKYVTEGMRKPAFLSGEQKKAIVDLLFKTNRKVTVKQLKEDYFKKIECFDSVEISGVEDRFNASLGTYHDLLKIIKDKDFLDNEENEDILEDIVLTLTLFEDREMIEERLKTYAHLFDDKVMKQLKRRRYTGWGRLSRKLINGIRDKQSGKTILDFLKSDGFANRNFMQLIHDDSLTFKEDIQKAQVSGQGDSLHEHIANLAGSPAIKKGILQTVKVVDELVKVMGRHKPENIVIEMARENQTTQKGQKNSRERMKRIEEGIKELGSQILKEHPVENTQLQNEKLYLYYLQNGRDMYVDQELDINRLSDYDVDHIVPQSFLKDDSIDNKVLTRSDKARGKSDNVPSEEVVKKMKNYWRQLLNAKLITQRKFDNLTKAERGGLSELDKAGFIKRQLVETRQITKHVAQILDSRMNTKYDENDKLIREVKVITLKSKLVSDFRKDFQFYKVREINNYHHAHDAYLNAVVGTALIKKYPKLESEFVYGDYKVYDVRKMIAKSEQEIGKATAKYFFYSNIMNFFKTEITLANGEIRKRPLIETNGETGEIVWDKGRDFATVRKVLSMPQVNIVKKTEVQTGGFSKESILPKRNSDKLIARKKDWDPKKYGGFDSPTVAYSVLVVAKVEKGKSKKLKSVKELLGITIMERSSFEKNPIDFLEAKGYKEVKKDLIIKLPKYSLFELENGRKRMLASAGELQKGNELALPSKYVNFLYLASHYEKLKGSPEDNEQKQLFVEQHKHYLDEIIEQISEFSKRVILADANLDKVLSAYNKHRDKPIREQAENIIHLFTLTNLGAPAAFKYFDTTIDRKRYTSTKEVLDATLIHQSITGLYETRIDLSQLGGDGGPAPAPAPAPGGTAPLEEEYRLFLEAPIQNVTLLEQWKREIPKVWAEINPPGLASTQAPIHVQLLSTALPVRVRQYPITLEAKRSLRETIRKFRAAGILRPVHSPWNTPLLPVRKSGTSEYRMVQDLREVNKRVETIHPTVPNPYTLLSLLPPDRIWYSVLDLKDAFFCIPLAPESQLIFAFEWADAEEGESGQLTWTRLPQGFKNSPTLFDEALNRDLQGFRLDHPSVSLLQYVDDLLIAADTQAACLSATRDLLMTLAELGYRVSGKKAQLCQEEVTYLGFKIHKGSRSLSNSRTQAILQIPVPKTKRQVREFLGTIGYCRLWIPGFAELAQPLYAATRGGNDPLVWGEKEEEAFQSLKLALTQPPALALPSLDKPFQLFVEETSGAAKGVLTQALGPWKRPVAYLSKRLDPVAAGWPRCLRAIAAAALLTREASKLTFGQDIEITSSHNLESLLRSPPDKWLTNARITQYQVLLLDPPRVRFKQTAALNPATLLPETDDTLPIHHCLDTLDSLTSTRPDLTDQPLAQAEATLFTDGSSYIRDGKRYAGAAVVTLDSVIWAEPLPIGTSAQKAELIALTKALEWSKDKSVNIYTDSRYAFATLHVHGMIYRERGLLTAGGKAIKNAPEILALLTAVWLPKRVAVMHCKGHQKDDAPTSTGNRRADEVAREVAIRPLSTQATISAGKRTADGSEFEKRTADGSEFESPKKKAKVE

SEQ ID NO: 6514 - protein, 2096 aa, synthetic construct
MPAAKRVKLDGGDKKYSIGLDIGTNSVGWAVITDEYKVPSKKFKVLGNTDRHSIKKNLIGALLFDSGETAEATRLKRTARRRYTRRKNRICYLQEIFSNEMAKVDDSFFHRLEESFLVEEDKKHERHPIFGNIVDEVAYHEKYPTIYHLRKKLVDSTDKADLRLIYLALAHMIKFRGHFLIEGDLNPDNSDVDKLFIQLVQTYNQLFEENPINASGVDAKAILSARLSKSRRLENLIAQLPGEKKNGLFGNLIALSLGLTPNFKSNFDLAEDAKLQLSKDTYDDDLDNLLAQIGDQYADLFLAAKNLSDAILLSDILRVNTEITKAPLSASMIKRYDEHHQDLTLLKALVRQQLPEKYKEIFFDQSKNGYAGYIDGGASQEEFYKFIKPILEKMDGTEELLVKLNREDLLRKQRTFDNGSIPHQIHLGELHAILRRQEDFYPFLKDNREKIEKILTFRIPYYVGPLARGNSRFAWMTRKSEETITPWNFEEVVDKGASAQSFIERMTNFDKNLPNEKVLPKHSLLYEYFTVYNELTKVKYVTEGMRKPAFLSGEQKKAIVDLLFKTNRKVTVKQLKEDYFKKIECFDSVEISGVEDRFNASLGTYHDLLKIIKDKDFLDNEENEDILEDIVLTLTLFEDREMIEERLKTYAHLFDDKVMKQLKRRRYTGWGRLSRKLINGIRDKQSGKTILDFLKSDGFANRNFMQLIHDDSLTFKEDIQKAQVSGQGDSLHEHIANLAGSPAIKKGILQTVKVVDELVKVMGRHKPENIVIEMARENQTTQKGQKNSRERMKRIEEGIKELGSQILKEHPVENTQLQNEKLYLYYLQNGRDMYVDQELDINRLSDYDVDHIVPQSFLKDDSIDNKVLTRSDKARGKSDNVPSEEVVKKMKNYWRQLLNAKLITQRKFDNLTKAERGGLSELDKAGFIKRQLVETRQITKHVAQILDSRMNTKYDENDKLIREVKVITLKSKLVSDFRKDFQFYKVREINNYHHAHDAYLNAVVGTALIKKYPKLESEFVYGDYKVYDVRKMIAKSEQEIGKATAKYFFYSNIMNFFKTEITLANGEIRKRPLIETNGETGEIVWDKGRDFATVRKVLSMPQVNIVKKTEVQTGGFSKESILPKRNSDKLIARKKDWDPKKYGGFDSPTVAYSVLVVAKVEKGKSKKLKSVKELLGITIMERSSFEKNPIDFLEAKGYKEVKKDLIIKLPKYSLFELENGRKRMLASAGELQKGNELALPSKYVNFLYLASHYEKLKGSPEDNEQKQLFVEQHKHYLDEIIEQISEFSKRVILADANLDKVLSAYNKHRDKPIREQAENIIHLFTLTNLGAPAAFKYFDTTIDRKRYTSTKEVLDATLIHQSITGLYETRIDLSQLGGDGGPAPAPAPAPGGTAPLEEEYRLFLEAPIQNVTLLEQWKREIPKVWAEINPPGLASTQAPIHVQLLSTALPVRVRQYPITLEAKRSLRETIRKFRAAGILRPVHSPWNTPLLPVRKSGTSEYRMVQDLREVNKRVETIHPTVPNPYTLLSLLPPDRIWYSVLDLKDAFFCIPLAPESQLIFAFEWADAEEGESGQLTWTRLPQGFKNSPTLFNEALNRDLQGFRLDHPSVSLLQYVDDLLIAADTQAACLSATRDLLMTLAELGYRVSGKKAQLCQEEVTYLGFKIHKGSRSLSNSRTQAILQIPVPKTKRQVREFLGTIGYCRLWIPGFAELAQPLYAATRPGNDPLVWGEKEEEAFQSLKLALTQPPALALPSLDKPFQLFVEETSGAAKGVLTQALGPWKRPVAYLSKRLDPVAAGWPRCLRAIAAAALLTREASKLTFGQDIEITSSHNLESLLRSPPDKWLTNARITQYQVLLLDPPRVRFKQTAALNPATLLPETDDTLPIHHCLDTLDSLTSTRPDLTDQPLAQAEATLFTDGSSYIRDGKRYAGAAVVTLDSVIWAEPLPIGTSAQKAELIALTKALEWSKDKSVNIYTDSRYAFATLHVHGMIYRERGWLTAGGKAIKNAPEILALLTAVWLPKRVAVMHCKGHQKDDAPTSTGNRRADEVAREVAIRPLSTQATISAGKRTADGSEFEKRTADGSEFESPKKKAKVE

SEQ ID NO: 6515 - protein, 2100 aa, synthetic construct
MPAAKRVKLDGGDKKYSIGLDIGTNSVGWAVITDEYKVPSKKFKVLGNTDRHSIKKNLIGALLFDSGETAEATRLKRTARRRYTRRKNRICYLQEIFSNEMAKVDDSFFHRLEESFLVEEDKKHERHPIFGNIVDEVAYHEKYPTIYHLRKKLVDSTDKADLRLIYLALAHMIKFRGHFLIEGDLNPDNSDVDKLFIQLVQTYNQLFEENPINASGVDAKAILSARLSKSRRLENLIAQLPGEKKNGLFGNLIALSLGLTPNFKSNFDLAEDAKLQLSKDTYDDDLDNLLAQIGDQYADLFLAAKNLSDAILLSDILRVNTEITKAPLSASMIKRYDEHHQDLTLLKALVRQQLPEKYKEIFFDQSKNGYAGYIDGGASQEEFYKFIKPILEKMDGTEELLVKLNREDLLRKQRTFDNGSIPHQIHLGELHAILRRQEDFYPFLKDNREKIEKILTFRIPYYVGPLARGNSRFAWMTRKSEETITPWNFEEVVDKGASAQSFIERMTNFDKNLPNEKVLPKHSLLYEYFTVYNELTKVKYVTEGMRKPAFLSGEQKKAIVDLLFKTNRKVTVKQLKEDYFKKIECFDSVEISGVEDRFNASLGTYHDLLKIIKDKDFLDNEENEDILEDIVLTLTLFEDREMIEERLKTYAHLFDDKVMKQLKRRRYTGWGRLSRKLINGIRDKQSGKTILDFLKSDGFANRNFMQLIHDDSLTFKEDIQKAQVSGQGDSLHEHIANLAGSPAIKKGILQTVKVVDELVKVMGRHKPENIVIEMARENQTTQKGQKNSRERMKRIEEGIKELGSQILKEHPVENTQLQNEKLYLYYLQNGRDMYVDQELDINRLSDYDVDHIVPQSFLKDDSIDNKVLTRSDKARGKSDNVPSEEVVKKMKNYWRQLLNAKLITQRKFDNLTKAERGGLSELDKAGFIKRQLVETRQITKHVAQILDSRMNTKYDENDKLIREVKVITLKSKLVSDFRKDFQFYKVREINNYHHAHDAYLNAVVGTALIKKYPKLESEFVYGDYKVYDVRKMIAKSEQEIGKATAKYFFYSNIMNFFKTEITLANGEIRKRPLIETNGETGEIVWDKGRDFATVRKVLSMPQVNIVKKTEVQTGGFSKESILPKRNSDKLIARKKDWDPKKYGGFDSPTVAYSVLVVAKVEKGKSKKLKSVKELLGITIMERSSFEKNPIDFLEAKGYKEVKKDLIIKLPKYSLFELENGRKRMLASAGELQKGNELALPSKYVNFLYLASHYEKLKGSPEDNEQKQLFVEQHKHYLDEIIEQISEFSKRVILADANLDKVLSAYNKHRDKPIREQAENIIHLFTLTNLGAPAAFKYFDTTIDRKRYTSTKEVLDATLIHQSITGLYETRIDLSQLGGDGGPAPAPAPAPGGTVSLQDEHRLFDIPVTTSLPDVWLQDFPQAWAETGGLGRAKCQAPIIIDLKPTAVPVSIKQYPMSLEAHMGIRQHIIKFLELGVLRPCRSPWNTPLLPVKKPGTQDYRPVQDLREINKRTVDIHPTVPNPYNLLSTLKPDYSWYTVLDLKDAFFCLPLAPQSQELFAFEWKDPERGISGQLTWTRLPQGFKNSPTLFNEALHRDLTDFRTQHPEVTLLQYVDDLLLAAPTKKACTQGTRHLLQELGEKGYRASAKKAQICQTKVTYLGYILSEGKRWLTPGRIETVARIPPPRNPREVREFLGTAGFCRLWIPGFAELAAPLYALTKPSTPFTWQTEHQLAFEALKKALLSAPALGLPDTSKPFTLFLDERQGIAKGVLTQKLGPWKRPVAYLSKKLDPVAAGWPPCLRIMAATAMLVKDSAKLTLGQPLTVITPHTLEAIVRQPPDRWITNARLTHYQALLLDTDRVQFGPPVTLNPATLLPVPENQPSPHDCRQVLAETHGTREDLKDQELPDADHTWYTDGSSYLDSGTRRAGAAVVDGHNTIWAQSLPPGTSAQKAELIALTKALELSKGKKANIYTDSRYAFATAHTHGSIYERRGWLTSEGKEIKNKAEIIALLKALFLPQEVAIIHCPGHQKGQDPVAVGNRQADRVARQAAMAEVLTLATEPDNTSHITAGKRTADGSEFEKRTADGSEFESPKKKAKVE

SEQ ID NO: 6516 - protein, 2085 aa, synthetic construct
MPAAKRVKLDGGDKKYSIGLDIGTNSVGWAVITDEYKVPSKKFKVLGNTDRHSIKKNLIGALLFDSGETAEATRLKRTARRRYTRRKNRICYLQEIFSNEMAKVDDSFFHRLEESFLVEEDKKHERHPIFGNIVDEVAYHEKYPTIYHLRKKLVDSTDKADLRLIYLALAHMIKFRGHFLIEGDLNPDNSDVDKLFIQLVQTYNQLFEENPINASGVDAKAILSARLSKSRRLENLIAQLPGEKKNGLFGNLIALSLGLTPNFKSNFDLAEDAKLQLSKDTYDDDLDNLLAQIGDQYADLFLAAKNLSDAILLSDILRVNTEITKAPLSASMIKRYDEHHQDLTLLKALVRQQLPEKYKEIFFDQSKNGYAGYIDGGASQEEFYKFIKPILEKMDGTEELLVKLNREDLLRKQRTFDNGSIPHQIHLGELHAILRRQEDFYPFLKDNREKIEKILTFRIPYYVGPLARGNSRFAWMTRKSEETITPWNFEEVVDKGASAQSFIERMTNFDKNLPNEKVLPKHSLLYEYFTVYNELTKVKYVTEGMRKPAFLSGEQKKAIVDLLFKTNRKVTVKQLKEDYFKKIECFDSVEISGVEDRFNASLGTYHDLLKIIKDKDFLDNEENEDILEDIVLTLTLFEDREMIEERLKTYAHLFDDKVMKQLKRRRYTGWGRLSRKLINGIRDKQSGKTILDFLKSDGFANRNFMQLIHDDSLTFKEDIQKAQVSGQGDSLHEHIANLAGSPAIKKGILQTVKVVDELVKVMGRHKPENIVIEMARENQTTQKGQKNSRERMKRIEEGIKELGSQILKEHPVENTQLQNEKLYLYYLQNGRDMYVDQELDINRLSDYDVDHIVPQSFLKDDSIDNKVLTRSDKARGKSDNVPSEEVVKKMKNYWRQLLNAKLITQRKFDNLTKAERGGLSELDKAGFIKRQLVETRQITKHVAQILDSRMNTKYDENDKLIREVKVITLKSKLVSDFRKDFQFYKVREINNYHHAHDAYLNAVVGTALIKKYPKLESEFVYGDYKVYDVRKMIAKSEQEIGKATAKYFFYSNIMNFFKTEITLANGEIRKRPLIETNGETGEIVWDKGRDFATVRKVLSMPQVNIVKKTEVQTGGFSKESILPKRNSDKLIARKKDWDPKKYGGFDSPTVAYSVLVVAKVEKGKSKKLKSVKELLGITIMERSSFEKNPIDFLEAKGYKEVKKDLIIKLPKYSLFELENGRKRMLASAGELQKGNELALPSKYVNFLYLASHYEKLKGSPEDNEQKQLFVEQHKHYLDEIIEQISEFSKRVILADANLDKVLSAYNKHRDKPIREQAENIIHLFTLTNLGAPAAFKYFDTTIDRKRYTSTKEVLDATLIHQSITGLYETRIDLSQLGGDGGPAPAPAPAPGGVPWILKKPLELTIKLDLEEQQGTLLNNSILSKKGKEELKQLFEKYSALWQSWENQVGHRRIRPHKIATGTVKPTPQKQYHINPKAKPDIQIVINDLLKQGVLIQKESTMNTPVYPVPKPNGRWRMVLDYRAVNKVTPLIAVQNQHSYGILGSLFKGRYKTTIDLSNGFWAHPIVPEDYWITAFTWQGKQYCWTVLPQGFLNSPGLFNGDVVDLLQGIPNVEVYVDDVYISHDSEKEHLEYLDILFNRLKEAGYIISLKKSNIANSIVDFLGFQITNEGRGLTDTFKEKLENITAPTTLKQLQSILGKLNFARNFIPDFTELIAPLYALIPKSPKNYVPWQIEHSTTLETLITKLNGAEYLQGRKGDKTLIMKVNASYTTGYIRYYNEGEKKPISYVSIVFSKTELKFTELEKLLTTVHKGLLKALDLSMGQNIHVYSPIVSMQNIQKTPQTAKKALASRWLSWLSYLEDPRIRFFYDPQMPALKDLPAVDTGKDNKKHPSNFQHIFYTDGSAITSPTKEGHLNAGMGIVYFINKDGNLQKQQEWSISLGNHTAQFAEIAAFEFALKKCLPLGGNILVVTDSNYVAKAYNEELDVWASNGFVNNRKKPLKHISKWKSVADLKRLRPDVVVTHEPGHQKLDSSPHAYGNNLADQLATQASFKVHAGKRTADGSEFEKRTADGSEFESPKKKAKVE

SEQ ID NO: 6517 - protein, 2093 aa, synthetic construct
MPAAKRVKLDGGDKKYSIGLDIGTNSVGWAVITDEYKVPSKKFKVLGNTDRHSIKKNLIGALLFDSGETAEATRLKRTARRRYTRRKNRICYLQEIFSNEMAKVDDSFFHRLEESFLVEEDKKHERHPIFGNIVDEVAYHEKYPTIYHLRKKLVDSTDKADLRLIYLALAHMIKFRGHFLIEGDLNPDNSDVDKLFIQLVQTYNQLFEENPINASGVDAKAILSARLSKSRRLENLIAQLPGEKKNGLFGNLIALSLGLTPNFKSNFDLAEDAKLQLSKDTYDDDLDNLLAQIGDQYADLFLAAKNLSDAILLSDILRVNTEITKAPLSASMIKRYDEHHQDLTLLKALVRQQLPEKYKEIFFDQSKNGYAGYIDGGASQEEFYKFIKPILEKMDGTEELLVKLNREDLLRKQRTFDNGSIPHQIHLGELHAILRRQEDFYPFLKDNREKIEKILTFRIPYYVGPLARGNSRFAWMTRKSEETITPWNFEEVVDKGASAQSFIERMTNFDKNLPNEKVLPKHSLLYEYFTVYNELTKVKYVTEGMRKPAFLSGEQKKAIVDLLFKTNRKVTVKQLKEDYFKKIECFDSVEISGVEDRFNASLGTYHDLLKIIKDKDFLDNEENEDILEDIVLTLTLFEDREMIEERLKTYAHLFDDKVMKQLKRRRYTGWGRLSRKLINGIRDKQSGKTILDFLKSDGFANRNFMQLIHDDSLTFKEDIQKAQVSGQGDSLHEHIANLAGSPAIKKGILQTVKVVDELVKVMGRHKPENIVIEMARENQTTQKGQKNSRERMKRIEEGIKELGSQILKEHPVENTQLQNEKLYLYYLQNGRDMYVDQELDINRLSDYDVDHIVPQSFLKDDSIDNKVLTRSDKARGKSDNVPSEEVVKKMKNYWRQLLNAKLITQRKFDNLTKAERGGLSELDKAGFIKRQLVETRQITKHVAQILDSRMNTKYDENDKLIREVKVITLKSKLVSDFRKDFQFYKVREINNYHHAHDAYLNAVVGTALIKKYPKLESEFVYGDYKVYDVRKMIAKSEQEIGKATAKYFFYSNIMNFFKTEITLANGEIRKRPLIETNGETGEIVWDKGRDFATVRKVLSMPQVNIVKKTEVQTGGFSKESILPKRNSDKLIARKKDWDPKKYGGFDSPTVAYSVLVVAKVEKGKSKKLKSVKELLGITIMERSSFEKNPIDFLEAKGYKEVKKDLIIKLPKYSLFELENGRKRMLASAGELQKGNELALPSKYVNFLYLASHYEKLKGSPEDNEQKQLFVEQHKHYLDEIIEQISEFSKRVILADANLDKVLSAYNKHRDKPIREQAENIIHLFTLTNLGAPAAFKYFDTTIDRKRYTSTKEVLDATLIHQSITGLYETRIDLSQLGGDGGPAPAPAPAPGGTLQLEEEYRLFEPESTQKQEMDIWLKNFPQAWAETGGMGTAHCQAPVLIQLKATATPISIRQYPMPHEAYQGIKPHIRRMLDQGILKPCQSPWNTPLLPVKKPGTEDYRPVQDLREVNKRVEDIHPTVPNPYNLLSTLPPSHPWYTVLDLKDAFFCLRLHSESQLLFAFEWRDPEIGLSGQLTWTRLPQGFKNSPTLFNEALHSDLADFRVRYPALVLLQYVDDLLLAAATRTECLEGTKALLETLGNKGYRASAKKAQICLQEVTYLGYSLKDGQRWLTKARKEAILSIPVPKNSRQVREFLGTAGYCRLWIPGFAELAAPLYPLTRPGTLFQWGTEQQLAFEDIKKALLSSPALGLPDITKPFELFIDENSGFAKGVLVQKLGPWKRPVAYLSKKLDTVASGWPPCLRMVAAIAILVKDAGKLTLGQPLTILTSHPVEALVRQPPNKWLSNARMTHYQAMLLDAERVHFGPTVSLNPATLLPLPSGGNHHDCLQILAETHGTRPDLTDQPLPDADLTWYTDGSSFIRNGEREAGAAVTTESEVIWAAPLPPGTSAQRAELIALTQALKMAEGKKLTVYTDSRYAFATTHVHGEIYRRRGWLTSEGKEIKNKNEILALLEALFLPKRLSIIHCPGHQKGDSPQAKGNRLADDTAKKAATETHSSLTVLPAGKRTADGSEFEKRTADGSEFESPKKKAKVE

SEQ ID NO: 6518 - protein, 2085 aa, synthetic construct
MPAAKRVKLDGGDKKYSIGLDIGTNSVGWAVITDEYKVPSKKFKVLGNTDRHSIKKNLIGALLFDSGETAEATRLKRTARRRYTRRKNRICYLQEIFSNEMAKVDDSFFHRLEESFLVEEDKKHERHPIFGNIVDEVAYHEKYPTIYHLRKKLVDSTDKADLRLIYLALAHMIKFRGHFLIEGDLNPDNSDVDKLFIQLVQTYNQLFEENPINASGVDAKAILSARLSKSRRLENLIAQLPGEKKNGLFGNLIALSLGLTPNFKSNFDLAEDAKLQLSKDTYDDDLDNLLAQIGDQYADLFLAAKNLSDAILLSDILRVNTEITKAPLSASMIKRYDEHHQDLTLLKALVRQQLPEKYKEIFFDQSKNGYAGYIDGGASQEEFYKFIKPILEKMDGTEELLVKLNREDLLRKQRTFDNGSIPHQIHLGELHAILRRQEDFYPFLKDNREKIEKILTFRIPYYVGPLARGNSRFAWMTRKSEETITPWNFEEVVDKGASAQSFIERMTNFDKNLPNEKVLPKHSLLYEYFTVYNELTKVKYVTEGMRKPAFLSGEQKKAIVDLLFKTNRKVTVKQLKEDYFKKIECFDSVEISGVEDRFNASLGTYHDLLKIIKDKDFLDNEENEDILEDIVLTLTLFEDREMIEERLKTYAHLFDDKVMKQLKRRRYTGWGRLSRKLINGIRDKQSGKTILDFLKSDGFANRNFMQLIHDDSLTFKEDIQKAQVSGQGDSLHEHIANLAGSPAIKKGILQTVKVVDELVKVMGRHKPENIVIEMARENQTTQKGQKNSRERMKRIEEGIKELGSQILKEHPVENTQLQNEKLYLYYLQNGRDMYVDQELDINRLSDYDVDHIVPQSFLKDDSIDNKVLTRSDKARGKSDNVPSEEVVKKMKNYWRQLLNAKLITQRKFDNLTKAERGGLSELDKAGFIKRQLVETRQITKHVAQILDSRMNTKYDENDKLIREVKVITLKSKLVSDFRKDFQFYKVREINNYHHAHDAYLNAVVGTALIKKYPKLESEFVYGDYKVYDVRKMIAKSEQEIGKATAKYFFYSNIMNFFKTEITLANGEIRKRPLIETNGETGEIVWDKGRDFATVRKVLSMPQVNIVKKTEVQTGGFSKESILPKRNSDKLIARKKDWDPKKYGGFDSPTVAYSVLVVAKVEKGKSKKLKSVKELLGITIMERSSFEKNPIDFLEAKGYKEVKKDLIIKLPKYSLFELENGRKRMLASAGELQKGNELALPSKYVNFLYLASHYEKLKGSPEDNEQKQLFVEQHKHYLDEIIEQISEFSKRVILADANLDKVLSAYNKHRDKPIREQAENIIHLFTLTNLGAPAAFKYFDTTIDRKRYTSTKEVLDATLIHQSITGLYETRIDLSQLGGDGGPAPAPAPAPGGVPWLTQQPLQLTILVPLQEYQEKILSKTALPEDQKQQLKTLFVKYDNLWQHWENQVGHRKIRPHNIATGDYPPRPQKQYPINPKAKPSIQIVIDDLLKQGVLTPQNSTMNTPVYPVPKPDGRWRMVLDYREVNKTIPLTAAQNQHSAGILATIVRQKYKTTLDLANGFWAHPITPESYWLTAFTWQGKQYCWTRLPQGFLNSPALFNADVVDLLKEIPNVQVYVDDIYLSHDDPKEHVQQLEKVFQILLQAGYVVSLKKSEIGQKTVEFLGFNITKEGRGLTDTFKTKLLNITPPKDLKQLQSILGKLNFARNFIPNFAELVQPLYNLIAPAKGKYIEWSEENTKQLNMVIEALNTASNLEERLPEQRLVIKVNTSPSAGYVRYYNETGKKPIMYLNYVFSKAELKFSMLEKLLTTMHKALIKAMDLAMGQEILVYSPIVSMTKIQKTPLPERKALPIRWITWMTYLEDPRIQFHYDKTLPELKHIPDVYTSSQSPVKHPSQYEGVFYTDGSAIKSPDPTKSNNAGMGIVHATYKPEYQVLNQWSIPLGNHTAQMAEIAAVEFACKKALKIPGPVLVITDSFYVAESANKELPYWKSNGFVNNKKKPLKHISKWKSIAECLSMKPDITIQHEKGISLQIPVFILKGNALADKLATQGSYVVNAGKRTADGSEFEKRTADGSEFESPKKKAKVE

SEQ ID NO: 6519 - protein, 2216 aa, synthetic construct
MPAAKRVKLDGGDKKYSIGLDIGTNSVGWAVITDEYKVPSKKFKVLGNTDRHSIKKNLIGALLFDSGETAEATRLKRTARRRYTRRKNRICYLQEIFSNEMAKVDDSFFHRLEESFLVEEDKKHERHPIFGNIVDEVAYHEKYPTIYHLRKKLVDSTDKADLRLIYLALAHMIKFRGHFLIEGDLNPDNSDVDKLFIQLVQTYNQLFEENPINASGVDAKAILSARLSKSRRLENLIAQLPGEKKNGLFGNLIALSLGLTPNFKSNFDLAEDAKLQLSKDTYDDDLDNLLAQIGDQYADLFLAAKNLSDAILLSDILRVNTEITKAPLSASMIKRYDEHHQDLTLLKALVRQQLPEKYKEIFFDQSKNGYAGYIDGGASQEEFYKFIKPILEKMDGTEELLVKLNREDLLRKQRTFDNGSIPHQIHLGELHAILRRQEDFYPFLKDNREKIEKILTFRIPYYVGPLARGNSRFAWMTRKSEETITPWNFEEVVDKGASAQSFIERMTNFDKNLPNEKVLPKHSLLYEYFTVYNELTKVKYVTEGMRKPAFLSGEQKKAIVDLLFKTNRKVTVKQLKEDYFKKIECFDSVEISGVEDRFNASLGTYHDLLKIIKDKDFLDNEENEDILEDIVLTLTLFEDREMIEERLKTYAHLFDDKVMKQLKRRRYTGWGRLSRKLINGIRDKQSGKTILDFLKSDGFANRNFMQLIHDDSLTFKEDIQKAQVSGQGDSLHEHIANLAGSPAIKKGILQTVKVVDELVKVMGRHKPENIVIEMARENQTTQKGQKNSRERMKRIEEGIKELGSQILKEHPVENTQLQNEKLYLYYLQNGRDMYVDQELDINRLSDYDVDHIVPQSFLKDDSIDNKVLTRSDKARGKSDNVPSEEVVKKMKNYWRQLLNAKLITQRKFDNLTKAERGGLSELDKAGFIKRQLVETRQITKHVAQILDSRMNTKYDENDKLIREVKVITLKSKLVSDFRKDFQFYKVREINNYHHAHDAYLNAVVGTALIKKYPKLESEFVYGDYKVYDVRKMIAKSEQEIGKATAKYFFYSNIMNFFKTEITLANGEIRKRPLIETNGETGEIVWDKGRDFATVRKVLSMPQVNIVKKTEVQTGGFSKESILPKRNSDKLIARKKDWDPKKYGGFDSPTVAYSVLVVAKVEKGKSKKLKSVKELLGITIMERSSFEKNPIDFLEAKGYKEVKKDLIIKLPKYSLFELENGRKRMLASAGELQKGNELALPSKYVNFLYLASHYEKLKGSPEDNEQKQLFVEQHKHYLDEIIEQISEFSKRVILADANLDKVLSAYNKHRDKPIREQAENIIHLFTLTNLGAPAAFKYFDTTIDRKRYTSTKEVLDATLIHQSITGLYETRIDLSQLGGDGGPAPAPAPAPGGTLGDQGSRGSDPLPEPRVTLTVEGIPTEFLVNTGAEHSVLTKPMGKMGSKRTVVAGATGSKVYPWTTKRLLKIGQKQVTHSFLVIPECPAPLLGRDLLTKLKAQIQFSTEGPQVTWEDRPAMCLVLNLEEEYRLHEKPVPPSIDPSWLQLFPMVWAEKAGMGLANQVPPVVVELKSDASPVAVRQYPMSKEAREGIRPHIQRFLDLGILVPCQSPWNTPLLPVKKPGTNDYRPVQDLREVNKRVQDIHPTVPNPYNLLSSLPPSHTWYSVLDLKDAFFCLKLHPNSQPLFAFEWRDPEKGNTGQLTWTRLPQGFKNSPTLFDEALHRDLASFRALNPQVVMLQYVDDLLVAAPTYRDCKEGTRRLLQELSKLGYRVSAKKAQLCREEVTYLGYLLKGGKRWLTPARKATVMKIPTPTTPRQVREFLGTAGFCRLWIPGFASLAAPLYPLTREKVPFTWTEAHQEAFGRIKEALLSAPALALPDLTKPFALYVDEKEGVARGVLTQTLGPWRRPVAYLSKKLDPVASGWPTCLKAIAAVALLLKDADKLTLGQNVLVIAPHNLESIVRQPPDRWMTNARMTHYQSLLLNERVSFAPPAILNPATLLPVESDDTPIHICSEILAEETGTRPDLRDQPLPGVPAWYTDGSSFIMDGRRQAGAAIVDNKRTVWASNLPEGTSAQKAELIALTQALRLAEGKSINIYTDSRYAFATAHVHGAIYKQRGLLTSAGKDIKNKEEILALLEAIHLPKRVAIIHCPGHQRGTDPVATGNRKADEAAKQAAQSTRILTETTKNAGKRTADGSEFEKRTADGSEFESPKKKAKVE

SEQ ID NO: 6520 - protein, 2125 aa, synthetic construct
MPAAKRVKLDGGDKKYSIGLDIGTNSVGWAVITDEYKVPSKKFKVLGNTDRHSIKKNLIGALLFDSGETAEATRLKRTARRRYTRRKNRICYLQEIFSNEMAKVDDSFFHRLEESFLVEEDKKHERHPIFGNIVDEVAYHEKYPTIYHLRKKLVDSTDKADLRLIYLALAHMIKFRGHFLIEGDLNPDNSDVDKLFIQLVQTYNQLFEENPINASGVDAKAILSARLSKSRRLENLIAQLPGEKKNGLFGNLIALSLGLTPNFKSNFDLAEDAKLQLSKDTYDDDLDNLLAQIGDQYADLFLAAKNLSDAILLSDILRVNTEITKAPLSASMIKRYDEHHQDLTLLKALVRQQLPEKYKEIFFDQSKNGYAGYIDGGASQEEFYKFIKPILEKMDGTEELLVKLNREDLLRKQRTFDNGSIPHQIHLGELHAILRRQEDFYPFLKDNREKIEKILTFRIPYYVGPLARGNSRFAWMTRKSEETITPWNFEEVVDKGASAQSFIERMTNFDKNLPNEKVLPKHSLLYEYFTVYNELTKVKYVTEGMRKPAFLSGEQKKAIVDLLFKTNRKVTVKQLKEDYFKKIECFDSVEISGVEDRFNASLGTYHDLLKIIKDKDFLDNEENEDILEDIVLTLTLFEDREMIEERLKTYAHLFDDKVMKQLKRRRYTGWGRLSRKLINGIRDKQSGKTILDFLKSDGFANRNFMQLIHDDSLTFKEDIQKAQVSGQGDSLHEHIANLAGSPAIKKGILQTVKVVDELVKVMGRHKPENIVIEMARENQTTQKGQKNSRERMKRIEEGIKELGSQILKEHPVENTQLQNEKLYLYYLQNGRDMYVDQELDINRLSDYDVDHIVPQSFLKDDSIDNKVLTRSDKARGKSDNVPSEEVVKKMKNYWRQLLNAKLITQRKFDNLTKAERGGLSELDKAGFIKRQLVETRQITKHVAQILDSRMNTKYDENDKLIREVKVITLKSKLVSDFRKDFQFYKVREINNYHHAHDAYLNAVVGTALIKKYPKLESEFVYGDYKVYDVRKMIAKSEQEIGKATAKYFFYSNIMNFFKTEITLANGEIRKRPLIETNGETGEIVWDKGRDFATVRKVLSMPQVNIVKKTEVQTGGFSKESILPKRNSDKLIARKKDWDPKKYGGFDSPTVAYSVLVVAKVEKGKSKKLKSVKELLGITIMERSSFEKNPIDFLEAKGYKEVKKDLIIKLPKYSLFELENGRKRMLASAGELQKGNELALPSKYVNFLYLASHYEKLKGSPEDNEQKQLFVEQHKHYLDEIIEQISEFSKRVILADANLDKVLSAYNKHRDKPIREQAENIIHLFTLTNLGAPAAFKYFDTTIDRKRYTSTKEVLDATLIHQSITGLYETRIDLSQLGGDGGPAPAPAPAPGGLLGRDLLTKLKAQIQFSTEGPQVTWEDRPAMCLVLNLEEEYRLHEKPVPPSIDPSWLQLFPMVWAEKAGMGLANQVPPVVVELKSDASPVAVRQYPMSKEAREGIRPHIQRFLDLGILVPCQSPWNTPLLPVKKPGTNDYRPVQDLREVNKRVQDIHPTVPNPYNLLSSLPPSHTWYSVLDLKDAFFCLKLHPNSQPLFAFEWRDPEKGNTGQLTWTRLPQGFKNSPTLFNEALHRDLASFRALNPQVVMLQYVDDLLVAAPTYRDCKEGTRRLLQELSKLGYRVSAKKAQLCREEVTYLGYLLKGGKRWLTPARKATVMKIPTPTTPRQVREFLGTAGFCRLWIPGFASLAAPLYPLTRPKVPFTWTEAHQEAFGRIKEALLSAPALALPDLTKPFALYVDEKEGVARGVLTQTLGPWRRPVAYLSKKLDPVASGWPTCLKAIAAVALLLKDADKLTLGQNVLVIAPHNLESIVRQPPDRWMTNARMTHYQSLLLNERVSFAPPAILNPATLLPVESDDTPIHICSEILAEETGTRPDLRDQPLPGVPAWYTDGSSFIMDGRRQAGAAIVDNKRTVWASNLPEGTSAQKAELIALTQALRLAEGKSINIYTDSRYAFATAHVHGAIYKQRGWLTSAGKDIKNKEEILALLEAIHLPKRVAIIHCPGHQRGTDPVATGNRKADEAAKQAAQSTRILTETTKNAGKRTADGSEFEKRTADGSEFESPKKKAKVE

SEQ ID NO: 6521 - protein, 2216 aa, synthetic construct
MPAAKRVKLDGGDKKYSIGLDIGTNSVGWAVITDEYKVPSKKFKVLGNTDRHSIKKNLIGALLFDSGETAEATRLKRTARRRYTRRKNRICYLQEIFSNEMAKVDDSFFHRLEESFLVEEDKKHERHPIFGNIVDEVAYHEKYPTIYHLRKKLVDSTDKADLRLIYLALAHMIKFRGHFLIEGDLNPDNSDVDKLFIQLVQTYNQLFEENPINASGVDAKAILSARLSKSRRLENLIAQLPGEKKNGLFGNLIALSLGLTPNFKSNFDLAEDAKLQLSKDTYDDDLDNLLAQIGDQYADLFLAAKNLSDAILLSDILRVNTEITKAPLSASMIKRYDEHHQDLTLLKALVRQQLPEKYKEIFFDQSKNGYAGYIDGGASQEEFYKFIKPILEKMDGTEELLVKLNREDLLRKQRTFDNGSIPHQIHLGELHAILRRQEDFYPFLKDNREKIEKILTFRIPYYVGPLARGNSRFAWMTRKSEETITPWNFEEVVDKGASAQSFIERMTNFDKNLPNEKVLPKHSLLYEYFTVYNELTKVKYVTEGMRKPAFLSGEQKKAIVDLLFKTNRKVTVKQLKEDYFKKIECFDSVEISGVEDRFNASLGTYHDLLKIIKDKDFLDNEENEDILEDIVLTLTLFEDREMIEERLKTYAHLFDDKVMKQLKRRRYTGWGRLSRKLINGIRDKQSGKTILDFLKSDGFANRNFMQLIHDDSLTFKEDIQKAQVSGQGDSLHEHIANLAGSPAIKKGILQTVKVVDELVKVMGRHKPENIVIEMARENQTTQKGQKNSRERMKRIEEGIKELGSQILKEHPVENTQLQNEKLYLYYLQNGRDMYVDQELDINRLSDYDVDHIVPQSFLKDDSIDNKVLTRSDKARGKSDNVPSEEVVKKMKNYWRQLLNAKLITQRKFDNLTKAERGGLSELDKAGFIKRQLVETRQITKHVAQILDSRMNTKYDENDKLIREVKVITLKSKLVSDFRKDFQFYKVREINNYHHAHDAYLNAVVGTALIKKYPKLESEFVYGDYKVYDVRKMIAKSEQEIGKATAKYFFYSNIMNFFKTEITLANGEIRKRPLIETNGETGEIVWDKGRDFATVRKVLSMPQVNIVKKTEVQTGGFSKESILPKRNSDKLIARKKDWDPKKYGGFDSPTVAYSVLVVAKVEKGKSKKLKSVKELLGITIMERSSFEKNPIDFLEAKGYKEVKKDLIIKLPKYSLFELENGRKRMLASAGELQKGNELALPSKYVNFLYLASHYEKLKGSPEDNEQKQLFVEQHKHYLDEIIEQISEFSKRVILADANLDKVLSAYNKHRDKPIREQAENIIHLFTLTNLGAPAAFKYFDTTIDRKRYTSTKEVLDATLIHQSITGLYETRIDLSQLGGDGGPAPAPAPAPGGTLGDQGSRGSDPLPEPRVTLTVEGIPTEFLVNTGAEHSVLTKPMGKMGSKRTVVAGATGSKVYPWTTKRLLKIGQKQVTHSFLVIPECPAPLLGRDLLTKLKAQIQFSTEGPQVTWEDRPAMCLVLNLEEEYRLHEKPVPPSIDPSWLQLFPMVWAEKAGMGLANQVPPVVVELKSDASPVAVRQYPMSKEAREGIRPHIQRFLDLGILVPCQSPWNTPLLPVKKPGTNDYRPVQDLREVNKRVQDIHPTVPNPYNLLSSLPPSHTWYSVLDLKDAFFCLKLHPNSQPLFAFEWRDPEKGNTGQLTWTRLPQGFKNSPTLFNEALHRDLASFRALNPQVVMLQYVDDLLVAAPTYRDCKEGTRRLLQELSKLGYRVSAKKAQLCREEVTYLGYLLKGGKRWLTPARKATVMKIPTPTTPRQVREFLGTAGFCRLWIPGFASLAAPLYPLTRPKVPFTWTEAHQEAFGRIKEALLSAPALALPDLTKPFALYVDEKEGVARGVLTQTLGPWRRPVAYLSKKLDPVASGWPTCLKAIAAVALLLKDADKLTLGQNVLVIAPHNLESIVRQPPDRWMTNARMTHYQSLLLNERVSFAPPAILNPATLLPVESDDTPIHICSEILAEETGTRPDLRDQPLPGVPAWYTDGSSFIMDGRRQAGAAIVDNKRTVWASNLPEGTSAQKAELIALTQALRLAEGKSINIYTDSRYAFATAHVHGAIYKQRGWLTSAGKDIKNKEEILALLEAIHLPKRVAIIHCPGHQRGTDPVATGNRKADEAAKQAAQSTRILTETTKNAGKRTADGSEFEKRTADGSEFESPKKKAKVE

SEQ ID NO: 6522 - protein, 2094 aa, synthetic construct
MPAAKRVKLDGGDKKYSIGLDIGTNSVGWAVITDEYKVPSKKFKVLGNTDRHSIKKNLIGALLFDSGETAEATRLKRTARRRYTRRKNRICYLQEIFSNEMAKVDDSFFHRLEESFLVEEDKKHERHPIFGNIVDEVAYHEKYPTIYHLRKKLVDSTDKADLRLIYLALAHMIKFRGHFLIEGDLNPDNSDVDKLFIQLVQTYNQLFEENPINASGVDAKAILSARLSKSRRLENLIAQLPGEKKNGLFGNLIALSLGLTPNFKSNFDLAEDAKLQLSKDTYDDDLDNLLAQIGDQYADLFLAAKNLSDAILLSDILRVNTEITKAPLSASMIKRYDEHHQDLTLLKALVRQQLPEKYKEIFFDQSKNGYAGYIDGGASQEEFYKFIKPILEKMDGTEELLVKLNREDLLRKQRTFDNGSIPHQIHLGELHAILRRQEDFYPFLKDNREKIEKILTFRIPYYVGPLARGNSRFAWMTRKSEETITPWNFEEVVDKGASAQSFIERMTNFDKNLPNEKVLPKHSLLYEYFTVYNELTKVKYVTEGMRKPAFLSGEQKKAIVDLLFKTNRKVTVKQLKEDYFKKIECFDSVEISGVEDRFNASLGTYHDLLKIIKDKDFLDNEENEDILEDIVLTLTLFEDREMIEERLKTYAHLFDDKVMKQLKRRRYTGWGRLSRKLINGIRDKQSGKTILDFLKSDGFANRNFMQLIHDDSLTFKEDIQKAQVSGQGDSLHEHIANLAGSPAIKKGILQTVKVVDELVKVMGRHKPENIVIEMARENQTTQKGQKNSRERMKRIEEGIKELGSQILKEHPVENTQLQNEKLYLYYLQNGRDMYVDQELDINRLSDYDVDHIVPQSFLKDDSIDNKVLTRSDKARGKSDNVPSEEVVKKMKNYWRQLLNAKLITQRKFDNLTKAERGGLSELDKAGFIKRQLVETRQITKHVAQILDSRMNTKYDENDKLIREVKVITLKSKLVSDFRKDFQFYKVREINNYHHAHDAYLNAVVGTALIKKYPKLESEFVYGDYKVYDVRKMIAKSEQEIGKATAKYFFYSNIMNFFKTEITLANGEIRKRPLIETNGETGEIVWDKGRDFATVRKVLSMPQVNIVKKTEVQTGGFSKESILPKRNSDKLIARKKDWDPKKYGGFDSPTVAYSVLVVAKVEKGKSKKLKSVKELLGITIMERSSFEKNPIDFLEAKGYKEVKKDLIIKLPKYSLFELENGRKRMLASAGELQKGNELALPSKYVNFLYLASHYEKLKGSPEDNEQKQLFVEQHKHYLDEIIEQISEFSKRVILADANLDKVLSAYNKHRDKPIREQAENIIHLFTLTNLGAPAAFKYFDTTIDRKRYTSTKEVLDATLIHQSITGLYETRIDLSQLGGDGGPAPAPAPAPGGLGIEDEYRLHETSTEPDVSLGSTWLSDFPQAWAETGGMGLAVRQAPLIIPLKATSTPVSIQQYPMSHEARLGIKPHIQRLLDQGILVPCQSPWNTPLLPVKKPGTNDYRPVQDLREVNKRVEDIHPTVPNPYNLLSGLPPSHQWYTVLDLKDAFFCLRLHPTSQPLFAFEWRDPGMGISGQLTWTRLPQGFKNSPTLFNEALHRDLADFRIQHPDLILLQYVDDILLAATSELDCQQGTRALLQTLGDLGYRASAKKAQICQKQVKYLGYLLREGQRWLTEARKETVMGQPVPKTPRQLREFLGKAGFCRLFIPGFAEMAAPLYPLTKPGTLFSWGPDQQKAYQEIKQALLTAPALGLPDLTKPFELFVDEKQGYAKGVLTQKLGPWRRPVAYLSKKLDPVAAGWPPCLRMVAAIAVLTKDAGKLTMGQPLVILAPHAVEALVKQPPDRWLSNARMTHYQAMLLDTDRVQFGPVVALNPATLLPLPEEGAPHDCLEILAETHGTRPDLTDQPIPDADHTWYTDGSSFLQEGQRKAGAAVTTETEVIWAGALPAGTSAQRAELIALTQALKMAEGKRLNVYTDSRYAFATAHIHGEIYRRRGWLTSEGREIKNKSEILALLKALFLPKRLSIIHCLGHQKGDSAEARGNRLADQAAREAAIKTPPDTSTLLIAGKRTADGSEFEKRTADGSEFESPKKKAKVE

SEQ ID NO: 6523 - protein, 2094 aa, synthetic construct; identical to SEQ ID NO: 6522

SEQ ID NO: 6524 - protein, 2094 aa, synthetic construct
MPAAKRVKLDGGDKKYSIGLDIGTNSVGWAVITDEYKVPSKKFKVLGNTDRHSIKKNLIGALLFDSGETAEATRLKRTARRRYTRRKNRICYLQEIFSNEMAKVDDSFFHRLEESFLVEEDKKHERHPIFGNIVDEVAYHEKYPTIYHLRKKLVDSTDKADLRLIYLALAHMIKFRGHFLIEGDLNPDNSDVDKLFIQLVQTYNQLFEENPINASGVDAKAILSARLSKSRRLENLIAQLPGEKKNGLFGNLIALSLGLTPNFKSNFDLAEDAKLQLSKDTYDDDLDNLLAQIGDQYADLFLAAKNLSDAILLSDILRVNTEITKAPLSASMIKRYDEHHQDLTLLKALVRQQLPEKYKEIFFDQSKNGYAGYIDGGASQEEFYKFIKPILEKMDGTEELLVKLNREDLLRKQRTFDNGSIPHQIHLGELHAILRRQEDFYPFLKDNREKIEKILTFRIPYYVGPLARGNSRFAWMTRKSEETITPWNFEEVVDKGASAQSFIERMTNFDKNLPNEKVLPKHSLLYEYFTVYNELTKVKYVTEGMRKPAFLSGEQKKAIVDLLFKTNRKVTVKQLKEDYFKKIECFDSVEISGVEDRFNASLGTYHDLLKIIKDKDFLDNEENEDILEDIVLTLTLFEDREMIEERLKTYAHLFDDKVMKQLKRRRYTGWGRLSRKLINGIRDKQSGKTILDFLKSDGFANRNFMQLIHDDSLTFKEDIQKAQVSGQGDSLHEHIANLAGSPAIKKGILQTVKVVDELVKVMGRHKPENIVIEMARENQTTQKGQKNSRERMKRIEEGIKELGSQILKEHPVENTQLQNEKLYLYYLQNGRDMYVDQELDINRLSDYDVDHIVPQSFLKDDSIDNKVLTRSDKARGKSDNVPSEEVVKKMKNYWRQLLNAKLITQRKFDNLTKAERGGLSELDKAGFIKRQLVETRQITKHVAQILDSRMNTKYDENDKLIREVKVITLKSKLVSDFRKDFQFYKVREINNYHHAHDAYLNAVVGTALIKKYPKLESEFVYGDYKVYDVRKMIAKSEQEIGKATAKYFFYSNIMNFFKTEITLANGEIRKRPLIETNGETGEIVWDKGRDFATVRKVLSMPQVNIVKKTEVQTGGFSKESILPKRNSDKLIARKKDWDPKKYGGFDSPTVAYSVLVVAKVEKGKSKKLKSVKELLGITIMERSSFEKNPIDFLEAKGYKEVKKDLIIKLPKYSLFELENGRKRMLASAGELQKGNELALPSKYVNFLYLASHYEKLKGSPEDNEQKQLFVEQHKHYLDEIIEQISEFSKRVILADANLDKVLSAYNKHRDKPIREQAENIIHLFTLTNLGAPAAFKYFDTTIDRKRYTSTKEVLDATLIHQSITGLYETRIDLSQLGGDGGPAPAPAPAPGGTLNIEDEHRLHETSKEPDVSLGSTWLSDFPQAWAETGGMGLAVRQAPLIIPLKATSTPVSIKQYPMSQEARLGIKPHIQRLLDQGILVPCQSPWNTPLLPVKKPGTNDYRPVQDLREVNKRVEDIHPTVPNPYNLLSGLPPSHQWYTVLDLKDAFFCLRLHPTSQPLFAFEWRDPEMGISGQLTWTRLPQGFKNSPTLFDEALHRDLADFRIQHPDLILLQYVDDLLLAATSELDCQQGTRALLQTLGNLGYRASAKKAQICQKQVKYLGYLLKEGQRWLTEARKETVMGQPTPKTPRQLREFLGTAGFCRLWIPGFAEMAAPLYPLTKTGTLFNWGPDQQKAYQEIKQALLTAPALGLPDLTKPFELFVDEKQGYAKGVLTQKLGPWRRPVAYLSKKLDPVAAGWPPCLRMVAAIAVLTKDAGKLTMGQPLVILAPHAVEALVKQPPDRWLSNARMTHYQALLLDTDRVQFGPVVALNPATLLPLPEEGLQHNCLDILAEAHGTRPDLTDQPLPDADHTWYTDGSSLLQEGQRKAGAAVTTETEVIWAKALPAGTSAQRAELIALTQALKMAEGKKLNVYTDSRYAFATAHIHGEIYRRRGLLTSEGKEIKNKDEILALLKALFLPKRLSIIHCPGHQKGHSAEARGNRMADQAARKAAITETPDTSTLLAGKRTADGSEFEKRTADGSEFESPKKKAKVE

SEQ ID NO: 6525 - protein, 2086 aa, synthetic construct
MPAAKRVKLDGGDKKYSIGLDIGTNSVGWAVITDEYKVPSKKFKVLGNTDRHSIKKNLIGALLFDSGETAEATRLKRTARRRYTRRKNRICYLQEIFSNEMAKVDDSFFHRLEESFLVEEDKKHERHPIFGNIVDEVAYHEKYPTIYHLRKKLVDSTDKADLRLIYLALAHMIKFRGHFLIEGDLNPDNSDVDKLFIQLVQTYNQLFEENPINASGVDAKAILSARLSKSRRLENLIAQLPGEKKNGLFGNLIALSLGLTPNFKSNFDLAEDAKLQLSKDTYDDDLDNLLAQIGDQYADLFLAAKNLSDAILLSDILRVNTEITKAPLSASMIKRYDEHHQDLTLLKALVRQQLPEKYKEIFFDQSKNGYAGYIDGGASQEEFYKFIKPILEKMDGTEELLVKLNREDLLRKQRTFDNGSIPHQIHLGELHAILRRQEDFYPFLKDNREKIEKILTFRIPYYVGPLARGNSRFAWMTRKSEETITPWNFEEVVDKGASAQSFIERMTNFDKNLPNEKVLPKHSLLYEYFTVYNELTKVKYVTEGMRKPAFLSGEQKKAIVDLLFKTNRKVTVKQLKEDYFKKIECFDSVEISGVEDRFNASLGTYHDLLKIIKDKDFLDNEENEDILEDIVLTLTLFEDREMIEERLKTYAHLFDDKVMKQLKRRRYTGWGRLSRKLINGIRDKQSGKTILDFLKSDGFANRNFMQLIHDDSLTFKEDIQKAQVSGQGDSLHEHIANLAGSPAIKKGILQTVKVVDELVKVMGRHKPENIVIEMARENQTTQKGQKNSRERMKRIEEGIKELGSQILKEHPVENTQLQNEKLYLYYLQNGRDMYVDQELDINRLSDYDVDHIVPQSFLKDDSIDNKVLTRSDKARGKSDNVPSEEVVKKMKNYWRQLLNAKLITQRKFDNLTKAERGGLSELDKAGFIKRQLVETRQITKHVAQILDSRMNTKYDENDKLIREVKVITLKSKLVSDFRKDFQFYKVREINNYHHAHDAYLNAVVGTALIKKYPKLESEFVYGDYKVYDVRKMIAKSEQEIGKATAKYFFYSNIMNFFKTEITLANGEIRKRPLIETNGETGEIVWDKGRDFATVRKVLSMPQVNIVKKTEVQTGGFSKESILPKRNSDKLIARKKDWDPKKYGGFDSPTVAYSVLVVAKVEKGKSKKLKSVKELLGITIMERSSFEKNPIDFLEAKGYKEVKKDLIIKLPKYSLFELENGRKRMLASAGELQKGNELALPSKYVNFLYLASHYEKLKGSPEDNEQKQLFVEQHKHYLDEIIEQISEFSKRVILADANLDKVLSAYNKHRDKPIREQAENIIHLFTLTNLGAPAAFKYFDTTIDRKRYTSTKEVLDATLIHQSITGLYETRIDLSQLGGDGGPAPAPAPAPGGLDDEYRLYSPLVKPDQNIQFWLEQFPQAWAETAGMGLAKQVPPQVIQLKASATPVSVRQYPLSKEAQEGIRPHVQRLIQQGILVPVQSPWNTPLLPVRKPGTNDYRPVQDLREVNKRVQDIHPTVPNPYNLLCALPPQRSWYTVLDLKDAFFCLRLHPTSQPLFAFEWRDPGTGRTGQLTWTRLPQGFKNSPTIFNEALHRDLANFRIQHPQVTLLQYVDDLLLAGATKQDCLEGTKALLLELSDLGYRASAKKAQICRREVTYLGYSLRDGQRWLTEARKKTVVQIPAPTTAKQVREFLGKAGFCRLFIPGFATLAAPLYPLTKPKGEFSWAPEHQKAFDAIKKALLSAPALALPDVTKPFTLYVDERKGVARGVLTQTLGPWRRPVAYLSKKLDPVASGWPVCLKAIAAVAILVKDADKLTLGQNITVIAPHALENIVRQPPDRWMTNARMTHYQSLLLTERVTFAPPAALNPATLLPEETDEPVTHDCHQLLIEETGVRKDLTDIPLTGEVLTWFTDGSSYVVEGKRMAGAAVVDGTRTIWASSLPEGTSAQKAELMALTQALRLAEGKSINIYTDSRYAFATAHVHGAIYKQRGWLTSAGREIKNKEEILSLLEALHLPKRLAIIHCPGHQKAKDPISRGNQMADRVAKQAAQGVNLLPAGKRTADGSEFEKRTADGSEFESPKKKAKVE

SEQ ID NO: 6526 - protein, 2088 aa, synthetic construct
MPAAKRVKLDGGDKKYSIGLDIGTNSVGWAVITDEYKVPSKKFKVLGNTDRHSIKKNLIGALLFDSGETAEATRLKRTARRRYTRRKNRICYLQEIFSNEMAKVDDSFFHRLEESFLVEEDKKHERHPIFGNIVDEVAYHEKYPTIYHLRKKLVDSTDKADLRLIYLALAHMIKFRGHFLIEGDLNPDNSDVDKLFIQLVQTYNQLFEENPINASGVDAKAILSARLSKSRRLENLIAQLPGEKKNGLFGNLIALSLGLTPNFKSNFDLAEDAKLQLSKDTYDDDLDNLLAQIGDQYADLFLAAKNLSDAILLSDILRVNTEITKAPLSASMIKRYDEHHQDLTLLKALVRQQLPEKYKEIFFDQSKNGYAGYIDGGASQEEFYKFIKPILEKMDGTEELLVKLNREDLLRKQRTFDNGSIPHQIHLGELHAILRRQEDFYPFLKDNREKIEKILTFRIPYYVGPLARGNSRFAWMTRKSEETITPWNFEEVVDKGASAQSFIERMTNFDKNLPNEKVLPKHSLLYEYFTVYNELTKVKYVTEGMRKPAFLSGEQKKAIVDLLFKTNRKVTVKQLKEDYFKKIECFDSVEISGVEDRFNASLGTYHDLLKIIKDKDFLDNEENEDILEDIVLTLTLFEDREMIEERLKTYAHLFDDKVMKQLKRRRYTGWGRLSRKLINGIRDKQSGKTILDFLKSDGFANRNFMQLIHDDSLTFKEDIQKAQVSGQGDSLHEHIANLAGSPAIKKGILQTVKVVDELVKVMGRHKPENIVIEMARENQTTQKGQKNSRERMKRIEEGIKELGSQILKEHPVENTQLQNEKLYLYYLQNGRDMYVDQELDINRLSDYDVDHIVPQSFLKDDSIDNKVLTRSDKARGKSDNVPSEEVVKKMKNYWRQLLNAKLITQRKFDNLTKAERGGLSELDKAGFIKRQLVETRQITKHVAQILDSRMNTKYDENDKLIREVKVITLKSKLVSDFRKDFQFYKVREINNYHHAHDAYLNAVVGTALIKKYPKLESEFVYGDYKVYDVRKMIAKSEQEIGKATAKYFFYSNIMNFFKTEITLANGEIRKRPLIETNGETGEIVWDKGRDFATVRKVLSMPQVNIVKKTEVQTGGFSKESILPKRNSDKLIARKKDWDPKKYGGFDSPTVAYSVLVVAKVEKGKSKKLKSVKELLGITIMERSSFEKNPIDFLEAKGYKEVKKDLIIKLPKYSLFELENGRKRMLASAGELQKGNELALPSKYVNFLYLASHYEKLKGSPEDNEQKQLFVEQHKHYLDEIIEQISEFSKRVILADANLDKVLSAYNKHRDKPIREQAENIIHLFTLTNLGAPAAFKYFDTTIDRKRYTSTKEVLDATLIHQSITGLYETRIDLSQLGGDGGPAPAPAPAPGGTLQLDDEYRLYSPLVKPDQNIQFWLEQFPQAWAETAGMGLAKQVPPQVIQLKASATPVSVRQYPLSKEAQEGIRPHVQRLIQQGILVPVQSPWNTPLLPVRKPGTNDYRPVQDLREVNKRVQDIHPTVPNPYNLLCALPPQRSWYTVLDLKDAFFCLRLHPTSQPLFAFEWRDPGTGRTGQLTWTRLPQGFKNSPTIFDEALHRDLANFRIQHPQVTLLQYVDDLLLAGATKQDCLEGTKALLLELSDLGYRASAKKAQICRREVTYLGYSLRDGQRWLTEARKKTVVQIPAPTTAKQVREFLGTAGFCRLWIPGFATLAAPLYPLTKEKGEFSWAPEHQKAFDAIKKALLSAPALALPDVTKPFTLYVDERKGVARGVLTQTLGPWRRPVAYLSKKLDPVASGWPVCLKAIAAVAILVKDADKLTLGQNITVIAPHALENIVRQPPDRWMTNARMTHYQSLLLTERVTFAPPAALNPATLLPEETDEPVTHDCHQLLIEETGVRKDLTDIPLTGEVLTWFTDGSSYVVEGKRMAGAAVVDGTRTIWASSLPEGTSAQKAELMALTQALRLAEGKSINIYTDSRYAFATAHVHGAIYKQRGLLTSAGREIKNKEEILSLLEALHLPKRLAIIHCPGHQKAKDPISRGNQMADRVAKQAAQGVNLLAGKRTADGSEFEKRTADGSEFESPKKKAKVE

SEQ ID NO: 6527 - protein, 2086 aa, synthetic construct; identical to SEQ ID NO: 6525

SEQ ID NO: 6528 - protein, 2088 aa, synthetic construct; identical to SEQ ID NO: 6526

SEQ ID NO: 6529 - protein, 2085 aa, synthetic construct
MPAAKRVKLDGGDKKYSIGLDIGTNSVGWAVITDEYKVPSKKFKVLGNTDRHSIKKNLIGALLFDSGETAEATRLKRTARRRYTRRKNRICYLQEIFSNEMAKVDDSFFHRLEESFLVEEDKKHERHPIFGNIVDEVAYHEKYPTIYHLRKKLVDSTDKADLRLIYLALAHMIKFRGHFLIEGDLNPDNSDVDKLFIQLVQTYNQLFEENPINASGVDAKAILSARLSKSRRLENLIAQLPGEKKNGLFGNLIALSLGLTPNFKSNFDLAEDAKLQLSKDTYDDDLDNLLAQIGDQYADLFLAAKNLSDAILLSDILRVNTEITKAPLSASMIKRYDEHHQDLTLLKALVRQQLPEKYKEIFFDQSKNGYAGYIDGGASQEEFYKFIKPILEKMDGTEELLVKLNREDLLRKQRTFDNGSIPHQIHLGELHAILRRQEDFYPFLKDNREKIEKILTFRIPYYVGPLARGNSRFAWMTRKSEETITPWNFEEVVDKGASAQSFIERMTNFDKNLPNEKVLPKHSLLYEYFTVYNELTKVKYVTEGMRKPAFLSGEQKKAIVDLLFKTNRKVTVKQLKEDYFKKIECFDSVEISGVEDRFNASLGTYHDLLKIIKDKDFLDNEENEDILEDIVLTLTLFEDREMIEERLKTYAHLFDDKVMKQLKRRRYTGWGRLSRKLINGIRDKQSGKTILDFLKSDGFANRNFMQLIHDDSLTFKEDIQKAQVSGQGDSLHEHIANLAGSPAIKKGILQTVKVVDELVKVMGRHKPENIVIEMARENQTTQKGQKNSRERMKRIEEGIKELGSQILKEHPVENTQLQNEKLYLYYLQNGRDMYVDQELDINRLSDYDVDHIVPQSFLKDDSIDNKVLTRSDKARGKSDNVPSEEVVKKMKNYWRQLLNAKLITQRKFDNLTKAERGGLSELDKAGFIKRQLVETRQITKHVAQILDSRMNTKYDENDKLIREVKVITLKSKLVSDFRKDFQFYKVREINNYHHAHDAYLNAVVGTALIKKYPKLESEFVYGDYKVYDVRKMIAKSEQEIGKATAKYFFYSNIMNFFKTEITLANGEIRKRPLIETNGETGEIVWDKGRDFATVRKVLSMPQVNIVKKTEVQTGGFSKESILPKRNSDKLIARKKDWDPKKYGGFDSPTVAYSVLVVAKVEKGKSKKLKSVKELLGITIMERSSFEKNPIDFLEAKGYKEVKKDLIIKLPKYSLFELENGRKRMLASAGELQKGNELALPSKYVNFLYLASHYEKLKGSPEDNEQKQLFVEQHKHYLDEIIEQISEFSKRVILADANLDKVLSAYNKHRDKPIREQAENIIHLFTLTNLGAPAAFKYFDTTIDRKRYTSTKEVLDATLIHQSITGLYETRIDLSQLGGDGGPAPAPAPAPGGIPWLMKKPLQLTTLVPLQEYEERLLKQTMLTGSYKEKLQSLFLKYDALWQHWENQVGHRRIKPHHIATGTVNPRPQKQYPINPKAKASIQTVINDLLKQGVLIQQNSIMNTPVYPVPKPDGKWRMVLDYREVNKTIPLIAAQNQHSAGILSSIFRGKYKTTLDLSNGFWAHSITPESYWLTAFTWLGQQYCWTRLPQGFLNSPALFNADVVDLLKEVPNVQVYVDDIYISHDDPREHLEQLEKVFSLLLNAGYVVSLKKSEIAQHEVEFLGFNITKEGRGLTETFKQKLLNITPPRDLKQLQSILGKLNFARNFIPNFSELVKPLYNIIATAPGKYITWTTDNSQQLQNIISMLNSAENLEERNPEVRLIMKVNTSPSAGYIRFYNEFAKRPIMYLNYVYTKAEVKFTNTEKLLTTIHKGLIKALDLGMGQEILVYSPIVSMTKIQKTPLPERKALPIRWITWMSYLEDPRIQFHYDKTLPELQQVPTVTDDIIAKIKHPSEFSMVFYTDGSAIKHPNVNKSHNAGMGIAQVQFKPEFTVINTWSIPLGDHTAQLAEVAAVEFACKKALKIDGPVLIVTDSFYVAESVNKELPYWQSNGFFNNKKKPLKHVSKWKSIADCIQLKPDIIIIHEKGHQPTASTFHTEGNNLADKLATQGSYVVNAGKRTADGSEFEKRTADGSEFESPKKKAKVE

SEQ ID NO: 6530 - protein, 2098 aa, synthetic construct
MPAAKRVKLDGGDKKYSIGLDIGTNSVGWAVITDEYKVPSKKFKVLGNTDRHSIKKNLIGALLFDSGETAEATRLKRTARRRYTRRKNRICYLQEIFSNEMAKVDDSFFHRLEESFLVEEDKKHERHPIFGNIVDEVAYHEKYPTIYHLRKKLVDSTDKADLRLIYLALAHMIKFRGHFLIEGDLNPDNSDVDKLFIQLVQTYNQLFEENPINASGVDAKAILSARLSKSRRLENLIAQLPGEKKNGLFGNLIALSLGLTPNFKSNFDLAEDAKLQLSKDTYDDDLDNLLAQIGDQYADLFLAAKNLSDAILLSDILRVNTEITKAPLSASMIKRYDEHHQDLTLLKALVRQQLPEKYKEIFFDQSKNGYAGYIDGGASQEEFYKFIKPILEKMDGTEELLVKLNREDLLRKQRTFDNGSIPHQIHLGELHAILRRQEDFYPFLKDNREKIEKILTFRIPYYVGPLARGNSRFAWMTRKSEETITPWNFEEVVDKGASAQSFIERMTNFDKNLPNEKVLPKHSLLYEYFTVYNELTKVKYVTEGMRKPAFLSGEQKKAIVDLLFKTNRKVTVKQLKEDYFKKIECFDSVEISGVEDRFNASLGTYHDLLKIIKDKDFLDNEENEDILEDIVLTLTLFEDREMIEERLKTYAHLFDDKVMKQLKRRRYTGWGRLSRKLINGIRDKQSGKTILDFLKSDGFANRNFMQLIHDDSLTFKEDIQKAQVSGQGDSLHEHIANLAGSPAIKKGILQTVKVVDELVKVMGRHKPENIVIEMARENQTTQKGQKNSRERMKRIEEGIKELGSQILKEHPVENTQLQNEKLYLYYLQNGRDMYVDQELDINRLSDYDVDHIVPQSFLKDDSIDNKVLTRSDKARGKSDNVPSEEVVKKMKNYWRQLLNAKLITQRKFDNLTKAERGGLSELDKAGFIKRQLVETRQITKHVAQILDSRMNTKYDENDKLIREVKVITLKSKLVSDFRKDFQFYKVREINNYHHAHDAYLNAVVGTALIKKYPKLESEFVYGDYKVYDVRKMIAKSEQEIGKATAKYFFYSNIMNFFKTEITLANGEIRKRPLIETNGETGEIVWDKGRDFATVRKVLSMPQVNIVKKTEVQTGGFSKESILPKRNSDKLIARKKDWDPKKYGGFDSPTVAYSVLVVAKVEKGKSKKLKSVKELLGITIMERSSFEKNPIDFLEAKGYKEVKKDLIIKLPKYSLFELENGRKRMLASAGELQKGNELALPSKYVNFLYLASHYEKLKGSPEDNEQKQLFVEQHKHYLDEIIEQISEFSKRVILADANLDKVLSAYNKHRDKPIREQAENIIHLFTLTNLGAPAAFKYFDTTIDRKRYTSTKEVLDATLIHQSITGLYETRIDLSQLGGDGGPAPAPAPAPAPGGTAPLEEEYRLFLEAPIQNVTLLEQWKREIPKVWAEINPPGLASTQAPIHVQLLSTALPVRVRQYPITLEAKRSLRETIRKFRAAGILRPVHSPWNTPLLPVRKSGTSEYRMVQDLREVNKRVETIHPTVPNPYTLLSLLPPDRIWYSVLDLKDAFFCIPLAPESQLIFAFEWADAEEGESGQLTWTRLPQGFKNSPTLFNEALNRDLQGFRLDHPSVSLLQYVDDLLIAADTQAACLSATRDLLMTLAELGYRVSGKKAQLCQEEVTYLGFKIHKGSRSLSNSRTQAILQIPVPKTKRQVREFLGTIGYCRLWIPGFAELAQPLYAATRPGNDPLVWGEKEEEAFQSLKLALTQPPALALPSLDKPFQLFVEETSGAAKGVLTQALGPWKRPVAYLSKRLDPVAAGWPRCLRAIAAAALLTREASKLTFGQDIEITSSHNLESLLRSPPDKWLTNARITQYQVLLLDPPRVRFKQTAALNPATLLPETDDTLPIHHCLDTLDSLTSTRPDLTDQPLAQAEATLFTDGSSYIRDGKRYAGAAVVTLDSVIWAEPLPIGTSAQKAELIALTKALEWSKDKSVNIYTDSRYAFATLHVHGMIYRERGWLTAGGKAIKNAPEILALLTAVWLPKRVAVMHCKGHQKDDAPTSTGNRRADEVAREVAIRPLSTQATISAGKRTADGSEFEKRTADGSEFESPKKKAKVE

SEQ ID NO: 6531 - protein, 2098 aa, synthetic construct
MPAAKRVKLDGGDKKYSIGLDIGTNSVGWAVITDEYKVPSKKFKVLGNTDRHSIKKNLIGALLFDSGETAEATRLKRTARRRYTRRKNRICYLQEIFSNEMAKVDDSFFHRLEESFLVEEDKKHERHPIFGNIVDEVAYHEKYPTIYHLRKKLVDSTDKADLRLIYLALAHMIKFRGHFLIEGDLNPDNSDVDKLFIQLVQTYNQLFEENPINASGVDAKAILSARLSKSRRLENLIAQLPGEKKNGLFGNLIALSLGLTPNFKSNFDLAEDAKLQLSKDTYDDDLDNLLAQIGDQYADLFLAAKNLSDAILLSDILRVNTEITKAPLSASMIKRYDEHHQDLTLLKALVRQQLPEKYKEIFFDQSKNGYAGYIDGGASQEEFYKFIKPILEKMDGTEELLVKLNREDLLRKQRTFDNGSIPHQIHLGELHAILRRQEDFYPFLKDNREKIEKILTFRIPYYVGPLARGNSRFAWMTRKSEETITPWNFEEVVDKGASAQSFIERMTNFDKNLPNEKVLPKHSLLYEYFTVYNELTKVKYVTEGMRKPAFLSGEQKKAIVDLLFKTNRKVTVKQLKEDYFKKIECFDSVEISGVEDRFNASLGTYHDLLKIIKDKDFLDNEENEDILEDIVLTLTLFEDREMIEERLKTYAHLFDDKVMKQLKRRRYTGWGRLSRKLINGIRDKQSGKTILDFLKSDGFANRNFMQLIHDDSLTFKEDIQKAQVSGQGDSLHEHIANLAGSPAIKKGILQTVKVVDELVKVMGRHKPENIVIEMARENQTTQKGQKNSRERMKRIEEGIKELGSQILKEHPVENTQLQNEKLYLYYLQNGRDMYVDQELDINRLSDYDVDHIVPQSFLKDDSIDNKVLTRSDKARGKSDNVPSEEVVKKMKNYWRQLLNAKLITQRKFDNLTKAERGGLSELDKAGFIKRQLVETRQITKHVAQILDSRMNTKYDENDKLIREVKVITLKSKLVSDFRKDFQFYKVREINNYHHAHDAYLNAVVGTALIKKYPKLESEFVYGDYKVYDVRKMIAKSEQEIGKATAKYFFYSNIMNFFKTEITLANGEIRKRPLIETNGETGEIVWDKGRDFATVRKVLSMPQVNIVKKTEVQTGGFSKESILPKRNSDKLIARKKDWDPKKYGGFDSPTVAYSVLVVAKVEKGKSKKLKSVKELLGITIMERSSFEKNPIDFLEAKGYKEVKKDLIIKLPKYSLFELENGRKRMLASAGELQKGNELALPSKYVNFLYLASHYEKLKGSPEDNEQKQLFVEQHKHYLDEIIEQISEFSKRVILADANLDKVLSAYNKHRDKPIREQAENIIHLFTLTNLGAPAAFKYFDTTIDRKRYTSTKEVLDATLIHQSITGLYETRIDLSQLGGDGGPAPAPAPAPAPGGTAPLEEEYRLFLEAPIQNVTLLEQWKREIPKVWAEINPPGLASTQAPIHVQLLSTALPVRVRQYPITLEAKRSLRETIRKFRAAGILRPVHSPWNTPLLPVRKSGTSEYRMVQDLREVNKRVETIHPTVPNPYTLLSLLPPDRIWYSVLDLKDAFFCIPLAPESQLIFAFEWADAEEGESGQLTWTRLPQGFKNSPTLFNEALNRDLQGFRLDHPSVSLLQYVDDLLIAADTQAACLSATRDLLMTLAELGYRVSGKKAQLCQEEVTYLGFKIHKGSRSLSNSRTQAILQIPVPKTKRQVREFLGKIGYCRLFIPGFAELAQPLYAATRPGNDPLVWGEKEEEAFQSLKLALTQPPALALPSLDKPFQLFVEETSGAAKGVLTQALGPWKRPVAYLSKRLDPVAAGWPRCLRAIAAAALLTREASKLTFGQDIEITSSHNLESLLRSPPDKWLTNARITQYQVLLLDPPRVRFKQTAALNPATLLPETDDTLPIHHCLDTLDSLTSTRPDLTDQPLAQAEATLFTDGSSYIRDGKRYAGAAVVTLDSVIWAEPLPIGTSAQKAELIALTKALEWSKDKSVNIYTDSRYAFATLHVHGMIYRERGWLTAGGKAIKNAPEILALLTAVWLPKRVAVMHCKGHQKDDAPTSTGNRRADEVAREVAIRPLSTQATISAGKRTADGSEFEKRTADGSEFESPKKKAKVE

SEQ ID NO: 6532 - protein, 2102 aa, synthetic construct
MPAAKRVKLDGGDKKYSIGLDIGTNSVGWAVITDEYKVPSKKFKVLGNTDRHSIKKNLIGALLFDSGETAEATRLKRTARRRYTRRKNRICYLQEIFSNEMAKVDDSFFHRLEESFLVEEDKKHERHPIFGNIVDEVAYHEKYPTIYHLRKKLVDSTDKADLRLIYLALAHMIKFRGHFLIEGDLNPDNSDVDKLFIQLVQTYNQLFEENPINASGVDAKAILSARLSKSRRLENLIAQLPGEKKNGLFGNLIALSLGLTPNFKSNFDLAEDAKLQLSKDTYDDDLDNLLAQIGDQYADLFLAAKNLSDAILLSDILRVNTEITKAPLSASMIKRYDEHHQDLTLLKALVRQQLPEKYKEIFFDQSKNGYAGYIDGGASQEEFYKFIKPILEKMDGTEELLVKLNREDLLRKQRTFDNGSIPHQIHLGELHAILRRQEDFYPFLKDNREKIEKILTFRIPYYVGPLARGNSRFAWMTRKSEETITPWNFEEVVDKGASAQSFIERMTNFDKNLPNEKVLPKHSLLYEYFTVYNELTKVKYVTEGMRKPAFLSGEQKKAIVDLLFKTNRKVTVKQLKEDYFKKIECFDSVEISGVEDRFNASLGTYHDLLKIIKDKDFLDNEENEDILEDIVLTLTLFEDREMIEERLKTYAHLFDDKVMKQLKRRRYTGWGRLSRKLINGIRDKQSGKTILDFLKSDGFANRNFMQLIHDDSLTFKEDIQKAQVSGQGDSLHEHIANLAGSPAIKKGILQTVKVVDELVKVMGRHKPENIVIEMARENQTTQKGQKNSRERMKRIEEGIKELGSQILKEHPVENTQLQNEKLYLYYLQNGRDMYVDQELDINRLSDYDVDHIVPQSFLKDDSIDNKVLTRSDKARGKSDNVPSEEVVKKMKNYWRQLLNAKLITQRKFDNLTKAERGGLSELDKAGFIKRQLVETRQITKHVAQILDSRMNTKYDENDKLIREVKVITLKSKLVSDFRKDFQFYKVREINNYHHAHDAYLNAVVGTALIKKYPKLESEFVYGDYKVYDVRKMIAKSEQEIGKATAKYFFYSNIMNFFKTEITLANGEIRKRPLIETNGETGEIVWDKGRDFATVRKVLSMPQVNIVKKTEVQTGGFSKESILPKRNSDKLIARKKDWDPKKYGGFDSPTVAYSVLVVAKVEKGKSKKLKSVKELLGITIMERSSFEKNPIDFLEAKGYKEVKKDLIIKLPKYSLFELENGRKRMLASAGELQKGNELALPSKYVNFLYLASHYEKLKGSPEDNEQKQLFVEQHKHYLDEIIEQISEFSKRVILADANLDKVLSAYNKHRDKPIREQAENIIHLFTLTNLGAPAAFKYFDTTIDRKRYTSTKEVLDATLIHQSITGLYETRIDLSQLGGDGGPAPAPAPAPAPGGTVSLQDEHRLFDIPVTTSLPDVWLQDFPQAWAETGGLGRAKCQAPIIIDLKPTAVPVSIKQYPMSLEAHMGIRQHIIKFLELGVLRPCRSPWNTPLLPVKKPGTQDYRPVQDLREINKRTVDIHPTVPNPYNLLSTLKPDYSWYTVLDLKDAFFCLPLAPQSQELFAFEWKDPERGISGQLTWTRLPQGFKNSPTLFNEALHRDLTDFRTQHPEVTLLQYVDDLLLAAPTKKACTQGTRHLLQELGEKGYRASAKKAQICQTKVTYLGYILSEGKRWLTPGRIETVARIPPPRNPREVREFLGTAGFCRLWIPGFAELAAPLYALTKPSTPFTWQTEHQLAFEALKKALLSAPALGLPDTSKPFTLFLDERQGIAKGVLTQKLGPWKRPVAYLSKKLDPVAAGWPPCLRIMAATAMLVKDSAKLTLGQPLTVITPHTLEAIVRQPPDRWITNARLTHYQALLLDTDRVQFGPPVTLNPATLLPVPENQPSPHDCRQVLAETHGTREDLKDQELPDADHTWYTDGSSYLDSGTRRAGAAVVDGHNTIWAQSLPPGTSAQKAELIALTKALELSKGKKANIYTDSRYAFATAHTHGSIYERRGWLTSEGKEIKNKAEIIALLKALFLPQEVAIIHCPGHQKGQDPVAVGNRQADRVARQAAMAEVLTLATEPDNTSHITAGKRTADGSEFEKRTADGSEFESPKKKAKVE

SEQ ID NO: 6533 - protein, 2173 aa, synthetic construct
MPAAKRVKLDGGDKKYSIGLDIGTNSVGWAVITDEYKVPSKKFKVLGNTDRHSIKKNLIGALLFDSGETAEATRLKRTARRRYTRRKNRICYLQEIFSNEMAKVDDSFFHRLEESFLVEEDKKHERHPIFGNIVDEVAYHEKYPTIYHLRKKLVDSTDKADLRLIYLALAHMIKFRGHFLIEGDLNPDNSDVDKLFIQLVQTYNQLFEENPINASGVDAKAILSARLSKSRRLENLIAQLPGEKKNGLFGNLIALSLGLTPNFKSNFDLAEDAKLQLSKDTYDDDLDNLLAQIGDQYADLFLAAKNLSDAILLSDILRVNTEITKAPLSASMIKRYDEHHQDLTLLKALVRQQLPEKYKEIFFDQSKNGYAGYIDGGASQEEFYKFIKPILEKMDGTEELLVKLNREDLLRKQRTFDNGSIPHQIHLGELHAILRRQEDFYPFLKDNREKIEKILTFRIPYYVGPLARGNSRFAWMTRKSEETITPWNFEEVVDKGASAQSFIERMTNFDKNLPNEKVLPKHSLLYEYFTVYNELTKVKYVTEGMRKPAFLSGEQKKAIVDLLFKTNRKVTVKQLKEDYFKKIECFDSVEISGVEDRFNASLGTYHDLLKIIKDKDFLDNEENEDILEDIVLTLTLFEDREMIEERLKTYAHLFDDKVMKQLKRRRYTGWGRLSRKLINGIRDKQSGKTILDFLKSDGFANRNFMQLIHDDSLTFKEDIQKAQVSGQGDSLHEHIANLAGSPAIKKGILQTVKVVDELVKVMGRHKPENIVIEMARENQTTQKGQKNSRERMKRIEEGIKELGSQILKEHPVENTQLQNEKLYLYYLQNGRDMYVDQELDINRLSDYDVDHIVPQSFLKDDSIDNKVLTRSDKARGKSDNVPSEEVVKKMKNYWRQLLNAKLITQRKFDNLTKAERGGLSELDKAGFIKRQLVETRQITKHVAQILDSRMNTKYDENDKLIREVKVITLKSKLVSDFRKDFQFYKVREINNYHHAHDAYLNAVVGTALIKKYPKLESEFVYGDYKVYDVRKMIAKSEQEIGKATAKYFFYSNIMNFFKTEITLANGEIRKRPLIETNGETGEIVWDKGRDFATVRKVLSMPQVNIVKKTEVQTGGFSKESILPKRNSDKLIARKKDWDPKKYGGFDSPTVAYSVLVVAKVEKGKSKKLKSVKELLGITIMERSSFEKNPIDFLEAKGYKEVKKDLIIKLPKYSLFELENGRKRMLASAGELQKGNELALPSKYVNFLYLASHYEKLKGSPEDNEQKQLFVEQHKHYLDEIIEQISEFSKRVILADANLDKVLSAYNKHRDKPIREQAENIIHLFTLTNLGAPAAFKYFDTTIDRKRYTSTKEVLDATLIHQSITGLYETRIDLSQLGGDGGPAPAPAPAPAPGGMDLLKPLTVERKGVKIKGYWNSQADITCVPKDLLQGEEPVRQQNVTTIHGTQEGDVYYVNLKIDGRRINTEVIGTTLDYAIITPGDVPWILKKPLELTIKLDLEEQQGTLLNNSILSKKGKEELKQLFEKYSALWQSWENQVGHRRIRPHKIATGTVKPTPQKQYHINPKAKPDIQIVINDLLKQGVLIQKESTMNTPVYPVPKPNGRWRMVLDYRAVNKVTPLIAVQNQHSYGILGSLFKGRYKTTIDLSNGFWAHPIVPEDYWITAFTWQGKQYCWTVLPQGFLNSPGLFTGDVVDLLQGIPNVEVYVDDVYISHDSEKEHLEYLDILFNRLKEAGYIISLKKSNIANSIVDFLGFQITNEGRGLTDTFKEKLENITAPTTLKQLQSILGLLNFARNFIPDFTELIAPLYALIPKSTKNYVPWQIEHSTTLETLITKLNGAEYLQGRKGDKTLIMKVNASYTTGYIRYYNEGEKKPISYVSIVFSKTELKFTELEKLLTTVHKGLLKALDLSMGQNIHVYSPIVSMQNIQKTPQTAKKALASRWLSWLSYLEDPRIRFFYDPQMPALKDLPAVDTGKDNKKHPSNFQHIFYTDGSAITSPTKEGHLNAGMGIVYFINKDGNLQKQQEWSISLGNHTAQFAEIAAFEFALKKCLPLGGNILVVTDSNYVAKAYNEELDVWASNGFVNNRKKPLKHISKWKSVADLKRLRPDVVVTHEPGHQKLDSSPHAYGNNLADQLATQASFKVHAGKRTADGSEFEKRTADGSEFESPKKKAKVE

SEQ ID NO: 6534 - protein, 2173 aa, synthetic construct
MPAAKRVKLDGGDKKYSIGLDIGTNSVGWAVITDEYKVPSKKFKVLGNTDRHSIKKNLIGALLFDSGETAEATRLKRTARRRYTRRKNRICYLQEIFSNEMAKVDDSFFHRLEESFLVEEDKKHERHPIFGNIVDEVAYHEKYPTIYHLRKKLVDSTDKADLRLIYLALAHMIKFRGHFLIEGDLNPDNSDVDKLFIQLVQTYNQLFEENPINASGVDAKAILSARLSKSRRLENLIAQLPGEKKNGLFGNLIALSLGLTPNFKSNFDLAEDAKLQLSKDTYDDDLDNLLAQIGDQYADLFLAAKNLSDAILLSDILRVNTEITKAPLSASMIKRYDEHHQDLTLLKALVRQQLPEKYKEIFFDQSKNGYAGYIDGGASQEEFYKFIKPILEKMDGTEELLVKLNREDLLRKQRTFDNGSIPHQIHLGELHAILRRQEDFYPFLKDNREKIEKILTFRIPYYVGPLARGNSRFAWMTRKSEETITPWNFEEVVDKGASAQSFIERMTNFDKNLPNEKVLPKHSLLYEYFTVYNELTKVKYVTEGMRKPAFLSGEQKKAIVDLLFKTNRKVTVKQLKEDYFKKIECFDSVEISGVEDRFNASLGTYHDLLKIIKDKDFLDNEENEDILEDIVLTLTLFEDREMIEERLKTYAHLFDDKVMKQLKRRRYTGWGRLSRKLINGIRDKQSGKTILDFLKSDGFANRNFMQLIHDDSLTFKEDIQKAQVSGQGDSLHEHIANLAGSPAIKKGILQTVKVVDELVKVMGRHKPENIVIEMARENQTTQKGQKNSRERMKRIEEGIKELGSQILKEHPVENTQLQNEKLYLYYLQNGRDMYVDQELDINRLSDYDVDHIVPQSFLKDDSIDNKVLTRSDKARGKSDNVPSEEVVKKMKNYWRQLLNAKLITQRKFDNLTKAERGGLSELDKAGFIKRQLVETRQITKHVAQILDSRMNTKYDENDKLIREVKVITLKSKLVSDFRKDFQFYKVREINNYHHAHDAYLNAVVGTALIKKYPKLESEFVYGDYKVYDVRKMIAKSEQEIGKATAKYFFYSNIMNFFKTEITLANGEIRKRPLIETNGETGEIVWDKGRDFATVRKVLSMPQVNIVKKTEVQTGGFSKESILPKRNSDKLIARKKDWDPKKYGGFDSPTVAYSVLVVAKVEKGKSKKLKSVKELLGITIMERSSFEKNPIDFLEAKGYKEVKKDLIIKLPKYSLFELENGRKRMLASAGELQKGNELALPSKYVNFLYLASHYEKLKGSPEDNEQKQLFVEQHKHYLDEIIEQISEFSKRVILADANLDKVLSAYNKHRDKPIREQAENIIHLFTLTNLGAPAAFKYFDTTIDRKRYTSTKEVLDATLIHQSITGLYETRIDLSQLGGDGGPAPAPAPAPAPGGMDLLKPLTVERKGVKIKGYWNSQADITCVPKDLLQGEEPVRQQNVTTIHGTQEGDVYYVNLKIDGRRINTEVIGTTLDYAIITPGDVPWILKKPLELTIKLDLEEQQGTLLNNSILSKKGKEELKQLFEKYSALWQSWENQVGHRRIRPHKIATGTVKPTPQKQYHINPKAKPDIQIVINDLLKQGVLIQKESTMNTPVYPVPKPNGRWRMVLDYRAVNKVTPLIAVQNQHSYGILGSLFKGRYKTTIDLSNGFWAHPIVPEDYWITAFTWQGKQYCWTVLPQGFLNSPGLFNGDVVDLLQGIPNVEVYVDDVYISHDSEKEHLEYLDILFNRLKEAGYIISLKKSNIANSIVDFLGFQITNEGRGLTDTFKEKLENITAPTTLKQLQSILGLLNFARNFIPDFTELIAPLYALIPKSPKNYVPWQIEHSTTLETLITKLNGAEYLQGRKGDKTLIMKVNASYTTGYIRYYNEGEKKPISYVSIVFSKTELKFTELEKLLTTVHKGLLKALDLSMGQNIHVYSPIVSMQNIQKTPQTAKKALASRWLSWLSYLEDPRIRFFYDPQMPALKDLPAVDTGKDNKKHPSNFQHIFYTDGSAITSPTKEGHLNAGMGIVYFINKDGNLQKQQEWSISLGNHTAQFAEIAAFEFALKKCLPLGGNILVVTDSNYVAKAYNEELDVWASNGFVNNRKKPLKHISKWKSVADLKRLRPDVVVTHEPGHQKLDSSPHAYGNNLADQLATQASFKVHAGKRTADGSEFEKRTADGSEFESPKKKAKVE

SEQ ID NO: 6535 - protein, 2095 aa, synthetic construct
MPAAKRVKLDGGDKKYSIGLDIGTNSVGWAVITDEYKVPSKKFKVLGNTDRHSIKKNLIGALLFDSGETAEATRLKRTARRRYTRRKNRICYLQEIFSNEMAKVDDSFFHRLEESFLVEEDKKHERHPIFGNIVDEVAYHEKYPTIYHLRKKLVDSTDKADLRLIYLALAHMIKFRGHFLIEGDLNPDNSDVDKLFIQLVQTYNQLFEENPINASGVDAKAILSARLSKSRRLENLIAQLPGEKKNGLFGNLIALSLGLTPNFKSNFDLAEDAKLQLSKDTYDDDLDNLLAQIGDQYADLFLAAKNLSDAILLSDILRVNTEITKAPLSASMIKRYDEHHQDLTLLKALVRQQLPEKYKEIFFDQSKNGYAGYIDGGASQEEFYKFIKPILEKMDGTEELLVKLNREDLLRKQRTFDNGSIPHQIHLGELHAILRRQEDFYPFLKDNREKIEKILTFRIPYYVGPLARGNSRFAWMTRKSEETITPWNFEEVVDKGASAQSFIERMTNFDKNLPNEKVLPKHSLLYEYFTVYNELTKVKYVTEGMRKPAFLSGEQKKAIVDLLFKTNRKVTVKQLKEDYFKKIECFDSVEISGVEDRFNASLGTYHDLLKIIKDKDFLDNEENEDILEDIVLTLTLFEDREMIEERLKTYAHLFDDKVMKQLKRRRYTGWGRLSRKLINGIRDKQSGKTILDFLKSDGFANRNFMQLIHDDSLTFKEDIQKAQVSGQGDSLHEHIANLAGSPAIKKGILQTVKVVDELVKVMGRHKPENIVIEMARENQTTQKGQKNSRERMKRIEEGIKELGSQILKEHPVENTQLQNEKLYLYYLQNGRDMYVDQELDINRLSDYDVDHIVPQSFLKDDSIDNKVLTRSDKARGKSDNVPSEEVVKKMKNYWRQLLNAKLITQRKFDNLTKAERGGLSELDKAGFIKRQLVETRQITKHVAQILDSRMNTKYDENDKLIREVKVITLKSKLVSDFRKDFQFYKVREINNYHHAHDAYLNAVVGTALIKKYPKLESEFVYGDYKVYDVRKMIAKSEQEIGKATAKYFFYSNIMNFFKTEITLANGEIRKRPLIETNGETGEIVWDKGRDFATVRKVLSMPQVNIVKKTEVQTGGFSKESILPKRNSDKLIARKKDWDPKKYGGFDSPTVAYSVLVVAKVEKGKSKKLKSVKELLGITIMERSSFEKNPIDFLEAKGYKEVKKDLIIKLPKYSLFELENGRKRMLASAGELQKGNELALPSKYVNFLYLASHYEKLKGSPEDNEQKQLFVEQHKHYLDEIIEQISEFSKRVILADANLDKVLSAYNKHRDKPIREQAENIIHLFTLTNLGAPAAFKYFDTTIDRKRYTSTKEVLDATLIHQSITGLYETRIDLSQLGGDGGPAPAPAPAPAPGGTLQLEEEYRLFEPESTQKQEMDIWLKNFPQAWAETGGMGTAHCQAPVLIQLKATATPISIRQYPMPHEAYQGIKPHIRRMLDQGILKPCQSPWNTPLLPVKKPGTEDYRPVQDLREVNKRVEDIHPTVPNPYNLLSTLPPSHPWYTVLDLKDAFFCLRLHSESQLLFAFEWRDPEIGLSGQLTWTRLPQGFKNSPTLFDEALHSDLADFRVRYPALVLLQYVDDLLLAAATRTECLEGTKALLETLGNKGYRASAKKAQICLQEVTYLGYSLKDGQRWLTKARKEAILSIPVPKNSRQVREFLGTAGYCRLWIPGFAELAAPLYPLTRPGTLFQWGTEQQLAFEDIKKALLSSPALGLPDITKPFELFIDENSGFAKGVLVQKLGPWKRPVAYLSKKLDTVASGWPPCLRMVAAIAILVKDAGKLTLGQPLTILTSHPVEALVRQPPNKWLSNARMTHYQAMLLDAERVHFGPTVSLNPATLLPLPSGGNHHDCLQILAETHGTRPDLTDQPLPDADLTWYTDGSSFIRNGEREAGAAVTTESEVIWAAPLPPGTSAQRAELIALTQALKMAEGKKLTVYTDSRYAFATTHVHGEIYRRRGLLTSEGKEIKNKNEILALLEALFLPKRLSIIHCPGHQKGDSPQAKGNRLADDTAKKAATETHSSLTVLPAGKRTADGSEFEKRTADGSEFESPKKKAKVE

SEQ ID NO: 6536 - protein, 2176 aa, synthetic construct
MPAAKRVKLDGGDKKYSIGLDIGTNSVGWAVITDEYKVPSKKFKVLGNTDRHSIKKNLIGALLFDSGETAEATRLKRTARRRYTRRKNRICYLQEIFSNEMAKVDDSFFHRLEESFLVEEDKKHERHPIFGNIVDEVAYHEKYPTIYHLRKKLVDSTDKADLRLIYLALAHMIKFRGHFLIEGDLNPDNSDVDKLFIQLVQTYNQLFEENPINASGVDAKAILSARLSKSRRLENLIAQLPGEKKNGLFGNLIALSLGLTPNFKSNFDLAEDAKLQLSKDTYDDDLDNLLAQIGDQYADLFLAAKNLSDAILLSDILRVNTEITKAPLSASMIKRYDEHHQDLTLLKALVRQQLPEKYKEIFFDQSKNGYAGYIDGGASQEEFYKFIKPILEKMDGTEELLVKLNREDLLRKQRTFDNGSIPHQIHLGELHAILRRQEDFYPFLKDNREKIEKILTFRIPYYVGPLARGNSRFAWMTRKSEETITPWNFEEVVDKGASAQSFIERMTNFDKNLPNEKVLPKHSLLYEYFTVYNELTKVKYVTEGMRKPAFLSGEQKKAIVDLLFKTNRKVTVKQLKEDYFKKIECFDSVEISGVEDRFNASLGTYHDLLKIIKDKDFLDNEENEDILEDIVLTLTLFEDREMIEERLKTYAHLFDDKVMKQLKRRRYTGWGRLSRKLINGIRDKQSGKTILDFLKSDGFANRNFMQLIHDDSLTFKEDIQKAQVSGQGDSLHEHIANLAGSPAIKKGILQTVKVVDELVKVMGRHKPENIVIEMARENQTTQKGQKNSRERMKRIEEGIKELGSQILKEHPVENTQLQNEKLYLYYLQNGRDMYVDQELDINRLSDYDVDHIVPQSFLKDDSIDNKVLTRSDKARGKSDNVPSEEVVKKMKNYWRQLLNAKLITQRKFDNLTKAERGGLSELDKAGFIKRQLVETRQITKHVAQILDSRMNTKYDENDKLIREVKVITLKSKLVSDFRKDFQFYKVREINNYHHAHDAYLNAVVGTALIKKYPKLESEFVYGDYKVYDVRKMIAKSEQEIGKATAKYFFYSNIMNFFKTEITLANGEIRKRPLIETNGETGEIVWDKGRDFATVRKVLSMPQVNIVKKTEVQTGGFSKESILPKRNSDKLIARKKDWDPKKYGGFDSPTVAYSVLVVAKVEKGKSKKLKSVKELLGITIMERSSFEKNPIDFLEAKGYKEVKKDLIIKLPKYSLFELENGRKRMLASAGELQKGNELALPSKYVNFLYLASHYEKLKGSPEDNEQKQLFVEQHKHYLDEIIEQISEFSKRVILADANLDKVLSAYNKHRDKPIREQAENIIHLFTLTNLGAPAAFKYFDTTIDRKRYTSTKEVLDATLIHQSITGLYETRIDLSQLGGDGGPAPAPAPAPAPGGMNPLQLLQPLPAEIKGTKLLAHWNSGATITCIPESFLEDEQPIKKTLIKTIHGEKQQNVYYVTFKVKGRKVEAEVIASPYEYILLSPTDVPWLTQQPLQLTILVPLQEYQEKILSKTALPEDQKQQLKTLFVKYDNLWQHWENQVGHRKIRPHNIATGDYPPRPQKQYPINPKAKPSIQIVIDDLLKQGVLTPQNSTMNTPVYPVPKPDGRWRMVLDYREVNKTIPLTAAQNQHSAGILATIVRQKYKTTLDLANGFWAHPITPESYWLTAFTWQGKQYCWTRLPQGFLNSPALFNADVVDLLKEIPNVQVYVDDIYLSHDDPKEHVQQLEKVFQILLQAGYVVSLKKSEIGQKTVEFLGFNITKEGRGLTDTFKTKLLNITPPKDLKQLQSILGLLNFARNFIPNFAELVQPLYNLIAPAKGKYIEWSEENTKQLNMVIEALNTASNLEERLPEQRLVIKVNTSPSAGYVRYYNETGKKPIMYLNYVFSKAELKFSMLEKLLTTMHKALIKAMDLAMGQEILVYSPIVSMTKIQKTPLPERKALPIRWITWMTYLEDPRIQFHYDKTLPELKHIPDVYTSSQSPVKHPSQYEGVFYTDGSAIKSPDPTKSNNAGMGIVHATYKPEYQVLNQWSIPLGNHTAQMAEIAAVEFACKKALKIPGPVLVITDSFYVAESANKELPYWKSNGFVNNKKKPLKHISKWKSIAECLSMKPDITIQHEKGISLQIPVFILKGNALADKLATQGSYVVNAGKRTADGSEFEKRTADGSEFESPKKKAKVE

SEQ ID NO: 6537 - protein, 2009 aa, synthetic construct
MPAAKRVKLDGGDKKYSIGLDIGTNSVGWAVITDEYKVPSKKFKVLGNTDRHSIKKNLIGALLFDSGETAEATRLKRTARRRYTRRKNRICYLQEIFSNEMAKVDDSFFHRLEESFLVEEDKKHERHPIFGNIVDEVAYHEKYPTIYHLRKKLVDSTDKADLRLIYLALAHMIKFRGHFLIEGDLNPDNSDVDKLFIQLVQTYNQLFEENPINASGVDAKAILSARLSKSRRLENLIAQLPGEKKNGLFGNLIALSLGLTPNFKSNFDLAEDAKLQLSKDTYDDDLDNLLAQIGDQYADLFLAAKNLSDAILLSDILRVNTEITKAPLSASMIKRYDEHHQDLTLLKALVRQQLPEKYKEIFFDQSKNGYAGYIDGGASQEEFYKFIKPILEKMDGTEELLVKLNREDLLRKQRTFDNGSIPHQIHLGELHAILRRQEDFYPFLKDNREKIEKILTFRIPYYVGPLARGNSRFAWMTRKSEETITPWNFEEVVDKGASAQSFIERMTNFDKNLPNEKVLPKHSLLYEYFTVYNELTKVKYVTEGMRKPAFLSGEQKKAIVDLLFKTNRKVTVKQLKEDYFKKIECFDSVEISGVEDRFNASLGTYHDLLKIIKDKDFLDNEENEDILEDIVLTLTLFEDREMIEERLKTYAHLFDDKVMKQLKRRRYTGWGRLSRKLINGIRDKQSGKTILDFLKSDGFANRNFMQLIHDDSLTFKEDIQKAQVSGQGDSLHEHIANLAGSPAIKKGILQTVKVVDELVKVMGRHKPENIVIEMARENQTTQKGQKNSRERMKRIEEGIKELGSQILKEHPVENTQLQNEKLYLYYLQNGRDMYVDQELDINRLSDYDVDHIVPQSFLKDDSIDNKVLTRSDKARGKSDNVPSEEVVKKMKNYWRQLLNAKLITQRKFDNLTKAERGGLSELDKAGFIKRQLVETRQITKHVAQILDSRMNTKYDENDKLIREVKVITLKSKLVSDFRKDFQFYKVREINNYHHAHDAYLNAVVGTALIKKYPKLESEFVYGDYKVYDVRKMIAKSEQEIGKATAKYFFYSNIMNFFKTEITLANGEIRKRPLIETNGETGEIVWDKGRDFATVRKVLSMPQVNIVKKTEVQTGGFSKESILPKRNSDKLIARKKDWDPKKYGGFDSPTVAYSVLVVAKVEKGKSKKLKSVKELLGITIMERSSFEKNPIDFLEAKGYKEVKKDLIIKLPKYSLFELENGRKRMLASAGELQKGNELALPSKYVNFLYLASHYEKLKGSPEDNEQKQLFVEQHKHYLDEIIEQISEFSKRVILADANLDKVLSAYNKHRDKPIREQAENIIHLFTLTNLGAPAAFKYFDTTIDRKRYTSTKEVLDATLIHQSITGLYETRIDLSQLGGDGGPAPAPAPAPAPGGGLEHLPPPPEVSQFPLNPERLQALTDLVSRALEAKHIEPYQGPGNNPIFPVKKPNGKWRFIHDLRATNSVTRDLASPSPGPPDLTSLPQGLPHLRTIDLTDAFFQIPLPTIFQPYFAFTLPQPNNYGPGTRYSWRVLPQGFKNSPTLFQQQLSHILTPVRKTFPNSLIIQYMDDILLASPAPGELAALTDKVTNALTKEGLPLSPEKTQATPGPIHFLGQVISQDCITYETLPSINVKSTWSLAELQSMLGELQWVSKGTPVLRSSLHQLYLALRGHRDPRDTIKLTSIQVQALRTIQKALTLNCRSRLVNQLPILALIMLRPTGTTAVLFQTKQKWPLVWLHTPHPATSLRPWGQLLANAVIILDKYSLQHYGQVCKSFHHNISNQALTYYLHTSDQSSVAILLQHSHRFHNLGAQPSGPWRSLLQMPQIFQNIDVLRPPFTISPVVINHAPCLFSDGSASKAAFIIWDRQVIHQQVLSLPSTCSAQAGELFGLLAGLQKSQPWVALNIFLDSKFLIGHLRRMAWGAFPGPSTQCELHTQLLPLLQGKTVYVHHVRSHTLLQDPISRLNEATDALMLAPLLPLAGKRTADGSEFEKRTADGSEFESPKKKAKVE

SEQ ID NO: 6538 - protein, 2127 aa, synthetic construct
MPAAKRVKLDGGDKKYSIGLDIGTNSVGWAVITDEYKVPSKKFKVLGNTDRHSIKKNLIGALLFDSGETAEATRLKRTARRRYTRRKNRICYLQEIFSNEMAKVDDSFFHRLEESFLVEEDKKHERHPIFGNIVDEVAYHEKYPTIYHLRKKLVDSTDKADLRLIYLALAHMIKFRGHFLIEGDLNPDNSDVDKLFIQLVQTYNQLFEENPINASGVDAKAILSARLSKSRRLENLIAQLPGEKKNGLFGNLIALSLGLTPNFKSNFDLAEDAKLQLSKDTYDDDLDNLLAQIGDQYADLFLAAKNLSDAILLSDILRVNTEITKAPLSASMIKRYDEHHQDLTLLKALVRQQLPEKYKEIFFDQSKNGYAGYIDGGASQEEFYKFIKPILEKMDGTEELLVKLNREDLLRKQRTFDNGSIPHQIHLGELHAILRRQEDFYPFLKDNREKIEKILTFRIPYYVGPLARGNSRFAWMTRKSEETITPWNFEEVVDKGASAQSFIERMTNFDKNLPNEKVLPKHSLLYEYFTVYNELTKVKYVTEGMRKPAFLSGEQKKAIVDLLFKTNRKVTVKQLKEDYFKKIECFDSVEISGVEDRFNASLGTYHDLLKIIKDKDFLDNEENEDILEDIVLTLTLFEDREMIEERLKTYAHLFDDKVMKQLKRRRYTGWGRLSRKLINGIRDKQSGKTILDFLKSDGFANRNFMQLIHDDSLTFKEDIQKAQVSGQGDSLHEHIANLAGSPAIKKGILQTVKVVDELVKVMGRHKPENIVIEMARENQTTQKGQKNSRERMKRIEEGIKELGSQILKEHPVENTQLQNEKLYLYYLQNGRDMYVDQELDINRLSDYDVDHIVPQSFLKDDSIDNKVLTRSDKARGKSDNVPSEEVVKKMKNYWRQLLNAKLITQRKFDNLTKAERGGLSELDKAGFIKRQLVETRQITKHVAQILDSRMNTKYDENDKLIREVKVITLKSKLVSDFRKDFQFYKVREINNYHHAHDAYLNAVVGTALIKKYPKLESEFVYGDYKVYDVRKMIAKSEQEIGKATAKYFFYSNIMNFFKTEITLANGEIRKRPLIETNGETGEIVWDKGRDFATVRKVLSMPQVNIVKKTEVQTGGFSKESILPKRNSDKLIARKKDWDPKKYGGFDSPTVAYSVLVVAKVEKGKSKKLKSVKELLGITIMERSSFEKNPIDFLEAKGYKEVKKDLIIKLPKYSLFELENGRKRMLASAGELQKGNELALPSKYVNFLYLASHYEKLKGSPEDNEQKQLFVEQHKHYLDEIIEQISEFSKRVILADANLDKVLSAYNKHRDKPIREQAENIIHLFTLTNLGAPAAFKYFDTTIDRKRYTSTKEVLDATLIHQSITGLYETRIDLSQLGGDGGPAPAPAPAPAPGGLLGRDLLTKLKAQIQFSTEGPQVTWEDRPAMCLVLNLEEEYRLHEKPVPPSIDPSWLQLFPMVWAEKAGMGLANQVPPVVVELKSDASPVAVRQYPMSKEAREGIRPHIQRFLDLGILVPCQSPWNTPLLPVKKPGTNDYRPVQDLREVNKRVQDIHPTVPNPYNLLSSLPPSHTWYSVLDLKDAFFCLKLHPNSQPLFAFEWRDPEKGNTGQLTWTRLPQGFKNSPTLFDEALHRDLASFRALNPQVVMLQYVDDLLVAAPTYRDCKEGTRRLLQELSKLGYRVSAKKAQLCREEVTYLGYLLKGGKRWLTPARKATVMKIPTPTTPRQVREFLGTAGFCRLWIPGFASLAAPLYPLTREKVPFTWTEAHQEAFGRIKEALLSAPALALPDLTKPFALYVDEKEGVARGVLTQTLGPWRRPVAYLSKKLDPVASGWPTCLKAIAAVALLLKDADKLTLGQNVLVIAPHNLESIVRQPPDRWMTNARMTHYQSLLLNERVSFAPPAILNPATLLPVESDDTPIHICSEILAEETGTRPDLRDQPLPGVPAWYTDGSSFIMDGRRQAGAAIVDNKRTVWASNLPEGTSAQKAELIALTQALRLAEGKSINIYTDSRYAFATAHVHGAIYKQRGLLTSAGKDIKNKEEILALLEAIHLPKRVAIIHCPGHQRGTDPVATGNRKADEAAKQAAQSTRILTETTKNAGKRTADGSEFEKRTADGSEFESPKKKAKVE

SEQ ID NO: 6539 - protein, 2218 aa, synthetic construct
MPAAKRVKLDGGDKKYSIGLDIGTNSVGWAVITDEYKVPSKKFKVLGNTDRHSIKKNLIGALLFDSGETAEATRLKRTARRRYTRRKNRICYLQEIFSNEMAKVDDSFFHRLEESFLVEEDKKHERHPIFGNIVDEVAYHEKYPTIYHLRKKLVDSTDKADLRLIYLALAHMIKFRGHFLIEGDLNPDNSDVDKLFIQLVQTYNQLFEENPINASGVDAKAILSARLSKSRRLENLIAQLPGEKKNGLFGNLIALSLGLTPNFKSNFDLAEDAKLQLSKDTYDDDLDNLLAQIGDQYADLFLAAKNLSDAILLSDILRVNTEITKAPLSASMIKRYDEHHQDLTLLKALVRQQLPEKYKEIFFDQSKNGYAGYIDGGASQEEFYKFIKPILEKMDGTEELLVKLNREDLLRKQRTFDNGSIPHQIHLGELHAILRRQEDFYPFLKDNREKIEKILTFRIPYYVGPLARGNSRFAWMTRKSEETITPWNFEEVVDKGASAQSFIERMTNFDKNLPNEKVLPKHSLLYEYFTVYNELTKVKYVTEGMRKPAFLSGEQKKAIVDLLFKTNRKVTVKQLKEDYFKKIECFDSVEISGVEDRFNASLGTYHDLLKIIKDKDFLDNEENEDILEDIVLTLTLFEDREMIEERLKTYAHLFDDKVMKQLKRRRYTGWGRLSRKLINGIRDKQSGKTILDFLKSDGFANRNFMQLIHDDSLTFKEDIQKAQVSGQGDSLHEHIANLAGSPAIKKGILQTVKVVDELVKVMGRHKPENIVIEMARENQTTQKGQKNSRERMKRIEEGIKELGSQILKEHPVENTQLQNEKLYLYYLQNGRDMYVDQELDINRLSDYDVDHIVPQSFLKDDSIDNKVLTRSDKARGKSDNVPSEEVVKKMKNYWRQLLNAKLITQRKFDNLTKAERGGLSELDKAGFIKRQLVETRQITKHVAQILDSRMNTKYDENDKLIREVKVITLKSKLVSDFRKDFQFYKVREINNYHHAHDAYLNAVVGTALIKKYPKLESEFVYGDYKVYDVRKMIAKSEQEIGKATAKYFFYSNIMNFFKTEITLANGEIRKRPLIETNGETGEIVWDKGRDFATVRKVLSMPQVNIVKKTEVQTGGFSKESILPKRNSDKLIARKKDWDPKKYGGFDSPTVAYSVLVVAKVEKGKSKKLKSVKELLGITIMERSSFEKNPIDFLEAKGYKEVKKDLIIKLPKYSLFELENGRKRMLASAGELQKGNELALPSKYVNFLYLASHYEKLKGSPEDNEQKQLFVEQHKHYLDEIIEQISEFSKRVILADANLDKVLSAYNKHRDKPIREQAENIIHLFTLTNLGAPAAFKYFDTTIDRKRYTSTKEVLDATLIHQSITGLYETRIDLSQLGGDGGPAPAPAPAPAPGGTLGDQGSRGSDPLPEPRVTLTVEGIPTEFLVNTGAEHSVLTKPMGKMGSKRTVVAGATGSKVYPWTTKRLLKIGQKQVTHSFLVIPECPAPLLGRDLLTKLKAQIQFSTEGPQVTWEDRPAMCLVLNLEEEYRLHEKPVPPSIDPSWLQLFPMVWAEKAGMGLANQVPPVVVELKSDASPVAVRQYPMSKEAREGIRPHIQRFLDLGILVPCQSPWNTPLLPVKKPGTNDYRPVQDLREVNKRVQDIHPTVPNPYNLLSSLPPSHTWYSVLDLKDAFFCLKLHPNSQPLFAFEWRDPEKGNTGQLTWTRLPQGFKNSPTLFNEALHRDLASFRALNPQVVMLQYVDDLLVAAPTYRDCKEGTRRLLQELSKLGYRVSAKKAQLCREEVTYLGYLLKGGKRWLTPARKATVMKIPTPTTPRQVREFLGTAGFCRLWIPGFASLAAPLYPLTRPKVPFTWTEAHQEAFGRIKEALLSAPALALPDLTKPFALYVDEKEGVARGVLTQTLGPWRRPVAYLSKKLDPVASGWPTCLKAIAAVALLLKDADKLTLGQNVLVIAPHNLESIVRQPPDRWMTNARMTHYQSLLLNERVSFAPPAILNPATLLPVESDDTPIHICSEILAEETGTRPDLRDQPLPGVPAWYTDGSSFIMDGRRQAGAAIVDNKRTVWASNLPEGTSAQKAELIALTQALRLAEGKSINIYTDSRYAFATAHVHGAIYKQRGWLTSAGKDIKNKEEILALLEAIHLPKRVAIIHCPGHQRGTDPVATGNRKADEAAKQAAQSTRILTETTKNAGKRTADGSEFEKRTADGSEFESPKKKAKVE

SEQ ID NO: 6540 - protein, 2096 aa, synthetic construct
MPAAKRVKLDGGDKKYSIGLDIGTNSVGWAVITDEYKVPSKKFKVLGNTDRHSIKKNLIGALLFDSGETAEATRLKRTARRRYTRRKNRICYLQEIFSNEMAKVDDSFFHRLEESFLVEEDKKHERHPIFGNIVDEVAYHEKYPTIYHLRKKLVDSTDKADLRLIYLALAHMIKFRGHFLIEGDLNPDNSDVDKLFIQLVQTYNQLFEENPINASGVDAKAILSARLSKSRRLENLIAQLPGEKKNGLFGNLIALSLGLTPNFKSNFDLAEDAKLQLSKDTYDDDLDNLLAQIGDQYADLFLAAKNLSDAILLSDILRVNTEITKAPLSASMIKRYDEHHQDLTLLKALVRQQLPEKYKEIFFDQSKNGYAGYIDGGASQEEFYKFIKPILEKMDGTEELLVKLNREDLLRKQRTFDNGSIPHQIHLGELHAILRRQEDFYPFLKDNREKIEKILTFRIPYYVGPLARGNSRFAWMTRKSEETITPWNFEEVVDKGASAQSFIERMTNFDKNLPNEKVLPKHSLLYEYFTVYNELTKVKYVTEGMRKPAFLSGEQKKAIVDLLFKTNRKVTVKQLKEDYFKKIECFDSVEISGVEDRFNASLGTYHDLLKIIKDKDFLDNEENEDILEDIVLTLTLFEDREMIEERLKTYAHLFDDKVMKQLKRRRYTGWGRLSRKLINGIRDKQSGKTILDFLKSDGFANRNFMQLIHDDSLTFKEDIQKAQVSGQGDSLHEHIANLAGSPAIKKGILQTVKVVDELVKVMGRHKPENIVIEMARENQTTQKGQKNSRERMKRIEEGIKELGSQILKEHPVENTQLQNEKLYLYYLQNGRDMYVDQELDINRLSDYDVDHIVPQSFLKDDSIDNKVLTRSDKARGKSDNVPSEEVVKKMKNYWRQLLNAKLITQRKFDNLTKAERGGLSELDKAGFIKRQLVETRQITKHVAQILDSRMNTKYDENDKLIREVKVITLKSKLVSDFRKDFQFYKVREINNYHHAHDAYLNAVVGTALIKKYPKLESEFVYGDYKVYDVRKMIAKSEQEIGKATAKYFFYSNIMNFFKTEITLANGEIRKRPLIETNGETGEIVWDKGRDFATVRKVLSMPQVNIVKKTEVQTGGFSKESILPKRNSDKLIARKKDWDPKKYGGFDSPTVAYSVLVVAKVEKGKSKKLKSVKELLGITIMERSSFEKNPIDFLEAKGYKEVKKDLIIKLPKYSLFELENGRKRMLASAGELQKGNELALPSKYVNFLYLASHYEKLKGSPEDNEQKQLFVEQHKHYLDEIIEQISEFSKRVILADANLDKVLSAYNKHRDKPIREQAENIIHLFTLTNLGAPAAFKYFDTTIDRKRYTSTKEVLDATLIHQSITGLYETRIDLSQLGGDGGPAPAPAPAPAPGGLGIEDEYRLHETSTEPDVSLGSTWLSDFPQAWAETGGMGLAVRQAPLIIPLKATSTPVSIQQYPMSHEARLGIKPHIQRLLDQGILVPCQSPWNTPLLPVKKPGTNDYRPVQDLREVNKRVEDIHPTVPNPYNLLSGLPPSHQWYTVLDLKDAFFCLRLHPTSQPLFAFEWRDPGMGISGQLTWTRLPQGFKNSPTLFNEALHRDLADFRIQHPDLILLQYVDDILLAATSELDCQQGTRALLQTLGDLGYRASAKKAQICQKQVKYLGYLLREGQRWLTEARKETVMGQPVPKTPRQLREFLGKAGFCRLFIPGFAEMAAPLYPLTKPGTLFSWGPDQQKAYQEIKQALLTAPALGLPDLTKPFELFVDEKQGYAKGVLTQKLGPWRRPVAYLSKKLDPVAAGWPPCLRMVAAIAVLTKDAGKLTMGQPLVILAPHAVEALVKQPPDRWLSNARMTHYQAMLLDTDRVQFGPVVALNPATLLPLPEEGAPHDCLEILAETHGTRPDLTDQPIPDADHTWYTDGSSFLQEGQRKAGAAVTTETEVIWAGALPAGTSAQRAELIALTQALKMAEGKRLNVYTDSRYAFATAHIHGEIYRRRGWLTSEGREIKNKSEILALLKALFLPKRLSIIHCLGHQKGDSAEARGNRLADQAAREAAIKTPPDTSTLLIAGKRTADGSEFEKRTADGSEFESPKKKAKVE

SEQ ID NO: 6541 - protein, 2096 aa, synthetic construct
MPAAKRVKLDGGDKKYSIGLDIGTNSVGWAVITDEYKVPSKKFKVLGNTDRHSIKKNLIGALLFDSGETAEATRLKRTARRRYTRRKNRICYLQEIFSNEMAKVDDSFFHRLEESFLVEEDKKHERHPIFGNIVDEVAYHEKYPTIYHLRKKLVDSTDKADLRLIYLALAHMIKFRGHFLIEGDLNPDNSDVDKLFIQLVQTYNQLFEENPINASGVDAKAILSARLSKSRRLENLIAQLPGEKKNGLFGNLIALSLGLTPNFKSNFDLAEDAKLQLSKDTYDDDLDNLLAQIGDQYADLFLAAKNLSDAILLSDILRVNTEITKAPLSASMIKRYDEHHQDLTLLKALVRQQLPEKYKEIFFDQSKNGYAGYIDGGASQEEFYKFIKPILEKMDGTEELLVKLNREDLLRKQRTFDNGSIPHQIHLGELHAILRRQEDFYPFLKDNREKIEKILTFRIPYYVGPLARGNSRFAWMTRKSEETITPWNFEEVVDKGASAQSFIERMTNFDKNLPNEKVLPKHSLLYEYFTVYNELTKVKYVTEGMRKPAFLSGEQKKAIVDLLFKTNRKVTVKQLKEDYFKKIECFDSVEISGVEDRFNASLGTYHDLLKIIKDKDFLDNEENEDILEDIVLTLTLFEDREMIEERLKTYAHLFDDKVMKQLKRRRYTGWGRLSRKLINGIRDKQSGKTILDFLKSDGFANRNFMQLIHDDSLTFKEDIQKAQVSGQGDSLHEHIANLAGSPAIKKGILQTVKVVDELVKVMGRHKPENIVIEMARENQTTQKGQKNSRERMKRIEEGIKELGSQILKEHPVENTQLQNEKLYLYYLQNGRDMYVDQELDINRLSDYDVDHIVPQSFLKDDSIDNKVLTRSDKARGKSDNVPSEEVVKKMKNYWRQLLNAKLITQRKFDNLTKAERGGLSELDKAGFIKRQLVETRQITKHVAQILDSRMNTKYDENDKLIREVKVITLKSKLVSDFRKDFQFYKVREINNYHHAHDAYLNAVVGTALIKKYPKLESEFVYGDYKVYDVRKMIAKSEQEIGKATAKYFFYSNIMNFFKTEITLANGEIRKRPLIETNGETGEIVWDKGRDFATVRKVLSMPQVNIVKKTEVQTGGFSKESILPKRNSDKLIARKKDWDPKKYGGFDSPTVAYSVLVVAKVEKGKSKKLKSVKELLGITIMERSSFEKNPIDFLEAKGYKEVKKDLIIKLPKYSLFELENGRKRMLASAGELQKGNELALPSKYVNFLYLASHYEKLKGSPEDNEQKQLFVEQHKHYLDEIIEQISEFSKRVILADANLDKVLSAYNKHRDKPIREQAENIIHLFTLTNLGAPAAFKYFDTTIDRKRYTSTKEVLDATLIHQSITGLYETRIDLSQLGGDGGPAPAPAPAPAPGGTLGIEDEYRLHETSTEPDVSLGSTWLSDFPQAWAETGGMGLAVRQAPLIIPLKATSTPVSIQQYPMSHEARLGIKPHIQRLLDQGILVPCQSPWNTPLLPVKKPGTNDYRPVQDLREVNKRVEDIHPTVPNPYNLLSGLPPSHQWYTVLDLKDAFFCLRLHPTSQPLFAFEWRDPGMGISGQLTWTRLPQGFKNSPTLFDEALHRDLADFRIQHPDLILLQYVDDILLAATSELDCQQGTRALLQTLGDLGYRASAKKAQICQKQVKYLGYLLREGQRWLTEARKETVMGQPVPKTPRQLREFLGTAGFCRLWIPGFAEMAAPLYPLTKTGTLFSWGPDQQKAYQEIKQALLTAPALGLPDLTKPFELFVDEKQGYAKGVLTQKLGPWRRPVAYLSKKLDPVAAGWPPCLRMVAAIAVLTKDAGKLTMGQPLVILAPHAVEALVKQPPDRWLSNARMTHYQAMLLDTDRVQFGPVVALNPATLLPLPEEGAPHDCLEILAETHGTRPDLTDQPIPDADHTWYTDGSSFLQEGQRKAGAAVTTETEVIWAGALPAGTSAQRAELIALTQALKMAEGKRLNVYTDSRYAFATAHIHGEIYRRRGLLTSEGREIKNKSEILALLKALFLPKRLSIIHCLGHQKGDSAEARGNRLADQAAREAAIKTPPDTSTLLAGKRTADGSEFEKRTADGSEFESPKKKAKVE

SEQ ID NO: 6542 - protein, 2096 aa, synthetic construct; identical to SEQ ID NO: 6540

SEQ ID NO: 6543 - protein, 2096 aa, synthetic construct
MPAAKRVKLDGGDKKYSIGLDIGTNSVGWAVITDEYKVPSKKFKVLGNTDRHSIKKNLIGALLFDSGETAEATRLKRTARRRYTRRKNRICYLQEIFSNEMAKVDDSFFHRLEESFLVEEDKKHERHPIFGNIVDEVAYHEKYPTIYHLRKKLVDSTDKADLRLIYLALAHMIKFRGHFLIEGDLNPDNSDVDKLFIQLVQTYNQLFEENPINASGVDAKAILSARLSKSRRLENLIAQLPGEKKNGLFGNLIALSLGLTPNFKSNFDLAEDAKLQLSKDTYDDDLDNLLAQIGDQYADLFLAAKNLSDAILLSDILRVNTEITKAPLSASMIKRYDEHHQDLTLLKALVRQQLPEKYKEIFFDQSKNGYAGYIDGGASQEEFYKFIKPILEKMDGTEELLVKLNREDLLRKQRTFDNGSIPHQIHLGELHAILRRQEDFYPFLKDNREKIEKILTFRIPYYVGPLARGNSRFAWMTRKSEETITPWNFEEVVDKGASAQSFIERMTNFDKNLPNEKVLPKHSLLYEYFTVYNELTKVKYVTEGMRKPAFLSGEQKKAIVDLLFKTNRKVTVKQLKEDYFKKIECFDSVEISGVEDRFNASLGTYHDLLKIIKDKDFLDNEENEDILEDIVLTLTLFEDREMIEERLKTYAHLFDDKVMKQLKRRRYTGWGRLSRKLINGIRDKQSGKTILDFLKSDGFANRNFMQLIHDDSLTFKEDIQKAQVSGQGDSLHEHIANLAGSPAIKKGILQTVKVVDELVKVMGRHKPENIVIEMARENQTTQKGQKNSRERMKRIEEGIKELGSQILKEHPVENTQLQNEKLYLYYLQNGRDMYVDQELDINRLSDYDVDHIVPQSFLKDDSIDNKVLTRSDKARGKSDNVPSEEVVKKMKNYWRQLLNAKLITQRKFDNLTKAERGGLSELDKAGFIKRQLVETRQITKHVAQILDSRMNTKYDENDKLIREVKVITLKSKLVSDFRKDFQFYKVREINNYHHAHDAYLNAVVGTALIKKYPKLESEFVYGDYKVYDVRKMIAKSEQEIGKATAKYFFYSNIMNFFKTEITLANGEIRKRPLIETNGETGEIVWDKGRDFATVRKVLSMPQVNIVKKTEVQTGGFSKESILPKRNSDKLIARKKDWDPKKYGGFDSPTVAYSVLVVAKVEKGKSKKLKSVKELLGITIMERSSFEKNPIDFLEAKGYKEVKKDLIIKLPKYSLFELENGRKRMLASAGELQKGNELALPSKYVNFLYLASHYEKLKGSPEDNEQKQLFVEQHKHYLDEIIEQISEFSKRVILADANLDKVLSAYNKHRDKPIREQAENIIHLFTLTNLGAPAAFKYFDTTIDRKRYTSTKEVLDATLIHQSITGLYETRIDLSQLGGDGGPAPAPAPAPAPGGTLNIEDEYRLHETSKGPDVPLGSTWLSDFPQAWAETGGMGLAVRQAPLIIPLKATSTPVSIKQYPMSQEARLGIKPHIQRLLDQGILVPCQSPWNTPLLPVKKPGTNDYRPVQDLREVNKRVEDIHPTVPNPYNLLSGLPPSHQWYTVLDLKDAFFCLRLHPTSQSLFAFEWRDPEMGISGQLTWTRLPQGFKNSPTLFNEALHRDLADFRIQHPDLILLQYVDDLLLAATSELDCQQGTRALLQTLGDLGYRASAKKAQICQKQVKYLGYLLKEGQRWLTEARKETVMGQPTPKTPRQLREFLGTAGFCRLWIPGFAEMAAPLYPLTKPGTLFEWGPDQQKAYQEIKQALLTAPALGLPDLTKPFELFVDEKQGYAKGVLTQKLGPWRRPVAYLSKKLDPVAAGWPPCLRMVAAIAVLTKDAGKLTMGQPLVILAPHAVEALVKQPPDRWLSNARMTHYQALLLDTDRVQFGPIVALNPATLLPLPEEGLQHDCLDILAEAHGTRPDLTDQPLPDADHTWYTDGSSFLQEGQRKAGAAVTTETEVVWAKALPAGTSAQRAELIALTQALKMAEGKKLNVYTDSRYAFATAHIHGEIYRRRGWLTSEGKEIKNKDEILALLKALFLPKRLSIIHCPGHQKGNRAEARGNRMADQAAREVATRETPETSTLLAGKRTADGSEFEKRTADGSEFESPKKKAKVE

SEQ ID NO: 6544 - protein, 2090 aa, synthetic construct
MPAAKRVKLDGGDKKYSIGLDIGTNSVGWAVITDEYKVPSKKFKVLGNTDRHSIKKNLIGALLFDSGETAEATRLKRTARRRYTRRKNRICYLQEIFSNEMAKVDDSFFHRLEESFLVEEDKKHERHPIFGNIVDEVAYHEKYPTIYHLRKKLVDSTDKADLRLIYLALAHMIKFRGHFLIEGDLNPDNSDVDKLFIQLVQTYNQLFEENPINASGVDAKAILSARLSKSRRLENLIAQLPGEKKNGLFGNLIALSLGLTPNFKSNFDLAEDAKLQLSKDTYDDDLDNLLAQIGDQYADLFLAAKNLSDAILLSDILRVNTEITKAPLSASMIKRYDEHHQDLTLLKALVRQQLPEKYKEIFFDQSKNGYAGYIDGGASQEEFYKFIKPILEKMDGTEELLVKLNREDLLRKQRTFDNGSIPHQIHLGELHAILRRQEDFYPFLKDNREKIEKILTFRIPYYVGPLARGNSRFAWMTRKSEETITPWNFEEVVDKGASAQSFIERMTNFDKNLPNEKVLPKHSLLYEYFTVYNELTKVKYVTEGMRKPAFLSGEQKKAIVDLLFKTNRKVTVKQLKEDYFKKIECFDSVEISGVEDRFNASLGTYHDLLKIIKDKDFLDNEENEDILEDIVLTLTLFEDREMIEERLKTYAHLFDDKVMKQLKRRRYTGWGRLSRKLINGIRDKQSGKTILDFLKSDGFANRNFMQLIHDDSLTFKEDIQKAQVSGQGDSLHEHIANLAGSPAIKKGILQTVKVVDELVKVMGRHKPENIVIEMARENQTTQKGQKNSRERMKRIEEGIKELGSQILKEHPVENTQLQNEKLYLYYLQNGRDMYVDQELDINRLSDYDVDHIVPQSFLKDDSIDNKVLTRSDKARGKSDNVPSEEVVKKMKNYWRQLLNAKLITQRKFDNLTKAERGGLSELDKAGFIKRQLVETRQITKHVAQILDSRMNTKYDENDKLIREVKVITLKSKLVSDFRKDFQFYKVREINNYHHAHDAYLNAVVGTALIKKYPKLESEFVYGDYKVYDVRKMIAKSEQEIGKATAKYFFYSNIMNFFKTEITLANGEIRKRPLIETNGETGEIVWDKGRDFATVRKVLSMPQVNIVKKTEVQTGGFSKESILPKRNSDKLIARKKDWDPKKYGGFDSPTVAYSVLVVAKVEKGKSKKLKSVKELLGITIMERSSFEKNPIDFLEAKGYKEVKKDLIIKLPKYSLFELENGRKRMLASAGELQKGNELALPSKYVNFLYLASHYEKLKGSPEDNEQKQLFVEQHKHYLDEIIEQISEFSKRVILADANLDKVLSAYNKHRDKPIREQAENIIHLFTLTNLGAPAAFKYFDTTIDRKRYTSTKEVLDATLIHQSITGLYETRIDLSQLGGDGGPAPAPAPAPAPGGTLQLDDEYRLYSPLVKPDQNIQFWLEQFPQAWAETAGMGLAKQVPPQVIQLKASATPVSVRQYPLSKEAQEGIRPHVQRLIQQGILVPVQSPWNTPLLPVRKPGTNDYRPVQDLREVNKRVQDIHPTVPNPYNLLCALPPQRSWYTVLDLKDAFFCLRLHPTSQPLFAFEWRDPGTGRTGQLTWTRLPQGFKNSPTIFDEALHRDLANFRIQHPQVTLLQYVDDLLLAGATKQDCLEGTKALLLELSDLGYRASAKKAQICRREVTYLGYSLRDGQRWLTEARKKTVVQIPAPTTAKQVREFLGTAGFCRLWIPGFATLAAPLYPLTKEKGEFSWAPEHQKAFDAIKKALLSAPALALPDVTKPFTLYVDERKGVARGVLTQTLGPWRRPVAYLSKKLDPVASGWPVCLKAIAAVAILVKDADKLTLGQNITVIAPHALENIVRQPPDRWMTNARMTHYQSLLLTERVTFAPPAALNPATLLPEETDEPVTHDCHQLLIEETGVRKDLTDIPLTGEVLTWFTDGSSYVVEGKRMAGAAVVDGTRTIWASSLPEGTSAQKAELMALTQALRLAEGKSINIYTDSRYAFATAHVHGAIYKQRGLLTSAGREIKNKEEILSLLEALHLPKRLAIIHCPGHQKAKDPISRGNQMADRVAKQAAQGVNLLAGKRTADGSEFEKRTADGSEFESPKKKAKVE

SEQ ID NO: 6545 - protein, 2090 aa, synthetic construct; identical to SEQ ID NO: 6544

SEQ ID NO: 6546 - protein, 2087 aa, synthetic construct
MPAAKRVKLDGGDKKYSIGLDIGTNSVGWAVITDEYKVPSKKFKVLGNTDRHSIKKNLIGALLFDSGETAEATRLKRTARRRYTRRKNRICYLQEIFSNEMAKVDDSFFHRLEESFLVEEDKKHERHPIFGNIVDEVAYHEKYPTIYHLRKKLVDSTDKADLRLIYLALAHMIKFRGHFLIEGDLNPDNSDVDKLFIQLVQTYNQLFEENPINASGVDAKAILSARLSKSRRLENLIAQLPGEKKNGLFGNLIALSLGLTPNFKSNFDLAEDAKLQLSKDTYDDDLDNLLAQIGDQYADLFLAAKNLSDAILLSDILRVNTEITKAPLSASMIKRYDEHHQDLTLLKALVRQQLPEKYKEIFFDQSKNGYAGYIDGGASQEEFYKFIKPILEKMDGTEELLVKLNREDLLRKQRTFDNGSIPHQIHLGELHAILRRQEDFYPFLKDNREKIEKILTFRIPYYVGPLARGNSRFAWMTRKSEETITPWNFEEVVDKGASAQSFIERMTNFDKNLPNEKVLPKHSLLYEYFTVYNELTKVKYVTEGMRKPAFLSGEQKKAIVDLLFKTNRKVTVKQLKEDYFKKIECFDSVEISGVEDRFNASLGTYHDLLKIIKDKDFLDNEENEDILEDIVLTLTLFEDREMIEERLKTYAHLFDDKVMKQLKRRRYTGWGRLSRKLINGIRDKQSGKTILDFLKSDGFANRNFMQLIHDDSLTFKEDIQKAQVSGQGDSLHEHIANLAGSPAIKKGILQTVKVVDELVKVMGRHKPENIVIEMARENQTTQKGQKNSRERMKRIEEGIKELGSQILKEHPVENTQLQNEKLYLYYLQNGRDMYVDQELDINRLSDYDVDHIVPQSFLKDDSIDNKVLTRSDKARGKSDNVPSEEVVKKMKNYWRQLLNAKLITQRKFDNLTKAERGGLSELDKAGFIKRQLVETRQITKHVAQILDSRMNTKYDENDKLIREVKVITLKSKLVSDFRKDFQFYKVREINNYHHAHDAYLNAVVGTALIKKYPKLESEFVYGDYKVYDVRKMIAKSEQEIGKATAKYFFYSNIMNFFKTEITLANGEIRKRPLIETNGETGEIVWDKGRDFATVRKVLSMPQVNIVKKTEVQTGGFSKESILPKRNSDKLIARKKDWDPKKYGGFDSPTVAYSVLVVAKVEKGKSKKLKSVKELLGITIMERSSFEKNPIDFLEAKGYKEVKKDLIIKLPKYSLFELENGRKRMLASAGELQKGNELALPSKYVNFLYLASHYEKLKGSPEDNEQKQLFVEQHKHYLDEIIEQISEFSKRVILADANLDKVLSAYNKHRDKPIREQAENIIHLFTLTNLGAPAAFKYFDTTIDRKRYTSTKEVLDATLIHQSITGLYETRIDLSQLGGDGGPAPAPAPAPAPGGVPWLMKKPLQLTVLVPLHEYQERLLQQTALPKEQKELLQKLFLKYDALWQHWENQVGHRRIKPHNIATGTLAPRPQKQYPINPKAKPSIQIVIDDLLKQGVLIQQNSTMNTPVYPVPKPDGKWRMVLDYREVNKTIPLIAAQNQHSAGILSSIYRGKYKTTLDLTNGFWAHPITPESYWLTAFTWQGKQYCWTRLPQGFLNSPALFNADVVDLLKEIPNVQAYVDDIYISHDDPQEHLEQLEKIFSILLNAGYVVSLKKSEIAQREVEFLGFNITKEGRGLTDTFKQKLLNITPPKDLKQLQSILGKLNFARNFIPNYSELVKPLYTIVAPANGKFISWTEDNSNQLQHIISVLNQADNLEERNPETRLIIKVNSSPSAGYIRYYNEGSKRPIMYVNYIFSKAEAKFTQTEKLLTTMHKGLIKAMDLAMGQEILVYSPIVSMTKIQRTPLPERKALPVRWITWMTYLEDPRIQFHYDKSLPELQQIPNVTEDVIAKTKHPSEFAMVFYTDGSAIKHPDVNKSHSAGMGIAQVQFIPEYKIVHQWSIPLGDHTAQLAEIAAVEFACKKALKISGPVLIVTDSFYVAESANKELPYWKSNGFLNNKKKPLRHVSKWKSIAECLQLKPDIIIMHEKGHQQPMTTLHTEGNNLADKLATQGSYVVHAGKRTADGSEFEKRTADGSEFESPKKKAKVE

SEQ ID NO: 6547 - protein, 2176 aa, synthetic construct
MPAAKRVKLDGGDKKYSIGLDIGTNSVGWAVITDEYKVPSKKFKVLGNTDRHSIKKNLIGALLFDSGETAEATRLKRTARRRYTRRKNRICYLQEIFSNEMAKVDDSFFHRLEESFLVEEDKKHERHPIFGNIVDEVAYHEKYPTIYHLRKKLVDSTDKADLRLIYLALAHMIKFRGHFLIEGDLNPDNSDVDKLFIQLVQTYNQLFEENPINASGVDAKAILSARLSKSRRLENLIAQLPGEKKNGLFGNLIALSLGLTPNFKSNFDLAEDAKLQLSKDTYDDDLDNLLAQIGDQYADLFLAAKNLSDAILLSDILRVNTEITKAPLSASMIKRYDEHHQDLTLLKALVRQQLPEKYKEIFFDQSKNGYAGYIDGGASQEEFYKFIKPILEKMDGTEELLVKLNREDLLRKQRTFDNGSIPHQIHLGELHAILRRQEDFYPFLKDNREKIEKILTFRIPYYVGPLARGNSRFAWMTRKSEETITPWNFEEVVDKGASAQSFIERMTNFDKNLPNEKVLPKHSLLYEYFTVYNELTKVKYVTEGMRKPAFLSGEQKKAIVDLLFKTNRKVTVKQLKEDYFKKIECFDSVEISGVEDRFNASLGTYHDLLKIIKDKDFLDNEENEDILEDIVLTLTLFEDREMIEERLKTYAHLFDDKVMKQLKRRRYTGWGRLSRKLINGIRDKQSGKTILDFLKSDGFANRNFMQLIHDDSLTFKEDIQKAQVSGQGDSLHEHIANLAGSPAIKKGILQTVKVVDELVKVMGRHKPENIVIEMARENQTTQKGQKNSRERMKRIEEGIKELGSQILKEHPVENTQLQNEKLYLYYLQNGRDMYVDQELDINRLSDYDVDHIVPQSFLKDDSIDNKVLTRSDKARGKSDNVPSEEVVKKMKNYWRQLLNAKLITQRKFDNLTKAERGGLSELDKAGFIKRQLVETRQITKHVAQILDSRMNTKYDENDKLIREVKVITLKSKLVSDFRKDFQFYKVREINNYHHAHDAYLNAVVGTALIKKYPKLESEFVYGDYKVYDVRKMIAKSEQEIGKATAKYFFYSNIMNFFKTEITLANGEIRKRPLIETNGETGEIVWDKGRDFATVRKVLSMPQVNIVKKTEVQTGGFSKESILPKRNSDKLIARKKDWDPKKYGGFDSPTVAYSVLVVAKVEKGKSKKLKSVKELLGITIMERSSFEKNPIDFLEAKGYKEVKKDLIIKLPKYSLFELENGRKRMLASAGELQKGNELALPSKYVNFLYLASHYEKLKGSPEDNEQKQLFVEQHKHYLDEIIEQISEFSKRVILADANLDKVLSAYNKHRDKPIREQAENIIHLFTLTNLGAPAAFKYFDTTIDRKRYTSTKEVLDATLIHQSITGLYETRIDLSQLGGDGGPAPAPAPAPAPGGMDPLQLLQPLEAEIKGTKLKAHWNSGATITCVPEAFLEDERPIQTMLIKTIHGEKQQDVYYLTFKVQGRKVEAEVLASPYDYILLNPSDVPWLMKKPLQLTVLVPLHEYQERLLQQTALPKEQKELLQKLFLKYDALWQHWENQVGHRRIKPHNIATGTLAPRPQKQYPINPKAKPSIQIVIDDLLKQGVLIQQNSTMNTPVYPVPKPDGKWRMVLDYREVNKTIPLIAAQNQHSAGILSSIYRGKYKTTLDLTNGFWAHPITPESYWLTAFTWQGKQYCWTRLPQGFLNSPALFNADVVDLLKEIPNVQAYVDDIYISHDDPQEHLEQLEKIFSILLNAGYVVSLKKSEIAQREVEFLGFNITKEGRGLTDTFKQKLLNITPPKDLKQLQSILGLLNFARNFIPNYSELVKPLYTIVAPANGKFISWTEDNSNQLQHIISVLNQADNLEERNPETRLIIKVNSSPSAGYIRYYNEGSKRPIMYVNYIFSKAEAKFTQTEKLLTTMHKGLIKAMDLAMGQEILVYSPIVSMTKIQRTPLPERKALPVRWITWMTYLEDPRIQFHYDKSLPELQQIPNVTEDVIAKTKHPSEFAMVFYTDGSAIKHPDVNKSHSAGMGIAQVQFIPEYKIVHQWSIPLGDHTAQLAEIAAVEFACKKALKISGPVLIVTDSFYVAESANKELPYWKSNGFLNNKKKPLRHVSKWKSIAECLQLKPDIIIMHEKGHQQPMTTLHTEGNNLADKLATQGSYVVHAGKRTADGSEFEKRTADGSEFESPKKKAKVE

SEQ ID NO: 6548 - protein, 2176 aa, synthetic construct
MPAAKRVKLDGGDKKYSIGLDIGTNSVGWAVITDEYKVPSKKFKVLGNTDRHSIKKNLIGALLFDSGETAEATRLKRTARRRYTRRKNRICYLQEIFSNEMAKVDDSFFHRLEESFLVEEDKKHERHPIFGNIVDEVAYHEKYPTIYHLRKKLVDSTDKADLRLIYLALAHMIKFRGHFLIEGDLNPDNSDVDKLFIQLVQTYNQLFEENPINASGVDAKAILSARLSKSRRLENLIAQLPGEKKNGLFGNLIALSLGLTPNFKSNFDLAEDAKLQLSKDTYDDDLDNLLAQIGDQYADLFLAAKNLSDAILLSDILRVNTEITKAPLSASMIKRYDEHHQDLTLLKALVRQQLPEKYKEIFFDQSKNGYAGYIDGGASQEEFYKFIKPILEKMDGTEELLVKLNREDLLRKQRTFDNGSIPHQIHLGELHAILRRQEDFYPFLKDNREKIEKILTFRIPYYVGPLARGNSRFAWMTRKSEETITPWNFEEVVDKGASAQSFIERMTNFDKNLPNEKVLPKHSLLYEYFTVYNELTKVKYVTEGMRKPAFLSGEQKKAIVDLLFKTNRKVTVKQLKEDYFKKIECFDSVEISGVEDRFNASLGTYHDLLKIIKDKDFLDNEENEDILEDIVLTLTLFEDREMIEERLKTYAHLFDDKVMKQLKRRRYTGWGRLSRKLINGIRDKQSGKTILDFLKSDGFANRNFMQLIHDDSLTFKEDIQKAQVSGQGDSLHEHIANLAGSPAIKKGILQTVKVVDELVKVMGRHKPENIVIEMARENQTTQKGQKNSRERMKRIEEGIKELGSQILKEHPVENTQLQNEKLYLYYLQNGRDMYVDQELDINRLSDYDVDHIVPQSFLKDDSIDNKVLTRSDKARGKSDNVPSEEVVKKMKNYWRQLLNAKLITQRKFDNLTKAERGGLSELDKAGFIKRQLVETRQITKHVAQILDSRMNTKYDENDKLIREVKVITLKSKLVSDFRKDFQFYKVREINNYHHAHDAYLNAVVGTALIKKYPKLESEFVYGDYKVYDVRKMIAKSEQEIGKATAKYFFYSNIMNFFKTEITLANGEIRKRPLIETNGETGEIVWDKGRDFATVRKVLSMPQVNIVKKTEVQTGGFSKESILPKRNSDKLIARKKDWDPKKYGGFDSPTVAYSVLVVAKVEKGKSKKLKSVKELLGITIMERSSFEKNPIDFLEAKGYKEVKKDLIIKLPKYSLFELENGRKRMLASAGELQKGNELALPSKYVNFLYLASHYEKLKGSPEDNEQKQLFVEQHKHYLDEIIEQISEFSKRVILADANLDKVLSAYNKHRDKPIREQAENIIHLFTLTNLGAPAAFKYFDTTIDRKRYTSTKEVLDATLIHQSITGLYETRIDLSQLGGDGGPAPAPAPAPAPGGMDPLQLLQPLEAEIKGTKLKAHWNSGATITCVPQAFLEEEVPIKNIWIKTIHGEKEQPVYYLTFKIQGRKVEAEVISSPYDYILVSPSDIPWLMKKPLQLTTLVPLQEYEERLLKQTMLTGSYKEKLQSLFLKYDALWQHWENQVGHRRIKPHHIATGTVNPRPQKQYPINPKAKASIQTVINDLLKQGVLIQQNSIMNTPVYPVPKPDGKWRMVLDYREVNKTIPLIAAQNQHSAGILSSIFRGKYKTTLDLSNGFWAHSITPESYWLTAFTWLGQQYCWTRLPQGFLNSPALFNADVVDLLKEVPNVQVYVDDIYISHDDPREHLEQLEKVFSLLLNAGYVVSLKKSEIAQHEVEFLGFNITKEGRGLTETFKQKLLNITPPRDLKQLQSILGLLNFARNFIPNFSELVKPLYNIIATAPGKYITWTTDNSQQLQNIISMLNSAENLEERNPEVRLIMKVNTSPSAGYIRFYNEFAKRPIMYLNYVYTKAEVKFTNTEKLLTTIHKGLIKALDLGMGQEILVYSPIVSMTKIQKTPLPERKALPIRWITWMSYLEDPRIQFHYDKTLPELQQVPTVTDDIIAKIKHPSEFSMVFYTDGSAIKHPNVNKSHNAGMGIAQVQFKPEFTVINTWSIPLGDHTAQLAEVAAVEFACKKALKIDGPVLIVTDSFYVAESVNKELPYWQSNGFFNNKKKPLKHVSKWKSIADCIQLKPDIIIIHEKGHQPTASTFHTEGNNLADKLATQGSYVVNAGKRTADGSEFEKRTADGSEFESPKKKAKVE

SEQ ID NO: 6549 - protein, 2094 aa, synthetic construct
MPAAKRVKLDGGDKKYSIGLDIGTNSVGWAVITDEYKVPSKKFKVLGNTDRHSIKKNLIGALLFDSGETAEATRLKRTARRRYTRRKNRICYLQEIFSNEMAKVDDSFFHRLEESFLVEEDKKHERHPIFGNIVDEVAYHEKYPTIYHLRKKLVDSTDKADLRLIYLALAHMIKFRGHFLIEGDLNPDNSDVDKLFIQLVQTYNQLFEENPINASGVDAKAILSARLSKSRRLENLIAQLPGEKKNGLFGNLIALSLGLTPNFKSNFDLAEDAKLQLSKDTYDDDLDNLLAQIGDQYADLFLAAKNLSDAILLSDILRVNTEITKAPLSASMIKRYDEHHQDLTLLKALVRQQLPEKYKEIFFDQSKNGYAGYIDGGASQEEFYKFIKPILEKMDGTEELLVKLNREDLLRKQRTFDNGSIPHQIHLGELHAILRRQEDFYPFLKDNREKIEKILTFRIPYYVGPLARGNSRFAWMTRKSEETITPWNFEEVVDKGASAQSFIERMTNFDKNLPNEKVLPKHSLLYEYFTVYNELTKVKYVTEGMRKPAFLSGEQKKAIVDLLFKTNRKVTVKQLKEDYFKKIECFDSVEISGVEDRFNASLGTYHDLLKIIKDKDFLDNEENEDILEDIVLTLTLFEDREMIEERLKTYAHLFDDKVMKQLKRRRYTGWGRLSRKLINGIRDKQSGKTILDFLKSDGFANRNFMQLIHDDSLTFKEDIQKAQVSGQGDSLHEHIANLAGSPAIKKGILQTVKVVDELVKVMGRHKPENIVIEMARENQTTQKGQKNSRERMKRIEEGIKELGSQILKEHPVENTQLQNEKLYLYYLQNGRDMYVDQELDINRLSDYDVDHIVPQSFLKDDSIDNKVLTRSDKARGKSDNVPSEEVVKKMKNYWRQLLNAKLITQRKFDNLTKAERGGLSELDKAGFIKRQLVETRQITKHVAQILDSRMNTKYDENDKLIREVKVITLKSKLVSDFRKDFQFYKVREINNYHHAHDAYLNAVVGTALIKKYPKLESEFVYGDYKVYDVRKMIAKSEQEIGKATAKYFFYSNIMNFFKTEITLANGEIRKRPLIETNGETGEIVWDKGRDFATVRKVLSMPQVNIVKKTEVQTGGFSKESILPKRNSDKLIARKKDWDPKKYGGFDSPTVAYSVLVVAKVEKGKSKKLKSVKELLGITIMERSSFEKNPIDFLEAKGYKEVKKDLIIKLPKYSLFELENGRKRMLASAGELQKGNELALPSKYVNFLYLASHYEKLKGSPEDNEQKQLFVEQHKHYLDEIIEQISEFSKRVILADANLDKVLSAYNKHRDKPIREQAENIIHLFTLTNLGAPAAFKYFDTTIDRKRYTSTKEVLDATLIHQSITGLYETRIDLSQLGGDGGPAPAPAPAPAPGGVLNLEEEYRLHEKPVPSSIDPSWLQLFPTVWAERAGMGLANQVPPVVVELRSGASPVAVRQYPMSKEAREGIRPHIQRFLDLGVLVPCQSPWNTPLLPVKKPGTNDYRPVQDLREINKRVQDIHPTVPNPYNLLSSLPPSHTWYSVLDLKDAFFCLKLHPNSQPLFAFEWRDPEKGNTGQLTWTRLPQGFKNSPTLFNEALHRDLAPFRALNPQVVLLQYVDDLLVAAPTYRDCKEGTQKLLQELSKLGYRVSAKKAQLCQKEVTYLGYLLKEGKRWLTPARKATVMKIPPPTTPRQVREFLGKAGFCRLFIPGFASLAAPLYPLTKPSIPFIWTEEHQKAFDRIKEALLSAPALALPDLTKPFTLYVDERAGVARGVLTQTLGPWRRPVAYLSKKLDPVASGWPTCLKAVAAVALLLKDADKLTLGQNVTVIASHSLESIVRQPPDRWMTNARMTHYQSLLLNERVSFAPPAVLNPATLLPVESEATPVHRCSEILAEETGTRRDLKDQPLPGVPAWYTDGSSFIAEGKRRAGAAIVDGKRTVWASSLPEGTSAQKAELVALTQALRLAEGKDINIYTDSRYAFATAHIHGAIYKQRGWLTSAGKDIKNKEEILALLEAIHLPKRVAIIHCPGHQKGNDPVATGNRRADEAAKQAALSTRVLAETTKPAGKRTADGSEFEKRTADGSEFESPKKKAKVE

SEQ ID NO: 6550 - protein, 2096 aa, synthetic construct
MPAAKRVKLDGGDKKYSIGLDIGTNSVGWAVITDEYKVPSKKFKVLGNTDRHSIKKNLIGALLFDSGETAEATRLKRTARRRYTRRKNRICYLQEIFSNEMAKVDDSFFHRLEESFLVEEDKKHERHPIFGNIVDEVAYHEKYPTIYHLRKKLVDSTDKADLRLIYLALAHMIKFRGHFLIEGDLNPDNSDVDKLFIQLVQTYNQLFEENPINASGVDAKAILSARLSKSRRLENLIAQLPGEKKNGLFGNLIALSLGLTPNFKSNFDLAEDAKLQLSKDTYDDDLDNLLAQIGDQYADLFLAAKNLSDAILLSDILRVNTEITKAPLSASMIKRYDEHHQDLTLLKALVRQQLPEKYKEIFFDQSKNGYAGYIDGGASQEEFYKFIKPILEKMDGTEELLVKLNREDLLRKQRTFDNGSIPHQIHLGELHAILRRQEDFYPFLKDNREKIEKILTFRIPYYVGPLARGNSRFAWMTRKSEETITPWNFEEVVDKGASAQSFIERMTNFDKNLPNEKVLPKHSLLYEYFTVYNELTKVKYVTEGMRKPAFLSGEQKKAIVDLLFKTNRKVTVKQLKEDYFKKIECFDSVEISGVEDRFNASLGTYHDLLKIIKDKDFLDNEENEDILEDIVLTLTLFEDREMIEERLKTYAHLFDDKVMKQLKRRRYTGWGRLSRKLINGIRDKQSGKTILDFLKSDGFANRNFMQLIHDDSLTFKEDIQKAQVSGQGDSLHEHIANLAGSPAIKKGILQTVKVVDELVKVMGRHKPENIVIEMARENQTTQKGQKNSRERMKRIEEGIKELGSQILKEHPVENTQLQNEKLYLYYLQNGRDMYVDQELDINRLSDYDVDHIVPQSFLKDDSIDNKVLTRSDKARGKSDNVPSEEVVKKMKNYWRQLLNAKLITQRKFDNLTKAERGGLSELDKAGFIKRQLVETRQITKHVAQILDSRMNTKYDENDKLIREVKVITLKSKLVSDFRKDFQFYKVREINNYHHAHDAYLNAVVGTALIKKYPKLESEFVYGDYKVYDVRKMIAKSEQEIGKATAKYFFYSNIMNFFKTEITLANGEIRKRPLIETNGETGEIVWDKGRDFATVRKVLSMPQVNIVKKTEVQTGGFSKESILPKRNSDKLIARKKDWDPKKYGGFDSPTVAYSVLVVAKVEKGKSKKLKSVKELLGITIMERSSFEKNPIDFLEAKGYKEVKKDLIIKLPKYSLFELENGRKRMLASAGELQKGNELALPSKYVNFLYLASHYEKLKGSPEDNEQKQLFVEQHKHYLDEIIEQISEFSKRVILADANLDKVLSAYNKHRDKPIREQAENIIHLFTLTNLGAPAAFKYFDTTIDRKRYTSTKEVLDATLIHQSITGLYETRIDLSQLGGDGGPAPAPAPAPAPGGTLNIEDEYRLHETSKEPDVPLGSTWLSDFPQAWAETGGMGLAVRQAPLIIPLKATSTPVSIKQYPMSQEARLGIKPHIQRLLDQGILVPCQSPWNTPLLPVKKPGTNDYRPVQDLREVNKRVEDIHPTVPNPYNLLSGLPPSHQWYTVLDLKDAFFCLRLHPTSQPLFAFEWRDPEMGISGQLTWTRLPQGFKNSPTLFDEALHRDLADFRIQHPDLILLQYVDDLLLAATSEQDCQRGTRALLQTLGNLGYRASAKKAQICQKQVKYLGYLLKEGQRWLTEARKETVMGQPTPKTPRQLREFLGTAGFCRLWIPGFAEMAAPLYPLTKTGTLFNWGPDQQKAYQEIKQALLTAPALGLPDLTKPFELFVDEKQGYAKGVLTQKLGPWRRPVAYLSKKLDPVAAGWPPCLRMVAAIAVLTKDAGKLTMGQPLVILAPHAVEALVKQPPDRWLSNARMTHYQAMLLDTDRVQFGPVVALNPATLLPLPEKEAPHDCLEILAETHGTRPDLTDQPIPDADYTWYTDGSSFLQEGQRRAGAAVTTETEVIWARALPAGTSAQRAELIALTQALKMAEGKKLNVYTDSRYAFATAHVHGEIYRRRGLLTSEGREIKNKNEILALLKALFLPKRLSIIHCPGHQKGNSAEARGNRMADQAAREAAMKAVLETSTLLAGKRTADGSEFEKRTADGSEFESPKKKAKVE

SEQ ID NO: 6551 - protein, 2096 aa, synthetic construct
MPAAKRVKLDGGDKKYSIGLDIGTNSVGWAVITDEYKVPSKKFKVLGNTDRHSIKKNLIGALLFDSGETAEATRLKRTARRRYTRRKNRICYLQEIFSNEMAKVDDSFFHRLEESFLVEEDKKHERHPIFGNIVDEVAYHEKYPTIYHLRKKLVDSTDKADLRLIYLALAHMIKFRGHFLIEGDLNPDNSDVDKLFIQLVQTYNQLFEENPINASGVDAKAILSARLSKSRRLENLIAQLPGEKKNGLFGNLIALSLGLTPNFKSNFDLAEDAKLQLSKDTYDDDLDNLLAQIGDQYADLFLAAKNLSDAILLSDILRVNTEITKAPLSASMIKRYDEHHQDLTLLKALVRQQLPEKYKEIFFDQSKNGYAGYIDGGASQEEFYKFIKPILEKMDGTEELLVKLNREDLLRKQRTFDNGSIPHQIHLGELHAILRRQEDFYPFLKDNREKIEKILTFRIPYYVGPLARGNSRFAWMTRKSEETITPWNFEEVVDKGASAQSFIERMTNFDKNLPNEKVLPKHSLLYEYFTVYNELTKVKYVTEGMRKPAFLSGEQKKAIVDLLFKTNRKVTVKQLKEDYFKKIECFDSVEISGVEDRFNASLGTYHDLLKIIKDKDFLDNEENEDILEDIVLTLTLFEDREMIEERLKTYAHLFDDKVMKQLKRRRYTGWGRLSRKLINGIRDKQSGKTILDFLKSDGFANRNFMQLIHDDSLTFKEDIQKAQVSGQGDSLHEHIANLAGSPAIKKGILQTVKVVDELVKVMGRHKPENIVIEMARENQTTQKGQKNSRERMKRIEEGIKELGSQILKEHPVENTQLQNEKLYLYYLQNGRDMYVDQELDINRLSDYDVDHIVPQSFLKDDSIDNKVLTRSDKARGKSDNVPSEEVVKKMKNYWRQLLNAKLITQRKFDNLTKAERGGLSELDKAGFIKRQLVETRQITKHVAQILDSRMNTKYDENDKLIREVKVITLKSKLVSDFRKDFQFYKVREINNYHHAHDAYLNAVVGTALIKKYPKLESEFVYGDYKVYDVRKMIAKSEQEIGKATAKYFFYSNIMNFFKTEITLANGEIRKRPLIETNGETGEIVWDKGRDFATVRKVLSMPQVNIVKKTEVQTGGFSKESILPKRNSDKLIARKKDWDPKKYGGFDSPTVAYSVLVVAKVEKGKSKKLKSVKELLGITIMERSSFEKNPIDFLEAKGYKEVKKDLIIKLPKYSLFELENGRKRMLASAGELQKGNELALPSKYVNFLYLASHYEKLKGSPEDNEQKQLFVEQHKHYLDEIIEQISEFSKRVILADANLDKVLSAYNKHRDKPIREQAENIIHLFTLTNLGAPAAFKYFDTTIDRKRYTSTKEVLDATLIHQSITGLYETRIDLSQLGGDGGPAPAPAPAPAPGGTLNIEDEYRLHETSKEPDVPLGSTWLSDFPQAWAETGGMGLAVRQAPLIIPLKATSTPVSIKQYPMSQEARLGIKPHIQRLLDQGILVPCQSPWNTPLLPVKKPGTNDYRPVQDLREVNKRVEDIHPTVPNPYNLLSGLPPSHQWYTVLDLKDAFFCLRLHPTSQPLFAFEWRDPEMGISGQLTWTRLPQGFKNSPTLFNEALHRDLADFRIQHPDLILLQYVDDLLLAATSEQDCQRGTRALLQTLGNLGYRASAKKAQICQKQVKYLGYLLKEGQRWLTEARKETVMGQPTPKTPRQLREFLGTAGFCRLWIPGFAEMAAPLYPLTKPGTLFNWGPDQQKAYQEIKQALLTAPALGLPDLTKPFELFVDEKQGYAKGVLTQKLGPWRRPVAYLSKKLDPVAAGWPPCLRMVAAIAVLTKDAGKLTMGQPLVILAPHAVEALVKQPPDRWLSNARMTHYQAMLLDTDRVQFGPVVALNPATLLPLPEKEAPHDCLEILAETHGTRPDLTDQPIPDADYTWYTDGSSFLQEGQRRAGAAVTTETEVIWARALPAGTSAQRAELIALTQALKMAEGKKLNVYTDSRYAFATAHVHGEIYRRRGWLTSEGREIKNKNEILALLKALFLPKRLSIIHCPGHQKGNSAEARGNRMADQAAREAAMKAVLETSTLLAGKRTADGSEFEKRTADGSEFESPKKKAKVE

SEQ ID NO: 6552 - protein, 2100 aa, synthetic construct
MPAAKRVKLDGGDKKYSIGLDIGTNSVGWAVITDEYKVPSKKFKVLGNTDRHSIKKNLIGALLFDSGETAEATRLKRTARRRYTRRKNRICYLQEIFSNEMAKVDDSFFHRLEESFLVEEDKKHERHPIFGNIVDEVAYHEKYPTIYHLRKKLVDSTDKADLRLIYLALAHMIKFRGHFLIEGDLNPDNSDVDKLFIQLVQTYNQLFEENPINASGVDAKAILSARLSKSRRLENLIAQLPGEKKNGLFGNLIALSLGLTPNFKSNFDLAEDAKLQLSKDTYDDDLDNLLAQIGDQYADLFLAAKNLSDAILLSDILRVNTEITKAPLSASMIKRYDEHHQDLTLLKALVRQQLPEKYKEIFFDQSKNGYAGYIDGGASQEEFYKFIKPILEKMDGTEELLVKLNREDLLRKQRTFDNGSIPHQIHLGELHAILRRQEDFYPFLKDNREKIEKILTFRIPYYVGPLARGNSRFAWMTRKSEETITPWNFEEVVDKGASAQSFIERMTNFDKNLPNEKVLPKHSLLYEYFTVYNELTKVKYVTEGMRKPAFLSGEQKKAIVDLLFKTNRKVTVKQLKEDYFKKIECFDSVEISGVEDRFNASLGTYHDLLKIIKDKDFLDNEENEDILEDIVLTLTLFEDREMIEERLKTYAHLFDDKVMKQLKRRRYTGWGRLSRKLINGIRDKQSGKTILDFLKSDGFANRNFMQLIHDDSLTFKEDIQKAQVSGQGDSLHEHIANLAGSPAIKKGILQTVKVVDELVKVMGRHKPENIVIEMARENQTTQKGQKNSRERMKRIEEGIKELGSQILKEHPVENTQLQNEKLYLYYLQNGRDMYVDQELDINRLSDYDVDHIVPQSFLKDDSIDNKVLTRSDKARGKSDNVPSEEVVKKMKNYWRQLLNAKLITQRKFDNLTKAERGGLSELDKAGFIKRQLVETRQITKHVAQILDSRMNTKYDENDKLIREVKVITLKSKLVSDFRKDFQFYKVREINNYHHAHDAYLNAVVGTALIKKYPKLESEFVYGDYKVYDVRKMIAKSEQEIGKATAKYFFYSNIMNFFKTEITLANGEIRKRPLIETNGETGEIVWDKGRDFATVRKVLSMPQVNIVKKTEVQTGGFSKESILPKRNSDKLIARKKDWDPKKYGGFDSPTVAYSVLVVAKVEKGKSKKLKSVKELLGITIMERSSFEKNPIDFLEAKGYKEVKKDLIIKLPKYSLFELENGRKRMLASAGELQKGNELALPSKYVNFLYLASHYEKLKGSPEDNEQKQLFVEQHKHYLDEIIEQISEFSKRVILADANLDKVLSAYNKHRDKPIREQAENIIHLFTLTNLGAPAAFKYFDTTIDRKRYTSTKEVLDATLIHQSITGLYETRIDLSQLGGDGGPAPAPAPAPAPAPGGTAPLEEEYRLFLEAPIQNVTLLEQWKREIPKVWAEINPPGLASTQAPIHVQLLSTALPVRVRQYPITLEAKRSLRETIRKFRAAGILRPVHSPWNTPLLPVRKSGTSEYRMVQDLREVNKRVETIHPTVPNPYTLLSLLPPDRIWYSVLDLKDAFFCIPLAPESQLIFAFEWADAEEGESGQLTWTRLPQGFKNSPTLFDEALNRDLQGFRLDHPSVSLLQYVDDLLIAADTQAACLSATRDLLMTLAELGYRVSGKKAQLCQEEVTYLGFKIHKGSRSLSNSRTQAILQIPVPKTKRQVREFLGTIGYCRLWIPGFAELAQPLYAATRGGNDPLVWGEKEEEAFQSLKLALTQPPALALPSLDKPFQLFVEETSGAAKGVLTQALGPWKRPVAYLSKRLDPVAAGWPRCLRAIAAAALLTREASKLTFGQDIEITSSHNLESLLRSPPDKWLTNARITQYQVLLLDPPRVRFKQTAALNPATLLPETDDTLPIHHCLDTLDSLTSTRPDLTDQPLAQAEATLFTDGSSYIRDGKRYAGAAVVTLDSVIWAEPLPIGTSAQKAELIALTKALEWSKDKSVNIYTDSRYAFATLHVHGMIYRERGLLTAGGKAIKNAPEILALLTAVWLPKRVAVMHCKGHQKDDAPTSTGNRRADEVAREVAIRPLSTQATISAGKRTADGSEFEKRTADGSEFESPKKKAKVE

SEQ ID NO: 6553 - protein, 2175 aa, synthetic construct
MPAAKRVKLDGGDKKYSIGLDIGTNSVGWAVITDEYKVPSKKFKVLGNTDRHSIKKNLIGALLFDSGETAEATRLKRTARRRYTRRKNRICYLQEIFSNEMAKVDDSFFHRLEESFLVEEDKKHERHPIFGNIVDEVAYHEKYPTIYHLRKKLVDSTDKADLRLIYLALAHMIKFRGHFLIEGDLNPDNSDVDKLFIQLVQTYNQLFEENPINASGVDAKAILSARLSKSRRLENLIAQLPGEKKNGLFGNLIALSLGLTPNFKSNFDLAEDAKLQLSKDTYDDDLDNLLAQIGDQYADLFLAAKNLSDAILLSDILRVNTEITKAPLSASMIKRYDEHHQDLTLLKALVRQQLPEKYKEIFFDQSKNGYAGYIDGGASQEEFYKFIKPILEKMDGTEELLVKLNREDLLRKQRTFDNGSIPHQIHLGELHAILRRQEDFYPFLKDNREKIEKILTFRIPYYVGPLARGNSRFAWMTRKSEETITPWNFEEVVDKGASAQSFIERMTNFDKNLPNEKVLPKHSLLYEYFTVYNELTKVKYVTEGMRKPAFLSGEQKKAIVDLLFKTNRKVTVKQLKEDYFKKIECFDSVEISGVEDRFNASLGTYHDLLKIIKDKDFLDNEENEDILEDIVLTLTLFEDREMIEERLKTYAHLFDDKVMKQLKRRRYTGWGRLSRKLINGIRDKQSGKTILDFLKSDGFANRNFMQLIHDDSLTFKEDIQKAQVSGQGDSLHEHIANLAGSPAIKKGILQTVKVVDELVKVMGRHKPENIVIEMARENQTTQKGQKNSRERMKRIEEGIKELGSQILKEHPVENTQLQNEKLYLYYLQNGRDMYVDQELDINRLSDYDVDHIVPQSFLKDDSIDNKVLTRSDKARGKSDNVPSEEVVKKMKNYWRQLLNAKLITQRKFDNLTKAERGGLSELDKAGFIKRQLVETRQITKHVAQILDSRMNTKYDENDKLIREVKVITLKSKLVSDFRKDFQFYKVREINNYHHAHDAYLNAVVGTALIKKYPKLESEFVYGDYKVYDVRKMIAKSEQEIGKATAKYFFYSNIMNFFKTEITLANGEIRKRPLIETNGETGEIVWDKGRDFATVRKVLSMPQVNIVKKTEVQTGGFSKESILPKRNSDKLIARKKDWDPKKYGGFDSPTVAYSVLVVAKVEKGKSKKLKSVKELLGITIMERSSFEKNPIDFLEAKGYKEVKKDLIIKLPKYSLFELENGRKRMLASAGELQKGNELALPSKYVNFLYLASHYEKLKGSPEDNEQKQLFVEQHKHYLDEIIEQISEFSKRVILADANLDKVLSAYNKHRDKPIREQAENIIHLFTLTNLGAPAAFKYFDTTIDRKRYTSTKEVLDATLIHQSITGLYETRIDLSQLGGDGGPAPAPAPAPAPAPGGMDLLKPLTVERKGVKIKGYWNSQADITCVPKDLLQGEEPVRQQNVTTIHGTQEGDVYYVNLKIDGRRINTEVIGTTLDYAIITPGDVPWILKKPLELTIKLDLEEQQGTLLNNSILSKKGKEELKQLFEKYSALWQSWENQVGHRRIRPHKIATGTVKPTPQKQYHINPKAKPDIQIVINDLLKQGVLIQKESTMNTPVYPVPKPNGRWRMVLDYRAVNKVTPLIAVQNQHSYGILGSLFKGRYKTTIDLSNGFWAHPIVPEDYWITAFTWQGKQYCWTVLPQGFLNSPGLFNGDVVDLLQGIPNVEVYVDDVYISHDSEKEHLEYLDILFNRLKEAGYIISLKKSNIANSIVDFLGFQITNEGRGLTDTFKEKLENITAPTTLKQLQSILGLLNFARNFIPDFTELIAPLYALIPKSPKNYVPWQIEHSTTLETLITKLNGAEYLQGRKGDKTLIMKVNASYTTGYIRYYNEGEKKPISYVSIVFSKTELKFTELEKLLTTVHKGLLKALDLSMGQNIHVYSPIVSMQNIQKTPQTAKKALASRWLSWLSYLEDPRIRFFYDPQMPALKDLPAVDTGKDNKKHPSNFQHIFYTDGSAITSPTKEGHLNAGMGIVYFINKDGNLQKQQEWSISLGNHTAQFAEIAAFEFALKKCLPLGGNILVVTDSNYVAKAYNEELDVWASNGFVNNRKKPLKHISKWKSVADLKRLRPDVVVTHEPGHQKLDSSPHAYGNNLADQLATQASFKVHAGKRTADGSEFEKRTADGSEFESPKKKAKVE

SEQ ID NO: 6554 - protein, 2175 aa, synthetic construct
MPAAKRVKLDGGDKKYSIGLDIGTNSVGWAVITDEYKVPSKKFKVLGNTDRHSIKKNLIGALLFDSGETAEATRLKRTARRRYTRRKNRICYLQEIFSNEMAKVDDSFFHRLEESFLVEEDKKHERHPIFGNIVDEVAYHEKYPTIYHLRKKLVDSTDKADLRLIYLALAHMIKFRGHFLIEGDLNPDNSDVDKLFIQLVQTYNQLFEENPINASGVDAKAILSARLSKSRRLENLIAQLPGEKKNGLFGNLIALSLGLTPNFKSNFDLAEDAKLQLSKDTYDDDLDNLLAQIGDQYADLFLAAKNLSDAILLSDILRVNTEITKAPLSASMIKRYDEHHQDLTLLKALVRQQLPEKYKEIFFDQSKNGYAGYIDGGASQEEFYKFIKPILEKMDGTEELLVKLNREDLLRKQRTFDNGSIPHQIHLGELHAILRRQEDFYPFLKDNREKIEKILTFRIPYYVGPLARGNSRFAWMTRKSEETITPWNFEEVVDKGASAQSFIERMTNFDKNLPNEKVLPKHSLLYEYFTVYNELTKVKYVTEGMRKPAFLSGEQKKAIVDLLFKTNRKVTVKQLKEDYFKKIECFDSVEISGVEDRFNASLGTYHDLLKIIKDKDFLDNEENEDILEDIVLTLTLFEDREMIEERLKTYAHLFDDKVMKQLKRRRYTGWGRLSRKLINGIRDKQSGKTILDFLKSDGFANRNFMQLIHDDSLTFKEDIQKAQVSGQGDSLHEHIANLAGSPAIKKGILQTVKVVDELVKVMGRHKPENIVIEMARENQTTQKGQKNSRERMKRIEEGIKELGSQILKEHPVENTQLQNEKLYLYYLQNGRDMYVDQELDINRLSDYDVDHIVPQSFLKDDSIDNKVLTRSDKARGKSDNVPSEEVVKKMKNYWRQLLNAKLITQRKFDNLTKAERGGLSELDKAGFIKRQLVETRQITKHVAQILDSRMNTKYDENDKLIREVKVITLKSKLVSDFRKDFQFYKVREINNYHHAHDAYLNAVVGTALIKKYPKLESEFVYGDYKVYDVRKMIAKSEQEIGKATAKYFFYSNIMNFFKTEITLANGEIRKRPLIETNGETGEIVWDKGRDFATVRKVLSMPQVNIVKKTEVQTGGFSKESILPKRNSDKLIARKKDWDPKKYGGFDSPTVAYSVLVVAKVEKGKSKKLKSVKELLGITIMERSSFEKNPIDFLEAKGYKEVKKDLIIKLPKYSLFELENGRKRMLASAGELQKGNELALPSKYVNFLYLASHYEKLKGSPEDNEQKQLFVEQHKHYLDEIIEQISEFSKRVILADANLDKVLSAYNKHRDKPIREQAENIIHLFTLTNLGAPAAFKYFDTTIDRKRYTSTKEVLDATLIHQSITGLYETRIDLSQLGGDGGPAPAPAPAPAPAPGGMDLLKPLTVERKGVKIKGYWNSQADITCVPKDLLQGEEPVRQQNVTTIHGTQEGDVYYVNLKIDGRRINTEVIGTTLDYAIITPGDVPWILKKPLELTIKLDLEEQQGTLLNNSILSKKGKEELKQLFEKYSALWQSWENQVGHRRIRPHKIATGTVKPTPQKQYHINPKAKPDIQIVINDLLKQGVLIQKESTMNTPVYPVPKPNGRWRMVLDYRAVNKVTPLIAVQNQHSYGILGSLFKGRYKTTIDLSNGFWAHPIVPEDYWITAFTWQGKQYCWTVLPQGFLNSPGLFNGDVVDLLQGIPNVEVYVDDVYISHDSEKEHLEYLDILFNRLKEAGYIISLKKSNIANSIVDFLGFQITNEGRGLTDTFKEKLENITAPTTLKQLQSILGKLNFARNFIPDFTELIAPLYALIPKSPKNYVPWQIEHSTTLETLITKLNGAEYLQGRKGDKTLIMKVNASYTTGYIRYYNEGEKKPISYVSIVFSKTELKFTELEKLLTTVHKGLLKALDLSMGQNIHVYSPIVSMQNIQKTPQTAKKALASRWLSWLSYLEDPRIRFFYDPQMPALKDLPAVDTGKDNKKHPSNFQHIFYTDGSAITSPTKEGHLNAGMGIVYFINKDGNLQKQQEWSISLGNHTAQFAEIAAFEFALKKCLPLGGNILVVTDSNYVAKAYNEELDVWASNGFVNNRKKPLKHISKWKSVADLKRLRPDVVVTHEPGHQKLDSSPHAYGNNLADQLATQASFKVHAGKRTADGSEFEKRTADGSEFESPKKKAKVE

SEQ ID NO: 6555 - protein, 2097 aa, synthetic construct
MPAAKRVKLDGGDKKYSIGLDIGTNSVGWAVITDEYKVPSKKFKVLGNTDRHSIKKNLIGALLFDSGETAEATRLKRTARRRYTRRKNRICYLQEIFSNEMAKVDDSFFHRLEESFLVEEDKKHERHPIFGNIVDEVAYHEKYPTIYHLRKKLVDSTDKADLRLIYLALAHMIKFRGHFLIEGDLNPDNSDVDKLFIQLVQTYNQLFEENPINASGVDAKAILSARLSKSRRLENLIAQLPGEKKNGLFGNLIALSLGLTPNFKSNFDLAEDAKLQLSKDTYDDDLDNLLAQIGDQYADLFLAAKNLSDAILLSDILRVNTEITKAPLSASMIKRYDEHHQDLTLLKALVRQQLPEKYKEIFFDQSKNGYAGYIDGGASQEEFYKFIKPILEKMDGTEELLVKLNREDLLRKQRTFDNGSIPHQIHLGELHAILRRQEDFYPFLKDNREKIEKILTFRIPYYVGPLARGNSRFAWMTRKSEETITPWNFEEVVDKGASAQSFIERMTNFDKNLPNEKVLPKHSLLYEYFTVYNELTKVKYVTEGMRKPAFLSGEQKKAIVDLLFKTNRKVTVKQLKEDYFKKIECFDSVEISGVEDRFNASLGTYHDLLKIIKDKDFLDNEENEDILEDIVLTLTLFEDREMIEERLKTYAHLFDDKVMKQLKRRRYTGWGRLSRKLINGIRDKQSGKTILDFLKSDGFANRNFMQLIHDDSLTFKEDIQKAQVSGQGDSLHEHIANLAGSPAIKKGILQTVKVVDELVKVMGRHKPENIVIEMARENQTTQKGQKNSRERMKRIEEGIKELGSQILKEHPVENTQLQNEKLYLYYLQNGRDMYVDQELDINRLSDYDVDHIVPQSFLKDDSIDNKVLTRSDKARGKSDNVPSEEVVKKMKNYWRQLLNAKLITQRKFDNLTKAERGGLSELDKAGFIKRQLVETRQITKHVAQILDSRMNTKYDENDKLIREVKVITLKSKLVSDFRKDFQFYKVREINNYHHAHDAYLNAVVGTALIKKYPKLESEFVYGDYKVYDVRKMIAKSEQEIGKATAKYFFYSNIMNFFKTEITLANGEIRKRPLIETNGETGEIVWDKGRDFATVRKVLSMPQVNIVKKTEVQTGGFSKESILPKRNSDKLIARKKDWDPKKYGGFDSPTVAYSVLVVAKVEKGKSKKLKSVKELLGITIMERSSFEKNPIDFLEAKGYKEVKKDLIIKLPKYSLFELENGRKRMLASAGELQKGNELALPSKYVNFLYLASHYEKLKGSPEDNEQKQLFVEQHKHYLDEIIEQISEFSKRVILADANLDKVLSAYNKHRDKPIREQAENIIHLFTLTNLGAPAAFKYFDTTIDRKRYTSTKEVLDATLIHQSITGLYETRIDLSQLGGDGGPAPAPAPAPAPAPGGTLQLEEEYRLFEPESTQKQEMDIWLKNFPQAWAETGGMGTAHCQAPVLIQLKATATPISIRQYPMPHEAYQGIKPHIRRMLDQGILKPCQSPWNTPLLPVKKPGTEDYRPVQDLREVNKRVEDIHPTVPNPYNLLSTLPPSHPWYTVLDLKDAFFCLRLHSESQLLFAFEWRDPEIGLSGQLTWTRLPQGFKNSPTLFNEALHSDLADFRVRYPALVLLQYVDDLLLAAATRTECLEGTKALLETLGNKGYRASAKKAQICLQEVTYLGYSLKDGQRWLTKARKEAILSIPVPKNSRQVREFLGTAGYCRLWIPGFAELAAPLYPLTRPGTLFQWGTEQQLAFEDIKKALLSSPALGLPDITKPFELFIDENSGFAKGVLVQKLGPWKRPVAYLSKKLDTVASGWPPCLRMVAAIAILVKDAGKLTLGQPLTILTSHPVEALVRQPPNKWLSNARMTHYQAMLLDAERVHFGPTVSLNPATLLPLPSGGNHHDCLQILAETHGTRPDLTDQPLPDADLTWYTDGSSFIRNGEREAGAAVTTESEVIWAAPLPPGTSAQRAELIALTQALKMAEGKKLTVYTDSRYAFATTHVHGEIYRRRGWLTSEGKEIKNKNEILALLEALFLPKRLSIIHCPGHQKGDSPQAKGNRLADDTAKKAATETHSSLTVLPAGKRTADGSEFEKRTADGSEFESPKKKAKVE

SEQ ID NO: 6556 - protein, 2089 aa, synthetic construct
MPAAKRVKLDGGDKKYSIGLDIGTNSVGWAVITDEYKVPSKKFKVLGNTDRHSIKKNLIGALLFDSGETAEATRLKRTARRRYTRRKNRICYLQEIFSNEMAKVDDSFFHRLEESFLVEEDKKHERHPIFGNIVDEVAYHEKYPTIYHLRKKLVDSTDKADLRLIYLALAHMIKFRGHFLIEGDLNPDNSDVDKLFIQLVQTYNQLFEENPINASGVDAKAILSARLSKSRRLENLIAQLPGEKKNGLFGNLIALSLGLTPNFKSNFDLAEDAKLQLSKDTYDDDLDNLLAQIGDQYADLFLAAKNLSDAILLSDILRVNTEITKAPLSASMIKRYDEHHQDLTLLKALVRQQLPEKYKEIFFDQSKNGYAGYIDGGASQEEFYKFIKPILEKMDGTEELLVKLNREDLLRKQRTFDNGSIPHQIHLGELHAILRRQEDFYPFLKDNREKIEKILTFRIPYYVGPLARGNSRFAWMTRKSEETITPWNFEEVVDKGASAQSFIERMTNFDKNLPNEKVLPKHSLLYEYFTVYNELTKVKYVTEGMRKPAFLSGEQKKAIVDLLFKTNRKVTVKQLKEDYFKKIECFDSVEISGVEDRFNASLGTYHDLLKIIKDKDFLDNEENEDILEDIVLTLTLFEDREMIEERLKTYAHLFDDKVMKQLKRRRYTGWGRLSRKLINGIRDKQSGKTILDFLKSDGFANRNFMQLIHDDSLTFKEDIQKAQVSGQGDSLHEHIANLAGSPAIKKGILQTVKVVDELVKVMGRHKPENIVIEMARENQTTQKGQKNSRERMKRIEEGIKELGSQILKEHPVENTQLQNEKLYLYYLQNGRDMYVDQELDINRLSDYDVDHIVPQSFLKDDSIDNKVLTRSDKARGKSDNVPSEEVVKKMKNYWRQLLNAKLITQRKFDNLTKAERGGLSELDKAGFIKRQLVETRQITKHVAQILDSRMNTKYDENDKLIREVKVITLKSKLVSDFRKDFQFYKVREINNYHHAHDAYLNAVVGTALIKKYPKLESEFVYGDYKVYDVRKMIAKSEQEIGKATAKYFFYSNIMNFFKTEITLANGEIRKRPLIETNGETGEIVWDKGRDFATVRKVLSMPQVNIVKKTEVQTGGFSKESILPKRNSDKLIARKKDWDPKKYGGFDSPTVAYSVLVVAKVEKGKSKKLKSVKELLGITIMERSSFEKNPIDFLEAKGYKEVKKDLIIKLPKYSLFELENGRKRMLASAGELQKGNELALPSKYVNFLYLASHYEKLKGSPEDNEQKQLFVEQHKHYLDEIIEQISEFSKRVILADANLDKVLSAYNKHRDKPIREQAENIIHLFTLTNLGAPAAFKYFDTTIDRKRYTSTKEVLDATLIHQSITGLYETRIDLSQLGGDGGPAPAPAPAPAPAPGGVPWLTQQPLQLTILVPLQEYQEKILSKTALPEDQKQQLKTLFVKYDNLWQHWENQVGHRKIRPHNIATGDYPPRPQKQYPINPKAKPSIQIVIDDLLKQGVLTPQNSTMNTPVYPVPKPDGRWRMVLDYREVNKTIPLTAAQNQHSAGILATIVRQKYKTTLDLANGFWAHPITPESYWLTAFTWQGKQYCWTRLPQGFLNSPALFNADVVDLLKEIPNVQVYVDDIYLSHDDPKEHVQQLEKVFQILLQAGYVVSLKKSEIGQKTVEFLGFNITKEGRGLTDTFKTKLLNITPPKDLKQLQSILGKLNFARNFIPNFAELVQPLYNLIAPAKGKYIEWSEENTKQLNMVIEALNTASNLEERLPEQRLVIKVNTSPSAGYVRYYNETGKKPIMYLNYVFSKAELKFSMLEKLLTTMHKALIKAMDLAMGQEILVYSPIVSMTKIQKTPLPERKALPIRWITWMTYLEDPRIQFHYDKTLPELKHIPDVYTSSQSPVKHPSQYEGVFYTDGSAIKSPDPTKSNNAGMGIVHATYKPEYQVLNQWSIPLGNHTAQMAEIAAVEFACKKALKIPGPVLVITDSFYVAESANKELPYWKSNGFVNNKKKPLKHISKWKSIAECLSMKPDITIQHEKGISLQIPVFILKGNALADKLATQGSYVVNAGKRTADGSEFEKRTADGSEFESPKKKAKVE

SEQ ID NO: 6557 - protein, 2096 aa, synthetic construct
MPAAKRVKLDGGDKKYSIGLDIGTNSVGWAVITDEYKVPSKKFKVLGNTDRHSIKKNLIGALLFDSGETAEATRLKRTARRRYTRRKNRICYLQEIFSNEMAKVDDSFFHRLEESFLVEEDKKHERHPIFGNIVDEVAYHEKYPTIYHLRKKLVDSTDKADLRLIYLALAHMIKFRGHFLIEGDLNPDNSDVDKLFIQLVQTYNQLFEENPINASGVDAKAILSARLSKSRRLENLIAQLPGEKKNGLFGNLIALSLGLTPNFKSNFDLAEDAKLQLSKDTYDDDLDNLLAQIGDQYADLFLAAKNLSDAILLSDILRVNTEITKAPLSASMIKRYDEHHQDLTLLKALVRQQLPEKYKEIFFDQSKNGYAGYIDGGASQEEFYKFIKPILEKMDGTEELLVKLNREDLLRKQRTFDNGSIPHQIHLGELHAILRRQEDFYPFLKDNREKIEKILTFRIPYYVGPLARGNSRFAWMTRKSEETITPWNFEEVVDKGASAQSFIERMTNFDKNLPNEKVLPKHSLLYEYFTVYNELTKVKYVTEGMRKPAFLSGEQKKAIVDLLFKTNRKVTVKQLKEDYFKKIECFDSVEISGVEDRFNASLGTYHDLLKIIKDKDFLDNEENEDILEDIVLTLTLFEDREMIEERLKTYAHLFDDKVMKQLKRRRYTGWGRLSRKLINGIRDKQSGKTILDFLKSDGFANRNFMQLIHDDSLTFKEDIQKAQVSGQGDSLHEHIANLAGSPAIKKGILQTVKVVDELVKVMGRHKPENIVIEMARENQTTQKGQKNSRERMKRIEEGIKELGSQILKEHPVENTQLQNEKLYLYYLQNGRDMYVDQELDINRLSDYDVDHIVPQSFLKDDSIDNKVLTRSDKARGKSDNVPSEEVVKKMKNYWRQLLNAKLITQRKFDNLTKAERGGLSELDKAGFIKRQLVETRQITKHVAQILDSRMNTKYDENDKLIREVKVITLKSKLVSDFRKDFQFYKVREINNYHHAHDAYLNAVVGTALIKKYPKLESEFVYGDYKVYDVRKMIAKSEQEIGKATAKYFFYSNIMNFFKTEITLANGEIRKRPLIETNGETGEIVWDKGRDFATVRKVLSMPQVNIVKKTEVQTGGFSKESILPKRNSDKLIARKKDWDPKKYGGFDSPTVAYSVLVVAKVEKGKSKKLKSVKELLGITIMERSSFEKNPIDFLEAKGYKEVKKDLIIKLPKYSLFELENGRKRMLASAGELQKGNELALPSKYVNFLYLASHYEKLKGSPEDNEQKQLFVEQHKHYLDEIIEQISEFSKRVILADANLDKVLSAYNKHRDKPIREQAENIIHLFTLTNLGAPAAFKYFDTTIDRKRYTSTKEVLDATLIHQSITGLYETRIDLSQLGGDGGPAPAPAPAPAPAPGGVLNLEEEYRLHEKPVPSSIDPSWLQLFPTVWAERAGMGLANQVPPVVVELRSGASPVAVRQYPMSKEAREGIRPHIQKFLDLGVLVPCRSPWNTPLLPVKKPGTNDYRPVQDLREINKRVQDIHPTVPNPYNLLSSLPPSYTWYSVLDLKDAFFCLRLHPNSQPLFAFEWKDPEKGNTGQLTWTRLPQGFKNSPTLFNEALHRDLAPFRALNPQVVLLQYVDDLLVAAPTYEDCKKGTQKLLQELSKLGYRVSAKKAQLCQREVTYLGYLLKEGKRWLTPARKATVMKIPVPTTPRQVREFLGTAGFCRLWIPGFASLAAPLYPLTKPSIPFIWTEEHQQAFDHIKKALLSAPALALPDLTKPFTLYIDERAGVARGVLTQTLGPWRRPVAYLSKKLDPVASGWPTCLKAVAAVALLLKDADKLTLGQNVTVIASHSLESIVRQPPDRWMTNARMTHYQSLLLNERVSFAPPAVLNPATLLPVESEATPVHRCSEILAEETGTRRDLEDQPLPGVPTWYTDGSSFITEGKRRAGAPIVDGKRTVWASSLPEGTSAQKAELVALTQALRLAEGKNINIYTDSRYAFATAHIHGAIYKQRGWLTSAGKDIKNKEEILALLEAIHLPRRVAIIHCPGHQRGSNPVATGNRRADEAAKQAALSTRVLAGTTKPAGKRTADGSEFEKRTADGSEFESPKKKAKVE

SEQ ID NO: 6558 - protein, 2096 aa, synthetic construct
MPAAKRVKLDGGDKKYSIGLDIGTNSVGWAVITDEYKVPSKKFKVLGNTDRHSIKKNLIGALLFDSGETAEATRLKRTARRRYTRRKNRICYLQEIFSNEMAKVDDSFFHRLEESFLVEEDKKHERHPIFGNIVDEVAYHEKYPTIYHLRKKLVDSTDKADLRLIYLALAHMIKFRGHFLIEGDLNPDNSDVDKLFIQLVQTYNQLFEENPINASGVDAKAILSARLSKSRRLENLIAQLPGEKKNGLFGNLIALSLGLTPNFKSNFDLAEDAKLQLSKDTYDDDLDNLLAQIGDQYADLFLAAKNLSDAILLSDILRVNTEITKAPLSASMIKRYDEHHQDLTLLKALVRQQLPEKYKEIFFDQSKNGYAGYIDGGASQEEFYKFIKPILEKMDGTEELLVKLNREDLLRKQRTFDNGSIPHQIHLGELHAILRRQEDFYPFLKDNREKIEKILTFRIPYYVGPLARGNSRFAWMTRKSEETITPWNFEEVVDKGASAQSFIERMTNFDKNLPNEKVLPKHSLLYEYFTVYNELTKVKYVTEGMRKPAFLSGEQKKAIVDLLFKTNRKVTVKQLKEDYFKKIECFDSVEISGVEDRFNASLGTYHDLLKIIKDKDFLDNEENEDILEDIVLTLTLFEDREMIEERLKTYAHLFDDKVMKQLKRRRYTGWGRLSRKLINGIRDKQSGKTILDFLKSDGFANRNFMQLIHDDSLTFKEDIQKAQVSGQGDSLHEHIANLAGSPAIKKGILQTVKVVDELVKVMGRHKPENIVIEMARENQTTQKGQKNSRERMKRIEEGIKELGSQILKEHPVENTQLQNEKLYLYYLQNGRDMYVDQELDINRLSDYDVDHIVPQSFLKDDSIDNKVLTRSDKARGKSDNVPSEEVVKKMKNYWRQLLNAKLITQRKFDNLTKAERGGLSELDKAGFIKRQLVETRQITKHVAQILDSRMNTKYDENDKLIREVKVITLKSKLVSDFRKDFQFYKVREINNYHHAHDAYLNAVVGTALIKKYPKLESEFVYGDYKVYDVRKMIAKSEQEIGKATAKYFFYSNIMNFFKTEITLANGEIRKRPLIETNGETGEIVWDKGRDFATVRKVLSMPQVNIVKKTEVQTGGFSKESILPKRNSDKLIARKKDWDPKKYGGFDSPTVAYSVLVVAKVEKGKSKKLKSVKELLGITIMERSSFEKNPIDFLEAKGYKEVKKDLIIKLPKYSLFELENGRKRMLASAGELQKGNELALPSKYVNFLYLASHYEKLKGSPEDNEQKQLFVEQHKHYLDEIIEQISEFSKRVILADANLDKVLSAYNKHRDKPIREQAENIIHLFTLTNLGAPAAFKYFDTTIDRKRYTSTKEVLDATLIHQSITGLYETRIDLSQLGGDGGPAPAPAPAPAPAPGGVLNLEEEYRLHEKPVPSSIDPSWLQLFPTVWAERAGMGLANQVPPVVVELRSGASPVAVRQYPMSKEAREGIRPHIQKFLDLGVLVPCRSPWNTPLLPVKKPGTNDYRPVQDLREINKRVQDIHPTVPNPYNLLSSLPPSYTWYSVLDLKDAFFCLRLHPNSQPLFAFEWKDPEKGNTGQLTWTRLPQGFKNSPTLFNEALHRDLAPFRALNPQVVLLQYVDDLLVAAPTYEDCKKGTQKLLQELSKLGYRVSAKKAQLCQREVTYLGYLLKEGKRWLTPARKATVMKIPVPTTPRQVREFLGKAGFCRLFIPGFASLAAPLYPLTKPSIPFIWTEEHQQAFDHIKKALLSAPALALPDLTKPFTLYIDERAGVARGVLTQTLGPWRRPVAYLSKKLDPVASGWPTCLKAVAAVALLLKDADKLTLGQNVTVIASHSLESIVRQPPDRWMTNARMTHYQSLLLNERVSFAPPAVLNPATLLPVESEATPVHRCSEILAEETGTRRDLEDQPLPGVPTWYTDGSSFITEGKRRAGAPIVDGKRTVWASSLPEGTSAQKAELVALTQALRLAEGKNINIYTDSRYAFATAHIHGAIYKQRGWLTSAGKDIKNKEEILALLEAIHLPRRVAIIHCPGHQRGSNPVATGNRRADEAAKQAALSTRVLAGTTKPAGKRTADGSEFEKRTADGSEFESPKKKAKVE

SEQ ID NO: 6559 - protein, 2129 aa, synthetic construct
MPAAKRVKLDGGDKKYSIGLDIGTNSVGWAVITDEYKVPSKKFKVLGNTDRHSIKKNLIGALLFDSGETAEATRLKRTARRRYTRRKNRICYLQEIFSNEMAKVDDSFFHRLEESFLVEEDKKHERHPIFGNIVDEVAYHEKYPTIYHLRKKLVDSTDKADLRLIYLALAHMIKFRGHFLIEGDLNPDNSDVDKLFIQLVQTYNQLFEENPINASGVDAKAILSARLSKSRRLENLIAQLPGEKKNGLFGNLIALSLGLTPNFKSNFDLAEDAKLQLSKDTYDDDLDNLLAQIGDQYADLFLAAKNLSDAILLSDILRVNTEITKAPLSASMIKRYDEHHQDLTLLKALVRQQLPEKYKEIFFDQSKNGYAGYIDGGASQEEFYKFIKPILEKMDGTEELLVKLNREDLLRKQRTFDNGSIPHQIHLGELHAILRRQEDFYPFLKDNREKIEKILTFRIPYYVGPLARGNSRFAWMTRKSEETITPWNFEEVVDKGASAQSFIERMTNFDKNLPNEKVLPKHSLLYEYFTVYNELTKVKYVTEGMRKPAFLSGEQKKAIVDLLFKTNRKVTVKQLKEDYFKKIECFDSVEISGVEDRFNASLGTYHDLLKIIKDKDFLDNEENEDILEDIVLTLTLFEDREMIEERLKTYAHLFDDKVMKQLKRRRYTGWGRLSRKLINGIRDKQSGKTILDFLKSDGFANRNFMQLIHDDSLTFKEDIQKAQVSGQGDSLHEHIANLAGSPAIKKGILQTVKVVDELVKVMGRHKPENIVIEMARENQTTQKGQKNSRERMKRIEEGIKELGSQILKEHPVENTQLQNEKLYLYYLQNGRDMYVDQELDINRLSDYDVDHIVPQSFLKDDSIDNKVLTRSDKARGKSDNVPSEEVVKKMKNYWRQLLNAKLITQRKFDNLTKAERGGLSELDKAGFIKRQLVETRQITKHVAQILDSRMNTKYDENDKLIREVKVITLKSKLVSDFRKDFQFYKVREINNYHHAHDAYLNAVVGTALIKKYPKLESEFVYGDYKVYDVRKMIAKSEQEIGKATAKYFFYSNIMNFFKTEITLANGEIRKRPLIETNGETGEIVWDKGRDFATVRKVLSMPQVNIVKKTEVQTGGFSKESILPKRNSDKLIARKKDWDPKKYGGFDSPTVAYSVLVVAKVEKGKSKKLKSVKELLGITIMERSSFEKNPIDFLEAKGYKEVKKDLIIKLPKYSLFELENGRKRMLASAGELQKGNELALPSKYVNFLYLASHYEKLKGSPEDNEQKQLFVEQHKHYLDEIIEQISEFSKRVILADANLDKVLSAYNKHRDKPIREQAENIIHLFTLTNLGAPAAFKYFDTTIDRKRYTSTKEVLDATLIHQSITGLYETRIDLSQLGGDGGPAPAPAPAPAPAPGGLLGRDLLTKLKAQIQFSTEGPQVTWEDRPAMCLVLNLEEEYRLHEKPVPPSIDPSWLQLFPMVWAEKAGMGLANQVPPVVVELKSDASPVAVRQYPMSKEAREGIRPHIQRFLDLGILVPCQSPWNTPLLPVKKPGTNDYRPVQDLREVNKRVQDIHPTVPNPYNLLSSLPPSHTWYSVLDLKDAFFCLKLHPNSQPLFAFEWRDPEKGNTGQLTWTRLPQGFKNSPTLFNEALHRDLASFRALNPQVVMLQYVDDLLVAAPTYRDCKEGTRRLLQELSKLGYRVSAKKAQLCREEVTYLGYLLKGGKRWLTPARKATVMKIPTPTTPRQVREFLGTAGFCRLWIPGFASLAAPLYPLTRPKVPFTWTEAHQEAFGRIKEALLSAPALALPDLTKPFALYVDEKEGVARGVLTQTLGPWRRPVAYLSKKLDPVASGWPTCLKAIAAVALLLKDADKLTLGQNVLVIAPHNLESIVRQPPDRWMTNARMTHYQSLLLNERVSFAPPAILNPATLLPVESDDTPIHICSEILAEETGTRPDLRDQPLPGVPAWYTDGSSFIMDGRRQAGAAIVDNKRTVWASNLPEGTSAQKAELIALTQALRLAEGKSINIYTDSRYAFATAHVHGAIYKQRGWLTSAGKDIKNKEEILALLEAIHLPKRVAIIHCPGHQRGTDPVATGNRKADEAAKQAAQSTRILTETTKNAGKRTADGSEFEKRTADGSEFESPKKKAKVE

SEQ ID NO: 6560 - protein, 2220 aa, synthetic construct
MPAAKRVKLDGGDKKYSIGLDIGTNSVGWAVITDEYKVPSKKFKVLGNTDRHSIKKNLIGALLFDSGETAEATRLKRTARRRYTRRKNRICYLQEIFSNEMAKVDDSFFHRLEESFLVEEDKKHERHPIFGNIVDEVAYHEKYPTIYHLRKKLVDSTDKADLRLIYLALAHMIKFRGHFLIEGDLNPDNSDVDKLFIQLVQTYNQLFEENPINASGVDAKAILSARLSKSRRLENLIAQLPGEKKNGLFGNLIALSLGLTPNFKSNFDLAEDAKLQLSKDTYDDDLDNLLAQIGDQYADLFLAAKNLSDAILLSDILRVNTEITKAPLSASMIKRYDEHHQDLTLLKALVRQQLPEKYKEIFFDQSKNGYAGYIDGGASQEEFYKFIKPILEKMDGTEELLVKLNREDLLRKQRTFDNGSIPHQIHLGELHAILRRQEDFYPFLKDNREKIEKILTFRIPYYVGPLARGNSRFAWMTRKSEETITPWNFEEVVDKGASAQSFIERMTNFDKNLPNEKVLPKHSLLYEYFTVYNELTKVKYVTEGMRKPAFLSGEQKKAIVDLLFKTNRKVTVKQLKEDYFKKIECFDSVEISGVEDRFNASLGTYHDLLKIIKDKDFLDNEENEDILEDIVLTLTLFEDREMIEERLKTYAHLFDDKVMKQLKRRRYTGWGRLSRKLINGIRDKQSGKTILDFLKSDGFANRNFMQLIHDDSLTFKEDIQKAQVSGQGDSLHEHIANLAGSPAIKKGILQTVKVVDELVKVMGRHKPENIVIEMARENQTTQKGQKNSRERMKRIEEGIKELGSQILKEHPVENTQLQNEKLYLYYLQNGRDMYVDQELDINRLSDYDVDHIVPQSFLKDDSIDNKVLTRSDKARGKSDNVPSEEVVKKMKNYWRQLLNAKLITQRKFDNLTKAERGGLSELDKAGFIKRQLVETRQITKHVAQILDSRMNTKYDENDKLIREVKVITLKSKLVSDFRKDFQFYKVREINNYHHAHDAYLNAVVGTALIKKYPKLESEFVYGDYKVYDVRKMIAKSEQEIGKATAKYFFYSNIMNFFKTEITLANGEIRKRPLIETNGETGEIVWDKGRDFATVRKVLSMPQVNIVKKTEVQTGGFSKESILPKRNSDKLIARKKDWDPKKYGGFDSPTVAYSVLVVAKVEKGKSKKLKSVKELLGITIMERSSFEKNPIDFLEAKGYKEVKKDLIIKLPKYSLFELENGRKRMLASAGELQKGNELALPSKYVNFLYLASHYEKLKGSPEDNEQKQLFVEQHKHYLDEIIEQISEFSKRVILADANLDKVLSAYNKHRDKPIREQAENIIHLFTLTNLGAPAAFKYFDTTIDRKRYTSTKEVLDATLIHQSITGLYETRIDLSQLGGDGGPAPAPAPAPAPAPGGTLGDQGSRGSDPLPEPRVTLTVEGIPTEFLVNTGAEHSVLTKPMGKMGSKRTVVAGATGSKVYPWTTKRLLKIGQKQVTHSFLVIPECPAPLLGRDLLTKLKAQIQFSTEGPQVTWEDRPAMCLVLNLEEEYRLHEKPVPPSIDPSWLQLFPMVWAEKAGMGLANQVPPVVVELKSDASPVAVRQYPMSKEAREGIRPHIQRFLDLGILVPCQSPWNTPLLPVKKPGTNDYRPVQDLREVNKRVQDIHPTVPNPYNLLSSLPPSHTWYSVLDLKDAFFCLKLHPNSQPLFAFEWRDPEKGNTGQLTWTRLPQGFKNSPTLFNEALHRDLASFRALNPQVVMLQYVDDLLVAAPTYRDCKEGTRRLLQELSKLGYRVSAKKAQLCREEVTYLGYLLKGGKRWLTPARKATVMKIPTPTTPRQVREFLGTAGFCRLWIPGFASLAAPLYPLTRPKVPFTWTEAHQEAFGRIKEALLSAPALALPDLTKPFALYVDEKEGVARGVLTQTLGPWRRPVAYLSKKLDPVASGWPTCLKAIAAVALLLKDADKLTLGQNVLVIAPHNLESIVRQPPDRWMTNARMTHYQSLLLNERVSFAPPAILNPATLLPVESDDTPIHICSEILAEETGTRPDLRDQPLPGVPAWYTDGSSFIMDGRRQAGAAIVDNKRTVWASNLPEGTSAQKAELIALTQALRLAEGKSINIYTDSRYAFATAHVHGAIYKQRGWLTSAGKDIKNKEEILALLEAIHLPKRVAIIHCPGHQRGTDPVATGNRKADEAAKQAAQSTRILTETTKNAGKRTADGSEFEKRTADGSEFESPKKKAKVE

SEQ ID NO: 6561 - protein, 2098 aa, synthetic construct
MPAAKRVKLDGGDKKYSIGLDIGTNSVGWAVITDEYKVPSKKFKVLGNTDRHSIKKNLIGALLFDSGETAEATRLKRTARRRYTRRKNRICYLQEIFSNEMAKVDDSFFHRLEESFLVEEDKKHERHPIFGNIVDEVAYHEKYPTIYHLRKKLVDSTDKADLRLIYLALAHMIKFRGHFLIEGDLNPDNSDVDKLFIQLVQTYNQLFEENPINASGVDAKAILSARLSKSRRLENLIAQLPGEKKNGLFGNLIALSLGLTPNFKSNFDLAEDAKLQLSKDTYDDDLDNLLAQIGDQYADLFLAAKNLSDAILLSDILRVNTEITKAPLSASMIKRYDEHHQDLTLLKALVRQQLPEKYKEIFFDQSKNGYAGYIDGGASQEEFYKFIKPILEKMDGTEELLVKLNREDLLRKQRTFDNGSIPHQIHLGELHAILRRQEDFYPFLKDNREKIEKILTFRIPYYVGPLARGNSRFAWMTRKSEETITPWNFEEVVDKGASAQSFIERMTNFDKNLPNEKVLPKHSLLYEYFTVYNELTKVKYVTEGMRKPAFLSGEQKKAIVDLLFKTNRKVTVKQLKEDYFKKIECFDSVEISGVEDRFNASLGTYHDLLKIIKDKDFLDNEENEDILEDIVLTLTLFEDREMIEERLKTYAHLFDDKVMKQLKRRRYTGWGRLSRKLINGIRDKQSGKTILDFLKSDGFANRNFMQLIHDDSLTFKEDIQKAQVSGQGDSLHEHIANLAGSPAIKKGILQTVKVVDELVKVMGRHKPENIVIEMARENQTTQKGQKNSRERMKRIEEGIKELGSQILKEHPVENTQLQNEKLYLYYLQNGRDMYVDQELDINRLSDYDVDHIVPQSFLKDDSIDNKVLTRSDKARGKSDNVPSEEVVKKMKNYWRQLLNAKLITQRKFDNLTKAERGGLSELDKAGFIKRQLVETRQITKHVAQILDSRMNTKYDENDKLIREVKVITLKSKLVSDFRKDFQFYKVREINNYHHAHDAYLNAVVGTALIKKYPKLESEFVYGDYKVYDVRKMIAKSEQEIGKATAKYFFYSNIMNFFKTEITLANGEIRKRPLIETNGETGEIVWDKGRDFATVRKVLSMPQVNIVKKTEVQTGGFSKESILPKRNSDKLIARKKDWDPKKYGGFDSPTVAYSVLVVAKVEKGKSKKLKSVKELLGITIMERSSFEKNPIDFLEAKGYKEVKKDLIIKLPKYSLFELENGRKRMLASAGELQKGNELALPSKYVNFLYLASHYEKLKGSPEDNEQKQLFVEQHKHYLDEIIEQISEFSKRVILADANLDKVLSAYNKHRDKPIREQAENIIHLFTLTNLGAPAAFKYFDTTIDRKRYTSTKEVLDATLIHQSITGLYETRIDLSQLGGDGGPAPAPAPAPAPAPGGTLNIEDEYRLHETSKEPDVSLGSTWLSDFPQAWAETGGMGLAVRQAPLIIPLKATSTPVSIKQYPMSQEARLGIKPHIQRLLDQGILVPCQSPWNTPLLPVKKPGTNDYRPVQDLREVNKRVEDIHPTVPNPYNLLSGLPPSHQWYTVLDLKDAFFCLRLHPTSQPLFAFEWRDPEMGISGQLTWTRLPQGFKNSPTLFNEALHRDLAGFRIQHPDLILLQYVDDLLLAATSELDCQQGTRALLQTLGDLGYRASAKKAQICQKQVKYLGYLLKEGQRWLTEARKETVMGQPIPKTPRQLREFLGTAGFCRLWIPGFAEMAAPLYPLTKPGTLFNWGPDQQKAFQEIKQALLTAPALGLPDLTKPFELFVDEKQGYAKGVLTQKLGPWRRPVAYLSKKLDPVAAGWPPCLRMVAAIAVLTKDAGKLTMGQPLVILAPHAVEALVKQPPDRWLSNARMTHYQALLLDTDRVQFGPVVALNPATLLPLPEEGLQHDCLDILAEAHGTRSDLMDQPLPDADHTWYTDGSSFLQEGQRKAGAAVTTETEVIWARALPAGTSAQRAELIALTQALKMAEGKKLNVYTDSRYAFATAHIHGEIYRRRGWLTSEGKEIKNKDEILALLKALFLPKRLSIIHCPGHQKGNSAEARGNRMADQAAREVATRETPETSTLLAGKRTADGSEFEKRTADGSEFESPKKKAKVE

SEQ ID NO: 6562 - protein, 2098 aa, synthetic construct
MPAAKRVKLDGGDKKYSIGLDIGTNSVGWAVITDEYKVPSKKFKVLGNTDRHSIKKNLIGALLFDSGETAEATRLKRTARRRYTRRKNRICYLQEIFSNEMAKVDDSFFHRLEESFLVEEDKKHERHPIFGNIVDEVAYHEKYPTIYHLRKKLVDSTDKADLRLIYLALAHMIKFRGHFLIEGDLNPDNSDVDKLFIQLVQTYNQLFEENPINASGVDAKAILSARLSKSRRLENLIAQLPGEKKNGLFGNLIALSLGLTPNFKSNFDLAEDAKLQLSKDTYDDDLDNLLAQIGDQYADLFLAAKNLSDAILLSDILRVNTEITKAPLSASMIKRYDEHHQDLTLLKALVRQQLPEKYKEIFFDQSKNGYAGYIDGGASQEEFYKFIKPILEKMDGTEELLVKLNREDLLRKQRTFDNGSIPHQIHLGELHAILRRQEDFYPFLKDNREKIEKILTFRIPYYVGPLARGNSRFAWMTRKSEETITPWNFEEVVDKGASAQSFIERMTNFDKNLPNEKVLPKHSLLYEYFTVYNELTKVKYVTEGMRKPAFLSGEQKKAIVDLLFKTNRKVTVKQLKEDYFKKIECFDSVEISGVEDRFNASLGTYHDLLKIIKDKDFLDNEENEDILEDIVLTLTLFEDREMIEERLKTYAHLFDDKVMKQLKRRRYTGWGRLSRKLINGIRDKQSGKTILDFLKSDGFANRNFMQLIHDDSLTFKEDIQKAQVSGQGDSLHEHIANLAGSPAIKKGILQTVKVVDELVKVMGRHKPENIVIEMARENQTTQKGQKNSRERMKRIEEGIKELGSQILKEHPVENTQLQNEKLYLYYLQNGRDMYVDQELDINRLSDYDVDHIVPQSFLKDDSIDNKVLTRSDKARGKSDNVPSEEVVKKMKNYWRQLLNAKLITQRKFDNLTKAERGGLSELDKAGFIKRQLVETRQITKHVAQILDSRMNTKYDENDKLIREVKVITLKSKLVSDFRKDFQFYKVREINNYHHAHDAYLNAVVGTALIKKYPKLESEFVYGDYKVYDVRKMIAKSEQEIGKATAKYFFYSNIMNFFKTEITLANGEIRKRPLIETNGETGEIVWDKGRDFATVRKVLSMPQVNIVKKTEVQTGGFSKESILPKRNSDKLIARKKDWDPKKYGGFDSPTVAYSVLVVAKVEKGKSKKLKSVKELLGITIMERSSFEKNPIDFLEAKGYKEVKKDLIIKLPKYSLFELENGRKRMLASAGELQKGNELALPSKYVNFLYLASHYEKLKGSPEDNEQKQLFVEQHKHYLDEIIEQISEFSKRVILADANLDKVLSAYNKHRDKPIREQAENIIHLFTLTNLGAPAAFKYFDTTIDRKRYTSTKEVLDATLIHQSITGLYETRIDLSQLGGDGGPAPAPAPAPAPAPGGTLNIEDEHRLHETSKEPDVSLGSTWLSDFPQAWAETGGMGLAVRQAPLIIPLKATSTPVSIKQYPMSQEARLGIKPHIQRLLDQGILVPCQSPWNTPLLPVKKPGTNDYRPVQDLREVNKRVEDIHPTVPNPYNLLSGLPPSHQWYTVLDLKDAFFCLRLHPTSQPLFAFEWRDPEMGISGQLTWTRLPQGFKNSPTLFDEALHRDLADFRIQHPDLILLQYVDDLLLAATSELDCQQGTRALLQTLGNLGYRASAKKAQICQKQVKYLGYLLKEGQRWLTEARKETVMGQPTPKTPRQLREFLGTAGFCRLWIPGFAEMAAPLYPLTKTGTLFNWGPDQQKAYQEIKQALLTAPALGLPDLTKPFELFVDEKQGYAKGVLTQKLGPWRRPVAYLSKKLDPVAAGWPPCLRMVAAIAVLTKDAGKLTMGQPLVILAPHAVEALVKQPPDRWLSNARMTHYQALLLDTDRVQFGPVVALNPATLLPLPEEGLQHNCLDILAEAHGTRPDLTDQPLPDADHTWYTDGSSLLQEGQRKAGAAVTTETEVIWAKALPAGTSAQRAELIALTQALKMAEGKKLNVYTDSRYAFATAHIHGEIYRRRGLLTSEGKEIKNKDEILALLKALFLPKRLSIIHCPGHQKGHSAEARGNRMADQAARKAAITETPDTSTLLAGKRTADGSEFEKRTADGSEFESPKKKAKVE

SEQ ID NO: 6563 - protein, 2098 aa, synthetic construct; identical to SEQ ID NO: 6562

SEQ ID NO: 6564 - protein, 2092 aa, synthetic construct
MPAAKRVKLDGGDKKYSIGLDIGTNSVGWAVITDEYKVPSKKFKVLGNTDRHSIKKNLIGALLFDSGETAEATRLKRTARRRYTRRKNRICYLQEIFSNEMAKVDDSFFHRLEESFLVEEDKKHERHPIFGNIVDEVAYHEKYPTIYHLRKKLVDSTDKADLRLIYLALAHMIKFRGHFLIEGDLNPDNSDVDKLFIQLVQTYNQLFEENPINASGVDAKAILSARLSKSRRLENLIAQLPGEKKNGLFGNLIALSLGLTPNFKSNFDLAEDAKLQLSKDTYDDDLDNLLAQIGDQYADLFLAAKNLSDAILLSDILRVNTEITKAPLSASMIKRYDEHHQDLTLLKALVRQQLPEKYKEIFFDQSKNGYAGYIDGGASQEEFYKFIKPILEKMDGTEELLVKLNREDLLRKQRTFDNGSIPHQIHLGELHAILRRQEDFYPFLKDNREKIEKILTFRIPYYVGPLARGNSRFAWMTRKSEETITPWNFEEVVDKGASAQSFIERMTNFDKNLPNEKVLPKHSLLYEYFTVYNELTKVKYVTEGMRKPAFLSGEQKKAIVDLLFKTNRKVTVKQLKEDYFKKIECFDSVEISGVEDRFNASLGTYHDLLKIIKDKDFLDNEENEDILEDIVLTLTLFEDREMIEERLKTYAHLFDDKVMKQLKRRRYTGWGRLSRKLINGIRDKQSGKTILDFLKSDGFANRNFMQLIHDDSLTFKEDIQKAQVSGQGDSLHEHIANLAGSPAIKKGILQTVKVVDELVKVMGRHKPENIVIEMARENQTTQKGQKNSRERMKRIEEGIKELGSQILKEHPVENTQLQNEKLYLYYLQNGRDMYVDQELDINRLSDYDVDHIVPQSFLKDDSIDNKVLTRSDKARGKSDNVPSEEVVKKMKNYWRQLLNAKLITQRKFDNLTKAERGGLSELDKAGFIKRQLVETRQITKHVAQILDSRMNTKYDENDKLIREVKVITLKSKLVSDFRKDFQFYKVREINNYHHAHDAYLNAVVGTALIKKYPKLESEFVYGDYKVYDVRKMIAKSEQEIGKATAKYFFYSNIMNFFKTEITLANGEIRKRPLIETNGETGEIVWDKGRDFATVRKVLSMPQVNIVKKTEVQTGGFSKESILPKRNSDKLIARKKDWDPKKYGGFDSPTVAYSVLVVAKVEKGKSKKLKSVKELLGITIMERSSFEKNPIDFLEAKGYKEVKKDLIIKLPKYSLFELENGRKRMLASAGELQKGNELALPSKYVNFLYLASHYEKLKGSPEDNEQKQLFVEQHKHYLDEIIEQISEFSKRVILADANLDKVLSAYNKHRDKPIREQAENIIHLFTLTNLGAPAAFKYFDTTIDRKRYTSTKEVLDATLIHQSITGLYETRIDLSQLGGDGGPAPAPAPAPAPAPGGTLQLDDEYRLYSPLVKPDQNIQFWLEQFPQAWAETAGMGLAKQVPPQVIQLKASATPVSVRQYPLSKEAQEGIRPHVQRLIQQGILVPVQSPWNTPLLPVRKPGTNDYRPVQDLREVNKRVQDIHPTVPNPYNLLCALPPQRSWYTVLDLKDAFFCLRLHPTSQPLFAFEWRDPGTGRTGQLTWTRLPQGFKNSPTIFDEALHRDLANFRIQHPQVTLLQYVDDLLLAGATKQDCLEGTKALLLELSDLGYRASAKKAQICRREVTYLGYSLRDGQRWLTEARKKTVVQIPAPTTAKQVREFLGTAGFCRLWIPGFATLAAPLYPLTKEKGEFSWAPEHQKAFDAIKKALLSAPALALPDVTKPFTLYVDERKGVARGVLTQTLGPWRRPVAYLSKKLDPVASGWPVCLKAIAAVAILVKDADKLTLGQNITVIAPHALENIVRQPPDRWMTNARMTHYQSLLLTERVTFAPPAALNPATLLPEETDEPVTHDCHQLLIEETGVRKDLTDIPLTGEVLTWFTDGSSYVVEGKRMAGAAVVDGTRTIWASSLPEGTSAQKAELMALTQALRLAEGKSINIYTDSRYAFATAHVHGAIYKQRGLLTSAGREIKNKEEILSLLEALHLPKRLAIIHCPGHQKAKDPISRGNQMADRVAKQAAQGVNLLAGKRTADGSEFEKRTADGSEFESPKKKAKVE

SEQ ID NO: 6565 - protein, 2092 aa, synthetic construct; identical to SEQ ID NO: 6564

SEQ ID NO: 6566 - protein, 2178 aa, synthetic construct
MPAAKRVKLDGGDKKYSIGLDIGTNSVGWAVITDEYKVPSKKFKVLGNTDRHSIKKNLIGALLFDSGETAEATRLKRTARRRYTRRKNRICYLQEIFSNEMAKVDDSFFHRLEESFLVEEDKKHERHPIFGNIVDEVAYHEKYPTIYHLRKKLVDSTDKADLRLIYLALAHMIKFRGHFLIEGDLNPDNSDVDKLFIQLVQTYNQLFEENPINASGVDAKAILSARLSKSRRLENLIAQLPGEKKNGLFGNLIALSLGLTPNFKSNFDLAEDAKLQLSKDTYDDDLDNLLAQIGDQYADLFLAAKNLSDAILLSDILRVNTEITKAPLSASMIKRYDEHHQDLTLLKALVRQQLPEKYKEIFFDQSKNGYAGYIDGGASQEEFYKFIKPILEKMDGTEELLVKLNREDLLRKQRTFDNGSIPHQIHLGELHAILRRQEDFYPFLKDNREKIEKILTFRIPYYVGPLARGNSRFAWMTRKSEETITPWNFEEVVDKGASAQSFIERMTNFDKNLPNEKVLPKHSLLYEYFTVYNELTKVKYVTEGMRKPAFLSGEQKKAIVDLLFKTNRKVTVKQLKEDYFKKIECFDSVEISGVEDRFNASLGTYHDLLKIIKDKDFLDNEENEDILEDIVLTLTLFEDREMIEERLKTYAHLFDDKVMKQLKRRRYTGWGRLSRKLINGIRDKQSGKTILDFLKSDGFANRNFMQLIHDDSLTFKEDIQKAQVSGQGDSLHEHIANLAGSPAIKKGILQTVKVVDELVKVMGRHKPENIVIEMARENQTTQKGQKNSRERMKRIEEGIKELGSQILKEHPVENTQLQNEKLYLYYLQNGRDMYVDQELDINRLSDYDVDHIVPQSFLKDDSIDNKVLTRSDKARGKSDNVPSEEVVKKMKNYWRQLLNAKLITQRKFDNLTKAERGGLSELDKAGFIKRQLVETRQITKHVAQILDSRMNTKYDENDKLIREVKVITLKSKLVSDFRKDFQFYKVREINNYHHAHDAYLNAVVGTALIKKYPKLESEFVYGDYKVYDVRKMIAKSEQEIGKATAKYFFYSNIMNFFKTEITLANGEIRKRPLIETNGETGEIVWDKGRDFATVRKVLSMPQVNIVKKTEVQTGGFSKESILPKRNSDKLIARKKDWDPKKYGGFDSPTVAYSVLVVAKVEKGKSKKLKSVKELLGITIMERSSFEKNPIDFLEAKGYKEVKKDLIIKLPKYSLFELENGRKRMLASAGELQKGNELALPSKYVNFLYLASHYEKLKGSPEDNEQKQLFVEQHKHYLDEIIEQISEFSKRVILADANLDKVLSAYNKHRDKPIREQAENIIHLFTLTNLGAPAAFKYFDTTIDRKRYTSTKEVLDATLIHQSITGLYETRIDLSQLGGDGGPAPAPAPAPAPAPGGMDPLQLLQPLEAEIKGTKLKAHWNSGATITCVPQAFLEEEVPIKNIWIKTIHGEKEQPVYYLTFKIQGRKVEAEVISSPYDYILVSPSDIPWLMKKPLQLTTLVPLQEYEERLLKQTMLTGSYKEKLQSLFLKYDALWQHWENQVGHRRIKPHHIATGTVNPRPQKQYPINPKAKASIQTVINDLLKQGVLIQQNSIMNTPVYPVPKPDGKWRMVLDYREVNKTIPLIAAQNQHSAGILSSIFRGKYKTTLDLSNGFWAHSITPESYWLTAFTWLGQQYCWTRLPQGFLNSPALFNADVVDLLKEVPNVQVYVDDIYISHDDPREHLEQLEKVFSLLLNAGYVVSLKKSEIAQHEVEFLGFNITKEGRGLTETFKQKLLNITPPRDLKQLQSILGLLNFARNFIPNFSELVKPLYNIIATAPGKYITWTTDNSQQLQNIISMLNSAENLEERNPEVRLIMKVNTSPSAGYIRFYNEFAKRPIMYLNYVYTKAEVKFTNTEKLLTTIHKGLIKALDLGMGQEILVYSPIVSMTKIQKTPLPERKALPIRWITWMSYLEDPRIQFHYDKTLPELQQVPTVTDDIIAKIKHPSEFSMVFYTDGSAIKHPNVNKSHNAGMGIAQVQFKPEFTVINTWSIPLGDHTAQLAEVAAVEFACKKALKIDGPVLIVTDSFYVAESVNKELPYWQSNGFFNNKKKPLKHVSKWKSIADCIQLKPDIIIIHEKGHQPTASTFHTEGNNLADKLATQGSYVVNAGKRTADGSEFEKRTADGSEFESPKKKAKVE

SEQ ID NO: 6567 - protein, 2096 aa, synthetic construct; identical to SEQ ID NO: 4509

SEQ ID NO: 6568 - protein, 2098 aa, synthetic construct; identical to SEQ ID NO: 4510

SEQ ID NO: 6569 - protein, 2093 aa, synthetic construct
MPAAKRVKLDGGDKKYSIGLDIGTNSVGWAVITDEYKVPSKKFKVLGNTDRHSIKKNLIGALLFDSGETAEATRLKRTARRRYTRRKNRICYLQEIFSNEMAKVDDSFFHRLEESFLVEEDKKHERHPIFGNIVDEVAYHEKYPTIYHLRKKLVDSTDKADLRLIYLALAHMIKFRGHFLIEGDLNPDNSDVDKLFIQLVQTYNQLFEENPINASGVDAKAILSARLSKSRRLENLIAQLPGEKKNGLFGNLIALSLGLTPNFKSNFDLAEDAKLQLSKDTYDDDLDNLLAQIGDQYADLFLAAKNLSDAILLSDILRVNTEITKAPLSASMIKRYDEHHQDLTLLKALVRQQLPEKYKEIFFDQSKNGYAGYIDGGASQEEFYKFIKPILEKMDGTEELLVKLNREDLLRKQRTFDNGSIPHQIHLGELHAILRRQEDFYPFLKDNREKIEKILTFRIPYYVGPLARGNSRFAWMTRKSEETITPWNFEEVVDKGASAQSFIERMTNFDKNLPNEKVLPKHSLLYEYFTVYNELTKVKYVTEGMRKPAFLSGEQKKAIVDLLFKTNRKVTVKQLKEDYFKKIECFDSVEISGVEDRFNASLGTYHDLLKIIKDKDFLDNEENEDILEDIVLTLTLFEDREMIEERLKTYAHLFDDKVMKQLKRRRYTGWGRLSRKLINGIRDKQSGKTILDFLKSDGFANRNFMQLIHDDSLTFKEDIQKAQVSGQGDSLHEHIANLAGSPAIKKGILQTVKVVDELVKVMGRHKPENIVIEMARENQTTQKGQKNSRERMKRIEEGIKELGSQILKEHPVENTQLQNEKLYLYYLQNGRDMYVDQELDINRLSDYDVDHIVPQSFLKDDSIDNKVLTRSDKARGKSDNVPSEEVVKKMKNYWRQLLNAKLITQRKFDNLTKAERGGLSELDKAGFIKRQLVETRQITKHVAQILDSRMNTKYDENDKLIREVKVITLKSKLVSDFRKDFQFYKVREINNYHHAHDAYLNAVVGTALIKKYPKLESEFVYGDYKVYDVRKMIAKSEQEIGKATAKYFFYSNIMNFFKTEITLANGEIRKRPLIETNGETGEIVWDKGRDFATVRKVLSMPQVNIVKKTEVQTGGFSKESILPKRNSDKLIARKKDWDPKKYGGFDSPTVAYSVLVVAKVEKGKSKKLKSVKELLGITIMERSSFEKNPIDFLEAKGYKEVKKDLIIKLPKYSLFELENGRKRMLASAGELQKGNELALPSKYVNFLYLASHYEKLKGSPEDNEQKQLFVEQHKHYLDEIIEQISEFSKRVILADANLDKVLSAYNKHRDKPIREQAENIIHLFTLTNLGAPAAFKYFDTTIDRKRYTSTKEVLDATLIHQSITGLYETRIDLSQLGGDGGGGSGGGGGTAPLEEEYRLFLEAPIQNVTLLEQWKREIPKVWAEINPPGLASTQAPIHVQLLSTALPVRVRQYPITLEAKRSLRETIRKFRAAGILRPVHSPWNTPLLPVRKSGTSEYRMVQDLREVNKRVETIHPTVPNPYTLLSLLPPDRIWYSVLDLKDAFFCIPLAPESQLIFAFEWADAEEGESGQLTWTRLPQGFKNSPTLFNEALNRDLQGFRLDHPSVSLLQYVDDLLIAADTQAACLSATRDLLMTLAELGYRVSGKKAQLCQEEVTYLGFKIHKGSRSLSNSRTQAILQIPVPKTKRQVREFLGTIGYCRLWIPGFAELAQPLYAATRPGNDPLVWGEKEEEAFQSLKLALTQPPALALPSLDKPFQLFVEETSGAAKGVLTQALGPWKRPVAYLSKRLDPVAAGWPRCLRAIAAAALLTREASKLTFGQDIEITSSHNLESLLRSPPDKWLTNARITQYQVLLLDPPRVRFKQTAALNPATLLPETDDTLPIHHCLDTLDSLTSTRPDLTDQPLAQAEATLFTDGSSYIRDGKRYAGAAVVTLDSVIWAEPLPIGTSAQKAELIALTKALEWSKDKSVNIYTDSRYAFATLHVHGMIYRERGWLTAGGKAIKNAPEILALLTAVWLPKRVAVMHCKGHQKDDAPTSTGNRRADEVAREVAIRPLSTQATISAGKRTADGSEFEKRTADGSEFESPKKKAKVE

SEQ ID NO: 6570 - protein, 2082 aa, synthetic construct
MPAAKRVKLDGGDKKYSIGLDIGTNSVGWAVITDEYKVPSKKFKVLGNTDRHSIKKNLIGALLFDSGETAEATRLKRTARRRYTRRKNRICYLQEIFSNEMAKVDDSFFHRLEESFLVEEDKKHERHPIFGNIVDEVAYHEKYPTIYHLRKKLVDSTDKADLRLIYLALAHMIKFRGHFLIEGDLNPDNSDVDKLFIQLVQTYNQLFEENPINASGVDAKAILSARLSKSRRLENLIAQLPGEKKNGLFGNLIALSLGLTPNFKSNFDLAEDAKLQLSKDTYDDDLDNLLAQIGDQYADLFLAAKNLSDAILLSDILRVNTEITKAPLSASMIKRYDEHHQDLTLLKALVRQQLPEKYKEIFFDQSKNGYAGYIDGGASQEEFYKFIKPILEKMDGTEELLVKLNREDLLRKQRTFDNGSIPHQIHLGELHAILRRQEDFYPFLKDNREKIEKILTFRIPYYVGPLARGNSRFAWMTRKSEETITPWNFEEVVDKGASAQSFIERMTNFDKNLPNEKVLPKHSLLYEYFTVYNELTKVKYVTEGMRKPAFLSGEQKKAIVDLLFKTNRKVTVKQLKEDYFKKIECFDSVEISGVEDRFNASLGTYHDLLKIIKDKDFLDNEENEDILEDIVLTLTLFEDREMIEERLKTYAHLFDDKVMKQLKRRRYTGWGRLSRKLINGIRDKQSGKTILDFLKSDGFANRNFMQLIHDDSLTFKEDIQKAQVSGQGDSLHEHIANLAGSPAIKKGILQTVKVVDELVKVMGRHKPENIVIEMARENQTTQKGQKNSRERMKRIEEGIKELGSQILKEHPVENTQLQNEKLYLYYLQNGRDMYVDQELDINRLSDYDVDHIVPQSFLKDDSIDNKVLTRSDKARGKSDNVPSEEVVKKMKNYWRQLLNAKLITQRKFDNLTKAERGGLSELDKAGFIKRQLVETRQITKHVAQILDSRMNTKYDENDKLIREVKVITLKSKLVSDFRKDFQFYKVREINNYHHAHDAYLNAVVGTALIKKYPKLESEFVYGDYKVYDVRKMIAKSEQEIGKATAKYFFYSNIMNFFKTEITLANGEIRKRPLIETNGETGEIVWDKGRDFATVRKVLSMPQVNIVKKTEVQTGGFSKESILPKRNSDKLIARKKDWDPKKYGGFDSPTVAYSVLVVAKVEKGKSKKLKSVKELLGITIMERSSFEKNPIDFLEAKGYKEVKKDLIIKLPKYSLFELENGRKRMLASAGELQKGNELALPSKYVNFLYLASHYEKLKGSPEDNEQKQLFVEQHKHYLDEIIEQISEFSKRVILADANLDKVLSAYNKHRDKPIREQAENIIHLFTLTNLGAPAAFKYFDTTIDRKRYTSTKEVLDATLIHQSITGLYETRIDLSQLGGDGGGGSGGGGGVPWILKKPLELTIKLDLEEQQGTLLNNSILSKKGKEELKQLFEKYSALWQSWENQVGHRRIRPHKIATGTVKPTPQKQYHINPKAKPDIQIVINDLLKQGVLIQKESTMNTPVYPVPKPNGRWRMVLDYRAVNKVTPLIAVQNQHSYGILGSLFKGRYKTTIDLSNGFWAHPIVPEDYWITAFTWQGKQYCWTVLPQGFLNSPGLFTGDVVDLLQGIPNVEVYVDDVYISHDSEKEHLEYLDILFNRLKEAGYIISLKKSNIANSIVDFLGFQITNEGRGLTDTFKEKLENITAPTTLKQLQSILGLLNFARNFIPDFTELIAPLYALIPKSTKNYVPWQIEHSTTLETLITKLNGAEYLQGRKGDKTLIMKVNASYTTGYIRYYNEGEKKPISYVSIVFSKTELKFTELEKLLTTVHKGLLKALDLSMGQNIHVYSPIVSMQNIQKTPQTAKKALASRWLSWLSYLEDPRIRFFYDPQMPALKDLPAVDTGKDNKKHPSNFQHIFYTDGSAITSPTKEGHLNAGMGIVYFINKDGNLQKQQEWSISLGNHTAQFAEIAAFEFALKKCLPLGGNILVVTDSNYVAKAYNEELDVWASNGFVNNRKKPLKHISKWKSVADLKRLRPDVVVTHEPGHQKLDSSPHAYGNNLADQLATQASFKVHAGKRTADGSEFEKRTADGSEFESPKKKAKVE

SEQ ID NO: 6571 - protein, 2082 aa, synthetic construct
MPAAKRVKLDGGDKKYSIGLDIGTNSVGWAVITDEYKVPSKKFKVLGNTDRHSIKKNLIGALLFDSGETAEATRLKRTARRRYTRRKNRICYLQEIFSNEMAKVDDSFFHRLEESFLVEEDKKHERHPIFGNIVDEVAYHEKYPTIYHLRKKLVDSTDKADLRLIYLALAHMIKFRGHFLIEGDLNPDNSDVDKLFIQLVQTYNQLFEENPINASGVDAKAILSARLSKSRRLENLIAQLPGEKKNGLFGNLIALSLGLTPNFKSNFDLAEDAKLQLSKDTYDDDLDNLLAQIGDQYADLFLAAKNLSDAILLSDILRVNTEITKAPLSASMIKRYDEHHQDLTLLKALVRQQLPEKYKEIFFDQSKNGYAGYIDGGASQEEFYKFIKPILEKMDGTEELLVKLNREDLLRKQRTFDNGSIPHQIHLGELHAILRRQEDFYPFLKDNREKIEKILTFRIPYYVGPLARGNSRFAWMTRKSEETITPWNFEEVVDKGASAQSFIERMTNFDKNLPNEKVLPKHSLLYEYFTVYNELTKVKYVTEGMRKPAFLSGEQKKAIVDLLFKTNRKVTVKQLKEDYFKKIECFDSVEISGVEDRFNASLGTYHDLLKIIKDKDFLDNEENEDILEDIVLTLTLFEDREMIEERLKTYAHLFDDKVMKQLKRRRYTGWGRLSRKLINGIRDKQSGKTILDFLKSDGFANRNFMQLIHDDSLTFKEDIQKAQVSGQGDSLHEHIANLAGSPAIKKGILQTVKVVDELVKVMGRHKPENIVIEMARENQTTQKGQKNSRERMKRIEEGIKELGSQILKEHPVENTQLQNEKLYLYYLQNGRDMYVDQELDINRLSDYDVDHIVPQSFLKDDSIDNKVLTRSDKARGKSDNVPSEEVVKKMKNYWRQLLNAKLITQRKFDNLTKAERGGLSELDKAGFIKRQLVETRQITKHVAQILDSRMNTKYDENDKLIREVKVITLKSKLVSDFRKDFQFYKVREINNYHHAHDAYLNAVVGTALIKKYPKLESEFVYGDYKVYDVRKMIAKSEQEIGKATAKYFFYSNIMNFFKTEITLANGEIRKRPLIETNGETGEIVWDKGRDFATVRKVLSMPQVNIVKKTEVQTGGFSKESILPKRNSDKLIARKKDWDPKKYGGFDSPTVAYSVLVVAKVEKGKSKKLKSVKELLGITIMERSSFEKNPIDFLEAKGYKEVKKDLIIKLPKYSLFELENGRKRMLASAGELQKGNELALPSKYVNFLYLASHYEKLKGSPEDNEQKQLFVEQHKHYLDEIIEQISEFSKRVILADANLDKVLSAYNKHRDKPIREQAENIIHLFTLTNLGAPAAFKYFDTTIDRKRYTSTKEVLDATLIHQSITGLYETRIDLSQLGGDGGGGSGGGGGVPWILKKPLELTIKLDLEEQQGTLLNNSILSKKGKEELKQLFEKYSALWQSWENQVGHRRIRPHKIATGTVKPTPQKQYHINPKAKPDIQIVINDLLKQGVLIQKESTMNTPVYPVPKPNGRWRMVLDYRAVNKVTPLIAVQNQHSYGILGSLFKGRYKTTIDLSNGFWAHPIVPEDYWITAFTWQGKQYCWTVLPQGFLNSPGLFNGDVVDLLQGIPNVEVYVDDVYISHDSEKEHLEYLDILFNRLKEAGYIISLKKSNIANSIVDFLGFQITNEGRGLTDTFKEKLENITAPTTLKQLQSILGLLNFARNFIPDFTELIAPLYALIPKSPKNYVPWQIEHSTTLETLITKLNGAEYLQGRKGDKTLIMKVNASYTTGYIRYYNEGEKKPISYVSIVFSKTELKFTELEKLLTTVHKGLLKALDLSMGQNIHVYSPIVSMQNIQKTPQTAKKALASRWLSWLSYLEDPRIRFFYDPQMPALKDLPAVDTGKDNKKHPSNFQHIFYTDGSAITSPTKEGHLNAGMGIVYFINKDGNLQKQQEWSISLGNHTAQFAEIAAFEFALKKCLPLGGNILVVTDSNYVAKAYNEELDVWASNGFVNNRKKPLKHISKWKSVADLKRLRPDVVVTHEPGHQKLDSSPHAYGNNLADQLATQASFKVHAGKRTADGSEFEKRTADGSEFESPKKKAKVE

SEQ ID NO: 6572 - protein, 2090 aa, synthetic construct
MPAAKRVKLDGGDKKYSIGLDIGTNSVGWAVITDEYKVPSKKFKVLGNTDRHSIKKNLIGALLFDSGETAEATRLKRTARRRYTRRKNRICYLQEIFSNEMAKVDDSFFHRLEESFLVEEDKKHERHPIFGNIVDEVAYHEKYPTIYHLRKKLVDSTDKADLRLIYLALAHMIKFRGHFLIEGDLNPDNSDVDKLFIQLVQTYNQLFEENPINASGVDAKAILSARLSKSRRLENLIAQLPGEKKNGLFGNLIALSLGLTPNFKSNFDLAEDAKLQLSKDTYDDDLDNLLAQIGDQYADLFLAAKNLSDAILLSDILRVNTEITKAPLSASMIKRYDEHHQDLTLLKALVRQQLPEKYKEIFFDQSKNGYAGYIDGGASQEEFYKFIKPILEKMDGTEELLVKLNREDLLRKQRTFDNGSIPHQIHLGELHAILRRQEDFYPFLKDNREKIEKILTFRIPYYVGPLARGNSRFAWMTRKSEETITPWNFEEVVDKGASAQSFIERMTNFDKNLPNEKVLPKHSLLYEYFTVYNELTKVKYVTEGMRKPAFLSGEQKKAIVDLLFKTNRKVTVKQLKEDYFKKIECFDSVEISGVEDRFNASLGTYHDLLKIIKDKDFLDNEENEDILEDIVLTLTLFEDREMIEERLKTYAHLFDDKVMKQLKRRRYTGWGRLSRKLINGIRDKQSGKTILDFLKSDGFANRNFMQLIHDDSLTFKEDIQKAQVSGQGDSLHEHIANLAGSPAIKKGILQTVKVVDELVKVMGRHKPENIVIEMARENQTTQKGQKNSRERMKRIEEGIKELGSQILKEHPVENTQLQNEKLYLYYLQNGRDMYVDQELDINRLSDYDVDHIVPQSFLKDDSIDNKVLTRSDKARGKSDNVPSEEVVKKMKNYWRQLLNAKLITQRKFDNLTKAERGGLSELDKAGFIKRQLVETRQITKHVAQILDSRMNTKYDENDKLIREVKVITLKSKLVSDFRKDFQFYKVREINNYHHAHDAYLNAVVGTALIKKYPKLESEFVYGDYKVYDVRKMIAKSEQEIGKATAKYFFYSNIMNFFKTEITLANGEIRKRPLIETNGETGEIVWDKGRDFATVRKVLSMPQVNIVKKTEVQTGGFSKESILPKRNSDKLIARKKDWDPKKYGGFDSPTVAYSVLVVAKVEKGKSKKLKSVKELLGITIMERSSFEKNPIDFLEAKGYKEVKKDLIIKLPKYSLFELENGRKRMLASAGELQKGNELALPSKYVNFLYLASHYEKLKGSPEDNEQKQLFVEQHKHYLDEIIEQISEFSKRVILADANLDKVLSAYNKHRDKPIREQAENIIHLFTLTNLGAPAAFKYFDTTIDRKRYTSTKEVLDATLIHQSITGLYETRIDLSQLGGDGGGGSGGGGGTLQLEEEYRLFEPESTQKQEMDIWLKNFPQAWAETGGMGTAHCQAPVLIQLKATATPISIRQYPMPHEAYQGIKPHIRRMLDQGILKPCQSPWNTPLLPVKKPGTEDYRPVQDLREVNKRVEDIHPTVPNPYNLLSTLPPSHPWYTVLDLKDAFFCLRLHSESQLLFAFEWRDPEIGLSGQLTWTRLPQGFKNSPTLFNEALHSDLADFRVRYPALVLLQYVDDLLLAAATRTECLEGTKALLETLGNKGYRASAKKAQICLQEVTYLGYSLKDGQRWLTKARKEAILSIPVPKNSRQVREFLGKAGYCRLFIPGFAELAAPLYPLTRPGTLFQWGTEQQLAFEDIKKALLSSPALGLPDITKPFELFIDENSGFAKGVLVQKLGPWKRPVAYLSKKLDTVASGWPPCLRMVAAIAILVKDAGKLTLGQPLTILTSHPVEALVRQPPNKWLSNARMTHYQAMLLDAERVHFGPTVSLNPATLLPLPSGGNHHDCLQILAETHGTRPDLTDQPLPDADLTWYTDGSSFIRNGEREAGAAVTTESEVIWAAPLPPGTSAQRAELIALTQALKMAEGKKLTVYTDSRYAFATTHVHGEIYRRRGWLTSEGKEIKNKNEILALLEALFLPKRLSIIHCPGHQKGDSPQAKGNRLADDTAKKAATETHSSLTVLPAGKRTADGSEFEKRTADGSEFESPKKKAKVE

SEQ ID NO: 6573 - protein, 2082 aa, synthetic construct
MPAAKRVKLDGGDKKYSIGLDIGTNSVGWAVITDEYKVPSKKFKVLGNTDRHSIKKNLIGALLFDSGETAEATRLKRTARRRYTRRKNRICYLQEIFSNEMAKVDDSFFHRLEESFLVEEDKKHERHPIFGNIVDEVAYHEKYPTIYHLRKKLVDSTDKADLRLIYLALAHMIKFRGHFLIEGDLNPDNSDVDKLFIQLVQTYNQLFEENPINASGVDAKAILSARLSKSRRLENLIAQLPGEKKNGLFGNLIALSLGLTPNFKSNFDLAEDAKLQLSKDTYDDDLDNLLAQIGDQYADLFLAAKNLSDAILLSDILRVNTEITKAPLSASMIKRYDEHHQDLTLLKALVRQQLPEKYKEIFFDQSKNGYAGYIDGGASQEEFYKFIKPILEKMDGTEELLVKLNREDLLRKQRTFDNGSIPHQIHLGELHAILRRQEDFYPFLKDNREKIEKILTFRIPYYVGPLARGNSRFAWMTRKSEETITPWNFEEVVDKGASAQSFIERMTNFDKNLPNEKVLPKHSLLYEYFTVYNELTKVKYVTEGMRKPAFLSGEQKKAIVDLLFKTNRKVTVKQLKEDYFKKIECFDSVEISGVEDRFNASLGTYHDLLKIIKDKDFLDNEENEDILEDIVLTLTLFEDREMIEERLKTYAHLFDDKVMKQLKRRRYTGWGRLSRKLINGIRDKQSGKTILDFLKSDGFANRNFMQLIHDDSLTFKEDIQKAQVSGQGDSLHEHIANLAGSPAIKKGILQTVKVVDELVKVMGRHKPENIVIEMARENQTTQKGQKNSRERMKRIEEGIKELGSQILKEHPVENTQLQNEKLYLYYLQNGRDMYVDQELDINRLSDYDVDHIVPQSFLKDDSIDNKVLTRSDKARGKSDNVPSEEVVKKMKNYWRQLLNAKLITQRKFDNLTKAERGGLSELDKAGFIKRQLVETRQITKHVAQILDSRMNTKYDENDKLIREVKVITLKSKLVSDFRKDFQFYKVREINNYHHAHDAYLNAVVGTALIKKYPKLESEFVYGDYKVYDVRKMIAKSEQEIGKATAKYFFYSNIMNFFKTEITLANGEIRKRPLIETNGETGEIVWDKGRDFATVRKVLSMPQVNIVKKTEVQTGGFSKESILPKRNSDKLIARKKDWDPKKYGGFDSPTVAYSVLVVAKVEKGKSKKLKSVKELLGITIMERSSFEKNPIDFLEAKGYKEVKKDLIIKLPKYSLFELENGRKRMLASAGELQKGNELALPSKYVNFLYLASHYEKLKGSPEDNEQKQLFVEQHKHYLDEIIEQISEFSKRVILADANLDKVLSAYNKHRDKPIREQAENIIHLFTLTNLGAPAAFKYFDTTIDRKRYTSTKEVLDATLIHQSITGLYETRIDLSQLGGDGGGGSGGGGGVPWLTQQPLQLTILVPLQEYQEKILSKTALPEDQKQQLKTLFVKYDNLWQHWENQVGHRKIRPHNIATGDYPPRPQKQYPINPKAKPSIQIVIDDLLKQGVLTPQNSTMNTPVYPVPKPDGRWRMVLDYREVNKTIPLTAAQNQHSAGILATIVRQKYKTTLDLANGFWAHPITPESYWLTAFTWQGKQYCWTRLPQGFLNSPALFNADVVDLLKEIPNVQVYVDDIYLSHDDPKEHVQQLEKVFQILLQAGYVVSLKKSEIGQKTVEFLGFNITKEGRGLTDTFKTKLLNITPPKDLKQLQSILGLLNFARNFIPNFAELVQPLYNLIAPAKGKYIEWSEENTKQLNMVIEALNTASNLEERLPEQRLVIKVNTSPSAGYVRYYNETGKKPIMYLNYVFSKAELKFSMLEKLLTTMHKALIKAMDLAMGQEILVYSPIVSMTKIQKTPLPERKALPIRWITWMTYLEDPRIQFHYDKTLPELKHIPDVYTSSQSPVKHPSQYEGVFYTDGSAIKSPDPTKSNNAGMGIVHATYKPEYQVLNQWSIPLGNHTAQMAEIAAVEFACKKALKIPGPVLVITDSFYVAESANKELPYWKSNGFVNNKKKPLKHISKWKSIAECLSMKPDITIQHEKGISLQIPVFILKGNALADKLATQGSYVVNAGKRTADGSEFEKRTADGSEFESPKKKAKVE

SEQ ID NO: 6574 - protein, 2171 aa, synthetic construct
MPAAKRVKLDGGDKKYSIGLDIGTNSVGWAVITDEYKVPSKKFKVLGNTDRHSIKKNLIGALLFDSGETAEATRLKRTARRRYTRRKNRICYLQEIFSNEMAKVDDSFFHRLEESFLVEEDKKHERHPIFGNIVDEVAYHEKYPTIYHLRKKLVDSTDKADLRLIYLALAHMIKFRGHFLIEGDLNPDNSDVDKLFIQLVQTYNQLFEENPINASGVDAKAILSARLSKSRRLENLIAQLPGEKKNGLFGNLIALSLGLTPNFKSNFDLAEDAKLQLSKDTYDDDLDNLLAQIGDQYADLFLAAKNLSDAILLSDILRVNTEITKAPLSASMIKRYDEHHQDLTLLKALVRQQLPEKYKEIFFDQSKNGYAGYIDGGASQEEFYKFIKPILEKMDGTEELLVKLNREDLLRKQRTFDNGSIPHQIHLGELHAILRRQEDFYPFLKDNREKIEKILTFRIPYYVGPLARGNSRFAWMTRKSEETITPWNFEEVVDKGASAQSFIERMTNFDKNLPNEKVLPKHSLLYEYFTVYNELTKVKYVTEGMRKPAFLSGEQKKAIVDLLFKTNRKVTVKQLKEDYFKKIECFDSVEISGVEDRFNASLGTYHDLLKIIKDKDFLDNEENEDILEDIVLTLTLFEDREMIEERLKTYAHLFDDKVMKQLKRRRYTGWGRLSRKLINGIRDKQSGKTILDFLKSDGFANRNFMQLIHDDSLTFKEDIQKAQVSGQGDSLHEHIANLAGSPAIKKGILQTVKVVDELVKVMGRHKPENIVIEMARENQTTQKGQKNSRERMKRIEEGIKELGSQILKEHPVENTQLQNEKLYLYYLQNGRDMYVDQELDINRLSDYDVDHIVPQSFLKDDSIDNKVLTRSDKARGKSDNVPSEEVVKKMKNYWRQLLNAKLITQRKFDNLTKAERGGLSELDKAGFIKRQLVETRQITKHVAQILDSRMNTKYDENDKLIREVKVITLKSKLVSDFRKDFQFYKVREINNYHHAHDAYLNAVVGTALIKKYPKLESEFVYGDYKVYDVRKMIAKSEQEIGKATAKYFFYSNIMNFFKTEITLANGEIRKRPLIETNGETGEIVWDKGRDFATVRKVLSMPQVNIVKKTEVQTGGFSKESILPKRNSDKLIARKKDWDPKKYGGFDSPTVAYSVLVVAKVEKGKSKKLKSVKELLGITIMERSSFEKNPIDFLEAKGYKEVKKDLIIKLPKYSLFELENGRKRMLASAGELQKGNELALPSKYVNFLYLASHYEKLKGSPEDNEQKQLFVEQHKHYLDEIIEQISEFSKRVILADANLDKVLSAYNKHRDKPIREQAENIIHLFTLTNLGAPAAFKYFDTTIDRKRYTSTKEVLDATLIHQSITGLYETRIDLSQLGGDGGGGSGGGGGMNPLQLLQPLPAEIKGTKLLAHWNSGATITCIPESFLEDEQPIKKTLIKTIHGEKQQNVYYVTFKVKGRKVEAEVIASPYEYILLSPTDVPWLTQQPLQLTILVPLQEYQEKILSKTALPEDQKQQLKTLFVKYDNLWQHWENQVGHRKIRPHNIATGDYPPRPQKQYPINPKAKPSIQIVIDDLLKQGVLTPQNSTMNTPVYPVPKPDGRWRMVLDYREVNKTIPLTAAQNQHSAGILATIVRQKYKTTLDLANGFWAHPITPESYWLTAFTWQGKQYCWTRLPQGFLNSPALFNADVVDLLKEIPNVQVYVDDIYLSHDDPKEHVQQLEKVFQILLQAGYVVSLKKSEIGQKTVEFLGFNITKEGRGLTDTFKTKLLNITPPKDLKQLQSILGKLNFARNFIPNFAELVQPLYNLIAPAKGKYIEWSEENTKQLNMVIEALNTASNLEERLPEQRLVIKVNTSPSAGYVRYYNETGKKPIMYLNYVFSKAELKFSMLEKLLTTMHKALIKAMDLAMGQEILVYSPIVSMTKIQKTPLPERKALPIRWITWMTYLEDPRIQFHYDKTLPELKHIPDVYTSSQSPVKHPSQYEGVFYTDGSAIKSPDPTKSNNAGMGIVHATYKPEYQVLNQWSIPLGNHTAQMAEIAAVEFACKKALKIPGPVLVITDSFYVAESANKELPYWKSNGFVNNKKKPLKHISKWKSIAECLSMKPDITIQHEKGISLQIPVFILKGNALADKLATQGSYVVNAGKRTADGSEFEKRTADGSEFESPKKKAKVE

SEQ ID NO: 6575 - protein, 2213 aa, synthetic construct
MPAAKRVKLDGGDKKYSIGLDIGTNSVGWAVITDEYKVPSKKFKVLGNTDRHSIKKNLIGALLFDSGETAEATRLKRTARRRYTRRKNRICYLQEIFSNEMAKVDDSFFHRLEESFLVEEDKKHERHPIFGNIVDEVAYHEKYPTIYHLRKKLVDSTDKADLRLIYLALAHMIKFRGHFLIEGDLNPDNSDVDKLFIQLVQTYNQLFEENPINASGVDAKAILSARLSKSRRLENLIAQLPGEKKNGLFGNLIALSLGLTPNFKSNFDLAEDAKLQLSKDTYDDDLDNLLAQIGDQYADLFLAAKNLSDAILLSDILRVNTEITKAPLSASMIKRYDEHHQDLTLLKALVRQQLPEKYKEIFFDQSKNGYAGYIDGGASQEEFYKFIKPILEKMDGTEELLVKLNREDLLRKQRTFDNGSIPHQIHLGELHAILRRQEDFYPFLKDNREKIEKILTFRIPYYVGPLARGNSRFAWMTRKSEETITPWNFEEVVDKGASAQSFIERMTNFDKNLPNEKVLPKHSLLYEYFTVYNELTKVKYVTEGMRKPAFLSGEQKKAIVDLLFKTNRKVTVKQLKEDYFKKIECFDSVEISGVEDRFNASLGTYHDLLKIIKDKDFLDNEENEDILEDIVLTLTLFEDREMIEERLKTYAHLFDDKVMKQLKRRRYTGWGRLSRKLINGIRDKQSGKTILDFLKSDGFANRNFMQLIHDDSLTFKEDIQKAQVSGQGDSLHEHIANLAGSPAIKKGILQTVKVVDELVKVMGRHKPENIVIEMARENQTTQKGQKNSRERMKRIEEGIKELGSQILKEHPVENTQLQNEKLYLYYLQNGRDMYVDQELDINRLSDYDVDHIVPQSFLKDDSIDNKVLTRSDKARGKSDNVPSEEVVKKMKNYWRQLLNAKLITQRKFDNLTKAERGGLSELDKAGFIKRQLVETRQITKHVAQILDSRMNTKYDENDKLIREVKVITLKSKLVSDFRKDFQFYKVREINNYHHAHDAYLNAVVGTALIKKYPKLESEFVYGDYKVYDVRKMIAKSEQEIGKATAKYFFYSNIMNFFKTEITLANGEIRKRPLIETNGETGEIVWDKGRDFATVRKVLSMPQVNIVKKTEVQTGGFSKESILPKRNSDKLIARKKDWDPKKYGGFDSPTVAYSVLVVAKVEKGKSKKLKSVKELLGITIMERSSFEKNPIDFLEAKGYKEVKKDLIIKLPKYSLFELENGRKRMLASAGELQKGNELALPSKYVNFLYLASHYEKLKGSPEDNEQKQLFVEQHKHYLDEIIEQISEFSKRVILADANLDKVLSAYNKHRDKPIREQAENIIHLFTLTNLGAPAAFKYFDTTIDRKRYTSTKEVLDATLIHQSITGLYETRIDLSQLGGDGGGGSGGGGGTLGDQGSRGSDPLPEPRVTLTVEGIPTEFLVNTGAEHSVLTKPMGKMGSKRTVVAGATGSKVYPWTTKRLLKIGQKQVTHSFLVIPECPAPLLGRDLLTKLKAQIQFSTEGPQVTWEDRPAMCLVLNLEEEYRLHEKPVPPSIDPSWLQLFPMVWAEKAGMGLANQVPPVVVELKSDASPVAVRQYPMSKEAREGIRPHIQRFLDLGILVPCQSPWNTPLLPVKKPGTNDYRPVQDLREVNKRVQDIHPTVPNPYNLLSSLPPSHTWYSVLDLKDAFFCLKLHPNSQPLFAFEWRDPEKGNTGQLTWTRLPQGFKNSPTLFNEALHRDLASFRALNPQVVMLQYVDDLLVAAPTYRDCKEGTRRLLQELSKLGYRVSAKKAQLCREEVTYLGYLLKGGKRWLTPARKATVMKIPTPTTPRQVREFLGKAGFCRLFIPGFASLAAPLYPLTRPKVPFTWTEAHQEAFGRIKEALLSAPALALPDLTKPFALYVDEKEGVARGVLTQTLGPWRRPVAYLSKKLDPVASGWPTCLKAIAAVALLLKDADKLTLGQNVLVIAPHNLESIVRQPPDRWMTNARMTHYQSLLLNERVSFAPPAILNPATLLPVESDDTPIHICSEILAEETGTRPDLRDQPLPGVPAWYTDGSSFIMDGRRQAGAAIVDNKRTVWASNLPEGTSAQKAELIALTQALRLAEGKSINIYTDSRYAFATAHVHGAIYKQRGWLTSAGKDIKNKEEILALLEAIHLPKRVAIIHCPGHQRGTDPVATGNRKADEAAKQAAQSTRILTETTKNAGKRTADGSEFEKRTADGSEFESPKKKAKVE

SEQ ID NO: 6576 - protein, 2091 aa, synthetic construct
MPAAKRVKLDGGDKKYSIGLDIGTNSVGWAVITDEYKVPSKKFKVLGNTDRHSIKKNLIGALLFDSGETAEATRLKRTARRRYTRRKNRICYLQEIFSNEMAKVDDSFFHRLEESFLVEEDKKHERHPIFGNIVDEVAYHEKYPTIYHLRKKLVDSTDKADLRLIYLALAHMIKFRGHFLIEGDLNPDNSDVDKLFIQLVQTYNQLFEENPINASGVDAKAILSARLSKSRRLENLIAQLPGEKKNGLFGNLIALSLGLTPNFKSNFDLAEDAKLQLSKDTYDDDLDNLLAQIGDQYADLFLAAKNLSDAILLSDILRVNTEITKAPLSASMIKRYDEHHQDLTLLKALVRQQLPEKYKEIFFDQSKNGYAGYIDGGASQEEFYKFIKPILEKMDGTEELLVKLNREDLLRKQRTFDNGSIPHQIHLGELHAILRRQEDFYPFLKDNREKIEKILTFRIPYYVGPLARGNSRFAWMTRKSEETITPWNFEEVVDKGASAQSFIERMTNFDKNLPNEKVLPKHSLLYEYFTVYNELTKVKYVTEGMRKPAFLSGEQKKAIVDLLFKTNRKVTVKQLKEDYFKKIECFDSVEISGVEDRFNASLGTYHDLLKIIKDKDFLDNEENEDILEDIVLTLTLFEDREMIEERLKTYAHLFDDKVMKQLKRRRYTGWGRLSRKLINGIRDKQSGKTILDFLKSDGFANRNFMQLIHDDSLTFKEDIQKAQVSGQGDSLHEHIANLAGSPAIKKGILQTVKVVDELVKVMGRHKPENIVIEMARENQTTQKGQKNSRERMKRIEEGIKELGSQILKEHPVENTQLQNEKLYLYYLQNGRDMYVDQELDINRLSDYDVDHIVPQSFLKDDSIDNKVLTRSDKARGKSDNVPSEEVVKKMKNYWRQLLNAKLITQRKFDNLTKAERGGLSELDKAGFIKRQLVETRQITKHVAQILDSRMNTKYDENDKLIREVKVITLKSKLVSDFRKDFQFYKVREINNYHHAHDAYLNAVVGTALIKKYPKLESEFVYGDYKVYDVRKMIAKSEQEIGKATAKYFFYSNIMNFFKTEITLANGEIRKRPLIETNGETGEIVWDKGRDFATVRKVLSMPQVNIVKKTEVQTGGFSKESILPKRNSDKLIARKKDWDPKKYGGFDSPTVAYSVLVVAKVEKGKSKKLKSVKELLGITIMERSSFEKNPIDFLEAKGYKEVKKDLIIKLPKYSLFELENGRKRMLASAGELQKGNELALPSKYVNFLYLASHYEKLKGSPEDNEQKQLFVEQHKHYLDEIIEQISEFSKRVILADANLDKVLSAYNKHRDKPIREQAENIIHLFTLTNLGAPAAFKYFDTTIDRKRYTSTKEVLDATLIHQSITGLYETRIDLSQLGGDGGGGSGGGGGTLNLEDEYRLYETSAEPEVSPGSTWLSDFPQAWAETGGMGLAVRQAPLIIPLKATSTPVSIKQYPMSQEAKLGIKPHIQRLLDQGILVPCQSPWNTPLLPVKKPGTNDYRPVQDLREVNKRVEDIHPTVPNPYNLLSGLPPSHRWYTVLDLKDAFFCLRLHPTSQPLFAFEWRDPGMGISGQLTWTRLPQGFKNSPTLFNEALHRDLADFRIQHPDLILLQYVDDILLAATSELDCQQGTRALLLTLGNLGYRASAKKAQLCQKQVKYLGYLLKEGQRWLTEARKETVMGQPTPKTPRQLREFLGTAGFCRLWIPGFAEMAAPLYPLTKPGTLFNWGPDQQKAYQEIKQALLTAPALGLPDLTKPFELFVDEKQGYAKGVLTQKLGPWRRPVAYLSKKLDPVAAGWPPCLRMVAAIAVLRKDAGKLTMGQPLVILAPHAVEALVKQPPDRWLSNARMTHYQAMLLDTDRVQFGPVVALNPATLLPLPEEGAPHDCLEILAETHGTRPDLTDQPIPDADHTWYTDGSSFLQEGQRKAGAAVTTETEVIWARALPAGTSAQRAELIALTQALKMAEGKRLNVYTDSRYAFATAHIHGEIYRRRGWLTSEGREIKNKSEILALLKALFLPKRLSIIHCLGHQKGDSAEARGNRLADQAAREAAIKTPPDTSTLLAGKRTADGSEFEKRTADGSEFESPKKKAKVE

SEQ ID NO: 6577 - protein, 2091 aa, synthetic construct
MPAAKRVKLDGGDKKYSIGLDIGTNSVGWAVITDEYKVPSKKFKVLGNTDRHSIKKNLIGALLFDSGETAEATRLKRTARRRYTRRKNRICYLQEIFSNEMAKVDDSFFHRLEESFLVEEDKKHERHPIFGNIVDEVAYHEKYPTIYHLRKKLVDSTDKADLRLIYLALAHMIKFRGHFLIEGDLNPDNSDVDKLFIQLVQTYNQLFEENPINASGVDAKAILSARLSKSRRLENLIAQLPGEKKNGLFGNLIALSLGLTPNFKSNFDLAEDAKLQLSKDTYDDDLDNLLAQIGDQYADLFLAAKNLSDAILLSDILRVNTEITKAPLSASMIKRYDEHHQDLTLLKALVRQQLPEKYKEIFFDQSKNGYAGYIDGGASQEEFYKFIKPILEKMDGTEELLVKLNREDLLRKQRTFDNGSIPHQIHLGELHAILRRQEDFYPFLKDNREKIEKILTFRIPYYVGPLARGNSRFAWMTRKSEETITPWNFEEVVDKGASAQSFIERMTNFDKNLPNEKVLPKHSLLYEYFTVYNELTKVKYVTEGMRKPAFLSGEQKKAIVDLLFKTNRKVTVKQLKEDYFKKIECFDSVEISGVEDRFNASLGTYHDLLKIIKDKDFLDNEENEDILEDIVLTLTLFEDREMIEERLKTYAHLFDDKVMKQLKRRRYTGWGRLSRKLINGIRDKQSGKTILDFLKSDGFANRNFMQLIHDDSLTFKEDIQKAQVSGQGDSLHEHIANLAGSPAIKKGILQTVKVVDELVKVMGRHKPENIVIEMARENQTTQKGQKNSRERMKRIEEGIKELGSQILKEHPVENTQLQNEKLYLYYLQNGRDMYVDQELDINRLSDYDVDHIVPQSFLKDDSIDNKVLTRSDKARGKSDNVPSEEVVKKMKNYWRQLLNAKLITQRKFDNLTKAERGGLSELDKAGFIKRQLVETRQITKHVAQILDSRMNTKYDENDKLIREVKVITLKSKLVSDFRKDFQFYKVREINNYHHAHDAYLNAVVGTALIKKYPKLESEFVYGDYKVYDVRKMIAKSEQEIGKATAKYFFYSNIMNFFKTEITLANGEIRKRPLIETNGETGEIVWDKGRDFATVRKVLSMPQVNIVKKTEVQTGGFSKESILPKRNSDKLIARKKDWDPKKYGGFDSPTVAYSVLVVAKVEKGKSKKLKSVKELLGITIMERSSFEKNPIDFLEAKGYKEVKKDLIIKLPKYSLFELENGRKRMLASAGELQKGNELALPSKYVNFLYLASHYEKLKGSPEDNEQKQLFVEQHKHYLDEIIEQISEFSKRVILADANLDKVLSAYNKHRDKPIREQAENIIHLFTLTNLGAPAAFKYFDTTIDRKRYTSTKEVLDATLIHQSITGLYETRIDLSQLGGDGGGGSGGGGGTLGIEDEYRLHETSTEPDVSLGSTWLSDFPQAWAETGGMGLAVRQAPLIIPLKATSTPVSIQQYPMSHEARLGIKPHIQRLLDQGILVPCQSPWNTPLLPVKKPGTNDYRPVQDLREVNKRVEDIHPTVPNPYNLLSGLPPSHQWYTVLDLKDAFFCLRLHPTSQPLFAFEWRDPGMGISGQLTWTRLPQGFKNSPTLFNEALHRDLADFRIQHPDLILLQYVDDILLAATSELDCQQGTRALLQTLGDLGYRASAKKAQICQKQVKYLGYLLREGQRWLTEARKETVMGQPVPKTPRQLREFLGTAGFCRLWIPGFAEMAAPLYPLTKPGTLFSWGPDQQKAYQEIKQALLTAPALGLPDLTKPFELFVDEKQGYAKGVLTQKLGPWRRPVAYLSKKLDPVAAGWPPCLRMVAAIAVLTKDAGKLTMGQPLVILAPHAVEALVKQPPDRWLSNARMTHYQAMLLDTDRVQFGPVVALNPATLLPLPEEGAPHDCLEILAETHGTRPDLTDQPIPDADHTWYTDGSSFLQEGQRKAGAAVTTETEVIWAGALPAGTSAQRAELIALTQALKMAEGKRLNVYTDSRYAFATAHIHGEIYRRRGWLTSEGREIKNKSEILALLKALFLPKRLSIIHCLGHQKGDSAEARGNRLADQAAREAAIKTPPDTSTLLAGKRTADGSEFEKRTADGSEFESPKKKAKVE

SEQ ID NO: 6578 - protein, 2091 aa, synthetic construct
MPAAKRVKLDGGDKKYSIGLDIGTNSVGWAVITDEYKVPSKKFKVLGNTDRHSIKKNLIGALLFDSGETAEATRLKRTARRRYTRRKNRICYLQEIFSNEMAKVDDSFFHRLEESFLVEEDKKHERHPIFGNIVDEVAYHEKYPTIYHLRKKLVDSTDKADLRLIYLALAHMIKFRGHFLIEGDLNPDNSDVDKLFIQLVQTYNQLFEENPINASGVDAKAILSARLSKSRRLENLIAQLPGEKKNGLFGNLIALSLGLTPNFKSNFDLAEDAKLQLSKDTYDDDLDNLLAQIGDQYADLFLAAKNLSDAILLSDILRVNTEITKAPLSASMIKRYDEHHQDLTLLKALVRQQLPEKYKEIFFDQSKNGYAGYIDGGASQEEFYKFIKPILEKMDGTEELLVKLNREDLLRKQRTFDNGSIPHQIHLGELHAILRRQEDFYPFLKDNREKIEKILTFRIPYYVGPLARGNSRFAWMTRKSEETITPWNFEEVVDKGASAQSFIERMTNFDKNLPNEKVLPKHSLLYEYFTVYNELTKVKYVTEGMRKPAFLSGEQKKAIVDLLFKTNRKVTVKQLKEDYFKKIECFDSVEISGVEDRFNASLGTYHDLLKIIKDKDFLDNEENEDILEDIVLTLTLFEDREMIEERLKTYAHLFDDKVMKQLKRRRYTGWGRLSRKLINGIRDKQSGKTILDFLKSDGFANRNFMQLIHDDSLTFKEDIQKAQVSGQGDSLHEHIANLAGSPAIKKGILQTVKVVDELVKVMGRHKPENIVIEMARENQTTQKGQKNSRERMKRIEEGIKELGSQILKEHPVENTQLQNEKLYLYYLQNGRDMYVDQELDINRLSDYDVDHIVPQSFLKDDSIDNKVLTRSDKARGKSDNVPSEEVVKKMKNYWRQLLNAKLITQRKFDNLTKAERGGLSELDKAGFIKRQLVETRQITKHVAQILDSRMNTKYDENDKLIREVKVITLKSKLVSDFRKDFQFYKVREINNYHHAHDAYLNAVVGTALIKKYPKLESEFVYGDYKVYDVRKMIAKSEQEIGKATAKYFFYSNIMNFFKTEITLANGEIRKRPLIETNGETGEIVWDKGRDFATVRKVLSMPQVNIVKKTEVQTGGFSKESILPKRNSDKLIARKKDWDPKKYGGFDSPTVAYSVLVVAKVEKGKSKKLKSVKELLGITIMERSSFEKNPIDFLEAKGYKEVKKDLIIKLPKYSLFELENGRKRMLASAGELQKGNELALPSKYVNFLYLASHYEKLKGSPEDNEQKQLFVEQHKHYLDEIIEQISEFSKRVILADANLDKVLSAYNKHRDKPIREQAENIIHLFTLTNLGAPAAFKYFDTTIDRKRYTSTKEVLDATLIHQSITGLYETRIDLSQLGGDGGGGSGGGGGTLNIEDEHRLHETSKEPDVSLGSTWLSDFPQAWAETGGMGLAVRQAPLIIPLKATSTPVSIKQYPMSQEARLGIKPHIQRLLDQGILVPCQSPWNTPLLPVKKPGTNDYRPVQDLREVNKRVEDIHPTVPNPYNLLSGLPPSHQWYTVLDLKDAFFCLRLHPTSQPLFAFEWRDPEMGISGQLTWTRLPQGFKNSPTLFNEALHRDLADFRIQHPDLILLQYVDDLLLAATSELDCQQGTRALLQTLGNLGYRASAKKAQICQKQVKYLGYLLKEGQRWLTEARKETVMGQPTPKTPRQLREFLGTAGFCRLWIPGFAEMAAPLYPLTKPGTLFNWGPDQQKAYQEIKQALLTAPALGLPDLTKPFELFVDEKQGYAKGVLTQKLGPWRRPVAYLSKKLDPVAAGWPPCLRMVAAIAVLTKDAGKLTMGQPLVILAPHAVEALVKQPPDRWLSNARMTHYQALLLDTDRVQFGPVVALNPATLLPLPEEGLQHNCLDILAEAHGTRPDLTDQPLPDADHTWYTDGSSLLQEGQRKAGAAVTTETEVIWAKALPAGTSAQRAELIALTQALKMAEGKKLNVYTDSRYAFATAHIHGEIYRRRGWLTSEGKEIKNKDEILALLKALFLPKRLSIIHCPGHQKGHSAEARGNRMADQAARKAAITETPDTSTLLAGKRTADGSEFEKRTADGSEFESPKKKAKVE

SEQ ID NO: 6579 - protein, 2091 aa, synthetic construct; identical to SEQ ID NO: 6578

SEQ ID NO: 6580 - protein, 2082 aa, synthetic construct
MPAAKRVKLDGGDKKYSIGLDIGTNSVGWAVITDEYKVPSKKFKVLGNTDRHSIKKNLIGALLFDSGETAEATRLKRTARRRYTRRKNRICYLQEIFSNEMAKVDDSFFHRLEESFLVEEDKKHERHPIFGNIVDEVAYHEKYPTIYHLRKKLVDSTDKADLRLIYLALAHMIKFRGHFLIEGDLNPDNSDVDKLFIQLVQTYNQLFEENPINASGVDAKAILSARLSKSRRLENLIAQLPGEKKNGLFGNLIALSLGLTPNFKSNFDLAEDAKLQLSKDTYDDDLDNLLAQIGDQYADLFLAAKNLSDAILLSDILRVNTEITKAPLSASMIKRYDEHHQDLTLLKALVRQQLPEKYKEIFFDQSKNGYAGYIDGGASQEEFYKFIKPILEKMDGTEELLVKLNREDLLRKQRTFDNGSIPHQIHLGELHAILRRQEDFYPFLKDNREKIEKILTFRIPYYVGPLARGNSRFAWMTRKSEETITPWNFEEVVDKGASAQSFIERMTNFDKNLPNEKVLPKHSLLYEYFTVYNELTKVKYVTEGMRKPAFLSGEQKKAIVDLLFKTNRKVTVKQLKEDYFKKIECFDSVEISGVEDRFNASLGTYHDLLKIIKDKDFLDNEENEDILEDIVLTLTLFEDREMIEERLKTYAHLFDDKVMKQLKRRRYTGWGRLSRKLINGIRDKQSGKTILDFLKSDGFANRNFMQLIHDDSLTFKEDIQKAQVSGQGDSLHEHIANLAGSPAIKKGILQTVKVVDELVKVMGRHKPENIVIEMARENQTTQKGQKNSRERMKRIEEGIKELGSQILKEHPVENTQLQNEKLYLYYLQNGRDMYVDQELDINRLSDYDVDHIVPQSFLKDDSIDNKVLTRSDKARGKSDNVPSEEVVKKMKNYWRQLLNAKLITQRKFDNLTKAERGGLSELDKAGFIKRQLVETRQITKHVAQILDSRMNTKYDENDKLIREVKVITLKSKLVSDFRKDFQFYKVREINNYHHAHDAYLNAVVGTALIKKYPKLESEFVYGDYKVYDVRKMIAKSEQEIGKATAKYFFYSNIMNFFKTEITLANGEIRKRPLIETNGETGEIVWDKGRDFATVRKVLSMPQVNIVKKTEVQTGGFSKESILPKRNSDKLIARKKDWDPKKYGGFDSPTVAYSVLVVAKVEKGKSKKLKSVKELLGITIMERSSFEKNPIDFLEAKGYKEVKKDLIIKLPKYSLFELENGRKRMLASAGELQKGNELALPSKYVNFLYLASHYEKLKGSPEDNEQKQLFVEQHKHYLDEIIEQISEFSKRVILADANLDKVLSAYNKHRDKPIREQAENIIHLFTLTNLGAPAAFKYFDTTIDRKRYTSTKEVLDATLIHQSITGLYETRIDLSQLGGDGGGGSGGGGGIPWLMKKPLQLTTLVPLQEYEERLLKQTMLTGSYKEKLQSLFLKYDALWQHWENQVGHRRIKPHHIATGTVNPRPQKQYPINPKAKASIQTVINDLLKQGVLIQQNSIMNTPVYPVPKPDGKWRMVLDYREVNKTIPLIAAQNQHSAGILSSIFRGKYKTTLDLSNGFWAHSITPESYWLTAFTWLGQQYCWTRLPQGFLNSPALFNADVVDLLKEVPNVQVYVDDIYISHDDPREHLEQLEKVFSLLLNAGYVVSLKKSEIAQHEVEFLGFNITKEGRGLTETFKQKLLNITPPRDLKQLQSILGLLNFARNFIPNFSELVKPLYNIIATAPGKYITWTTDNSQQLQNIISMLNSAENLEERNPEVRLIMKVNTSPSAGYIRFYNEFAKRPIMYLNYVYTKAEVKFTNTEKLLTTIHKGLIKALDLGMGQEILVYSPIVSMTKIQKTPLPERKALPIRWITWMSYLEDPRIQFHYDKTLPELQQVPTVTDDIIAKIKHPSEFSMVFYTDGSAIKHPNVNKSHNAGMGIAQVQFKPEFTVINTWSIPLGDHTAQLAEVAAVEFACKKALKIDGPVLIVTDSFYVAESVNKELPYWQSNGFFNNKKKPLKHVSKWKSIADCIQLKPDIIIIHEKGHQPTASTFHTEGNNLADKLATQGSYVVNAGKRTADGSEFEKRTADGSEFESPKKKAKVE

SEQ ID NO: 6581 - protein, 2089 aa, synthetic construct
MPAAKRVKLDGGDKKYSIGLDIGTNSVGWAVITDEYKVPSKKFKVLGNTDRHSIKKNLIGALLFDSGETAEATRLKRTARRRYTRRKNRICYLQEIFSNEMAKVDDSFFHRLEESFLVEEDKKHERHPIFGNIVDEVAYHEKYPTIYHLRKKLVDSTDKADLRLIYLALAHMIKFRGHFLIEGDLNPDNSDVDKLFIQLVQTYNQLFEENPINASGVDAKAILSARLSKSRRLENLIAQLPGEKKNGLFGNLIALSLGLTPNFKSNFDLAEDAKLQLSKDTYDDDLDNLLAQIGDQYADLFLAAKNLSDAILLSDILRVNTEITKAPLSASMIKRYDEHHQDLTLLKALVRQQLPEKYKEIFFDQSKNGYAGYIDGGASQEEFYKFIKPILEKMDGTEELLVKLNREDLLRKQRTFDNGSIPHQIHLGELHAILRRQEDFYPFLKDNREKIEKILTFRIPYYVGPLARGNSRFAWMTRKSEETITPWNFEEVVDKGASAQSFIERMTNFDKNLPNEKVLPKHSLLYEYFTVYNELTKVKYVTEGMRKPAFLSGEQKKAIVDLLFKTNRKVTVKQLKEDYFKKIECFDSVEISGVEDRFNASLGTYHDLLKIIKDKDFLDNEENEDILEDIVLTLTLFEDREMIEERLKTYAHLFDDKVMKQLKRRRYTGWGRLSRKLINGIRDKQSGKTILDFLKSDGFANRNFMQLIHDDSLTFKEDIQKAQVSGQGDSLHEHIANLAGSPAIKKGILQTVKVVDELVKVMGRHKPENIVIEMARENQTTQKGQKNSRERMKRIEEGIKELGSQILKEHPVENTQLQNEKLYLYYLQNGRDMYVDQELDINRLSDYDVDHIVPQSFLKDDSIDNKVLTRSDKARGKSDNVPSEEVVKKMKNYWRQLLNAKLITQRKFDNLTKAERGGLSELDKAGFIKRQLVETRQITKHVAQILDSRMNTKYDENDKLIREVKVITLKSKLVSDFRKDFQFYKVREINNYHHAHDAYLNAVVGTALIKKYPKLESEFVYGDYKVYDVRKMIAKSEQEIGKATAKYFFYSNIMNFFKTEITLANGEIRKRPLIETNGETGEIVWDKGRDFATVRKVLSMPQVNIVKKTEVQTGGFSKESILPKRNSDKLIARKKDWDPKKYGGFDSPTVAYSVLVVAKVEKGKSKKLKSVKELLGITIMERSSFEKNPIDFLEAKGYKEVKKDLIIKLPKYSLFELENGRKRMLASAGELQKGNELALPSKYVNFLYLASHYEKLKGSPEDNEQKQLFVEQHKHYLDEIIEQISEFSKRVILADANLDKVLSAYNKHRDKPIREQAENIIHLFTLTNLGAPAAFKYFDTTIDRKRYTSTKEVLDATLIHQSITGLYETRIDLSQLGGDGGGGSGGGGGVLNLEEEYRLHEKPVPSSIDPSWLQLFPTVWAERAGMGLANQVPPVVVELRSGASPVAVRQYPMSKEAREGIRPHIQRFLDLGVLVPCQSPWNTPLLPVKKPGTNDYRPVQDLREINKRVQDIHPTVPNPYNLLSSLPPSHTWYSVLDLKDAFFCLKLHPNSQPLFAFEWRDPEKGNTGQLTWTRLPQGFKNSPTLFNEALHRDLAPFRALNPQVVLLQYVDDLLVAAPTYRDCKEGTQKLLQELSKLGYRVSAKKAQLCQKEVTYLGYLLKEGKRWLTPARKATVMKIPPPTTPRQVREFLGKAGFCRLFIPGFASLAAPLYPLTKPSIPFIWTEEHQKAFDRIKEALLSAPALALPDLTKPFTLYVDERAGVARGVLTQTLGPWRRPVAYLSKKLDPVASGWPTCLKAVAAVALLLKDADKLTLGQNVTVIASHSLESIVRQPPDRWMTNARMTHYQSLLLNERVSFAPPAVLNPATLLPVESEATPVHRCSEILAEETGTRRDLKDQPLPGVPAWYTDGSSFIAEGKRRAGAAIVDGKRTVWASSLPEGTSAQKAELVALTQALRLAEGKDINIYTDSRYAFATAHIHGAIYKQRGWLTSAGKDIKNKEEILALLEAIHLPKRVAIIHCPGHQKGNDPVATGNRRADEAAKQAALSTRVLAETTKPAGKRTADGSEFEKRTADGSEFESPKKKAKVE

SEQ ID NO: 6582 - protein, 2091 aa, synthetic construct
MPAAKRVKLDGGDKKYSIGLDIGTNSVGWAVITDEYKVPSKKFKVLGNTDRHSIKKNLIGALLFDSGETAEATRLKRTARRRYTRRKNRICYLQEIFSNEMAKVDDSFFHRLEESFLVEEDKKHERHPIFGNIVDEVAYHEKYPTIYHLRKKLVDSTDKADLRLIYLALAHMIKFRGHFLIEGDLNPDNSDVDKLFIQLVQTYNQLFEENPINASGVDAKAILSARLSKSRRLENLIAQLPGEKKNGLFGNLIALSLGLTPNFKSNFDLAEDAKLQLSKDTYDDDLDNLLAQIGDQYADLFLAAKNLSDAILLSDILRVNTEITKAPLSASMIKRYDEHHQDLTLLKALVRQQLPEKYKEIFFDQSKNGYAGYIDGGASQEEFYKFIKPILEKMDGTEELLVKLNREDLLRKQRTFDNGSIPHQIHLGELHAILRRQEDFYPFLKDNREKIEKILTFRIPYYVGPLARGNSRFAWMTRKSEETITPWNFEEVVDKGASAQSFIERMTNFDKNLPNEKVLPKHSLLYEYFTVYNELTKVKYVTEGMRKPAFLSGEQKKAIVDLLFKTNRKVTVKQLKEDYFKKIECFDSVEISGVEDRFNASLGTYHDLLKIIKDKDFLDNEENEDILEDIVLTLTLFEDREMIEERLKTYAHLFDDKVMKQLKRRRYTGWGRLSRKLINGIRDKQSGKTILDFLKSDGFANRNFMQLIHDDSLTFKEDIQKAQVSGQGDSLHEHIANLAGSPAIKKGILQTVKVVDELVKVMGRHKPENIVIEMARENQTTQKGQKNSRERMKRIEEGIKELGSQILKEHPVENTQLQNEKLYLYYLQNGRDMYVDQELDINRLSDYDVDHIVPQSFLKDDSIDNKVLTRSDKARGKSDNVPSEEVVKKMKNYWRQLLNAKLITQRKFDNLTKAERGGLSELDKAGFIKRQLVETRQITKHVAQILDSRMNTKYDENDKLIREVKVITLKSKLVSDFRKDFQFYKVREINNYHHAHDAYLNAVVGTALIKKYPKLESEFVYGDYKVYDVRKMIAKSEQEIGKATAKYFFYSNIMNFFKTEITLANGEIRKRPLIETNGETGEIVWDKGRDFATVRKVLSMPQVNIVKKTEVQTGGFSKESILPKRNSDKLIARKKDWDPKKYGGFDSPTVAYSVLVVAKVEKGKSKKLKSVKELLGITIMERSSFEKNPIDFLEAKGYKEVKKDLIIKLPKYSLFELENGRKRMLASAGELQKGNELALPSKYVNFLYLASHYEKLKGSPEDNEQKQLFVEQHKHYLDEIIEQISEFSKRVILADANLDKVLSAYNKHRDKPIREQAENIIHLFTLTNLGAPAAFKYFDTTIDRKRYTSTKEVLDATLIHQSITGLYETRIDLSQLGGDGGGGSGGGGGTLNIEDEYRLHETSKEPDVPLGSTWLSDFPQAWAETGGMGLAVRQAPLIIPLKATSTPVSIKQYPMSQEARLGIKPHIQRLLDQGILVPCQSPWNTPLLPVKKPGTNDYRPVQDLREVNKRVEDIHPTVPNPYNLLSGLPPSHQWYTVLDLKDAFFCLRLHPTSQPLFAFEWRDPEMGISGQLTWTRLPQGFKNSPTLFNEALHRDLADFRIQHPDLILLQYVDDLLLAATSEQDCQRGTRALLQTLGNLGYRASAKKAQICQKQVKYLGYLLKEGQRWLTEARKETVMGQPTPKTPRQLREFLGTAGFCRLWIPGFAEMAAPLYPLTKPGTLFNWGPDQQKAYQEIKQALLTAPALGLPDLTKPFELFVDEKQGYAKGVLTQKLGPWRRPVAYLSKKLDPVAAGWPPCLRMVAAIAVLTKDAGKLTMGQPLVILAPHAVEALVKQPPDRWLSNARMTHYQAMLLDTDRVQFGPVVALNPATLLPLPEKEAPHDCLEILAETHGTRPDLTDQPIPDADYTWYTDGSSFLQEGQRRAGAAVTTETEVIWARALPAGTSAQRAELIALTQALKMAEGKKLNVYTDSRYAFATAHVHGEIYRRRGWLTSEGREIKNKNEILALLKALFLPKRLSIIHCPGHQKGNSAEARGNRMADQAAREAAMKAVLETSTLLAGKRTADGSEFEKRTADGSEFESPKKKAKVE

SEQ ID NO: 6583 - protein, 2091 aa, synthetic construct
MPAAKRVKLDGGDKKYSIGLDIGTNSVGWAVITDEYKVPSKKFKVLGNTDRHSIKKNLIGALLFDSGETAEATRLKRTARRRYTRRKNRICYLQEIFSNEMAKVDDSFFHRLEESFLVEEDKKHERHPIFGNIVDEVAYHEKYPTIYHLRKKLVDSTDKADLRLIYLALAHMIKFRGHFLIEGDLNPDNSDVDKLFIQLVQTYNQLFEENPINASGVDAKAILSARLSKSRRLENLIAQLPGEKKNGLFGNLIALSLGLTPNFKSNFDLAEDAKLQLSKDTYDDDLDNLLAQIGDQYADLFLAAKNLSDAILLSDILRVNTEITKAPLSASMIKRYDEHHQDLTLLKALVRQQLPEKYKEIFFDQSKNGYAGYIDGGASQEEFYKFIKPILEKMDGTEELLVKLNREDLLRKQRTFDNGSIPHQIHLGELHAILRRQEDFYPFLKDNREKIEKILTFRIPYYVGPLARGNSRFAWMTRKSEETITPWNFEEVVDKGASAQSFIERMTNFDKNLPNEKVLPKHSLLYEYFTVYNELTKVKYVTEGMRKPAFLSGEQKKAIVDLLFKTNRKVTVKQLKEDYFKKIECFDSVEISGVEDRFNASLGTYHDLLKIIKDKDFLDNEENEDILEDIVLTLTLFEDREMIEERLKTYAHLFDDKVMKQLKRRRYTGWGRLSRKLINGIRDKQSGKTILDFLKSDGFANRNFMQLIHDDSLTFKEDIQKAQVSGQGDSLHEHIANLAGSPAIKKGILQTVKVVDELVKVMGRHKPENIVIEMARENQTTQKGQKNSRERMKRIEEGIKELGSQILKEHPVENTQLQNEKLYLYYLQNGRDMYVDQELDINRLSDYDVDHIVPQSFLKDDSIDNKVLTRSDKARGKSDNVPSEEVVKKMKNYWRQLLNAKLITQRKFDNLTKAERGGLSELDKAGFIKRQLVETRQITKHVAQILDSRMNTKYDENDKLIREVKVITLKSKLVSDFRKDFQFYKVREINNYHHAHDAYLNAVVGTALIKKYPKLESEFVYGDYKVYDVRKMIAKSEQEIGKATAKYFFYSNIMNFFKTEITLANGEIRKRPLIETNGETGEIVWDKGRDFATVRKVLSMPQVNIVKKTEVQTGGFSKESILPKRNSDKLIARKKDWDPKKYGGFDSPTVAYSVLVVAKVEKGKSKKLKSVKELLGITIMERSSFEKNPIDFLEAKGYKEVKKDLIIKLPKYSLFELENGRKRMLASAGELQKGNELALPSKYVNFLYLASHYEKLKGSPEDNEQKQLFVEQHKHYLDEIIEQISEFSKRVILADANLDKVLSAYNKHRDKPIREQAENIIHLFTLTNLGAPAAFKYFDTTIDRKRYTSTKEVLDATLIHQSITGLYETRIDLSQLGGDGGGGSGGGGGTLNIEDEYRLHETSKEPDVPLGSTWLSDFPQAWAETGGMGLAVRQAPLIIPLKATSTPVSIKQYPMSQEARLGIKPHIQRLLDQGILVPCQSPWNTPLLPVKKPGTNDYRPVQDLREVNKRVEDIHPTVPNPYNLLSGLPPSHQWYTVLDLKDAFFCLRLHPTSQPLFAFEWRDPEMGISGQLTWTRLPQGFKNSPTLFNEALHRDLADFRIQHPDLILLQYVDDLLLAATSEQDCQRGTRALLQTLGNLGYRASAKKAQICQKQVKYLGYLLKEGQRWLTEARKETVMGQPTPKTPRQLREFLGKAGFCRLFIPGFAEMAAPLYPLTKPGTLFNWGPDQQKAYQEIKQALLTAPALGLPDLTKPFELFVDEKQGYAKGVLTQKLGPWRRPVAYLSKKLDPVAAGWPPCLRMVAAIAVLTKDAGKLTMGQPLVILAPHAVEALVKQPPDRWLSNARMTHYQAMLLDTDRVQFGPVVALNPATLLPLPEKEAPHDCLEILAETHGTRPDLTDQPIPDADYTWYTDGSSFLQEGQRRAGAAVTTETEVIWARALPAGTSAQRAELIALTQALKMAEGKKLNVYTDSRYAFATAHVHGEIYRRRGWLTSEGREIKNKNEILALLKALFLPKRLSIIHCPGHQKGNSAEARGNRMADQAAREAAMKAVLETSTLLAGKRTADGSEFEKRTADGSEFESPKKKAKVE

SEQ ID NO: 6584 - protein, 2093 aa, synthetic construct
MPAAKRVKLDGGDKKYSIGLDIGTNSVGWAVITDEYKVPSKKFKVLGNTDRHSIKKNLIGALLFDSGETAEATRLKRTARRRYTRRKNRICYLQEIFSNEMAKVDDSFFHRLEESFLVEEDKKHERHPIFGNIVDEVAYHEKYPTIYHLRKKLVDSTDKADLRLIYLALAHMIKFRGHFLIEGDLNPDNSDVDKLFIQLVQTYNQLFEENPINASGVDAKAILSARLSKSRRLENLIAQLPGEKKNGLFGNLIALSLGLTPNFKSNFDLAEDAKLQLSKDTYDDDLDNLLAQIGDQYADLFLAAKNLSDAILLSDILRVNTEITKAPLSASMIKRYDEHHQDLTLLKALVRQQLPEKYKEIFFDQSKNGYAGYIDGGASQEEFYKFIKPILEKMDGTEELLVKLNREDLLRKQRTFDNGSIPHQIHLGELHAILRRQEDFYPFLKDNREKIEKILTFRIPYYVGPLARGNSRFAWMTRKSEETITPWNFEEVVDKGASAQSFIERMTNFDKNLPNEKVLPKHSLLYEYFTVYNELTKVKYVTEGMRKPAFLSGEQKKAIVDLLFKTNRKVTVKQLKEDYFKKIECFDSVEISGVEDRFNASLGTYHDLLKIIKDKDFLDNEENEDILEDIVLTLTLFEDREMIEERLKTYAHLFDDKVMKQLKRRRYTGWGRLSRKLINGIRDKQSGKTILDFLKSDGFANRNFMQLIHDDSLTFKEDIQKAQVSGQGDSLHEHIANLAGSPAIKKGILQTVKVVDELVKVMGRHKPENIVIEMARENQTTQKGQKNSRERMKRIEEGIKELGSQILKEHPVENTQLQNEKLYLYYLQNGRDMYVDQELDINRLSDYDVDHIVPQSFLKDDSIDNKVLTRSDKARGKSDNVPSEEVVKKMKNYWRQLLNAKLITQRKFDNLTKAERGGLSELDKAGFIKRQLVETRQITKHVAQILDSRMNTKYDENDKLIREVKVITLKSKLVSDFRKDFQFYKVREINNYHHAHDAYLNAVVGTALIKKYPKLESEFVYGDYKVYDVRKMIAKSEQEIGKATAKYFFYSNIMNFFKTEITLANGEIRKRPLIETNGETGEIVWDKGRDFATVRKVLSMPQVNIVKKTEVQTGGFSKESILPKRNSDKLIARKKDWDPKKYGGFDSPTVAYSVLVVAKVEKGKSKKLKSVKELLGITIMERSSFEKNPIDFLEAKGYKEVKKDLIIKLPKYSLFELENGRKRMLASAGELQKGNELALPSKYVNFLYLASHYEKLKGSPEDNEQKQLFVEQHKHYLDEIIEQISEFSKRVILADANLDKVLSAYNKHRDKPIREQAENIIHLFTLTNLGAPAAFKYFDTTIDRKRYTSTKEVLDATLIHQSITGLYETRIDLSQLGGDGGGGGGGSGGTAPLEEEYRLFLEAPIQNVTLLEQWKREIPKVWAEINPPGLASTQAPIHVQLLSTALPVRVRQYPITLEAKRSLRETIRKFRAAGILRPVHSPWNTPLLPVRKSGTSEYRMVQDLREVNKRVETIHPTVPNPYTLLSLLPPDRIWYSVLDLKDAFFCIPLAPESQLIFAFEWADAEEGESGQLTWTRLPQGFKNSPTLFNEALNRDLQGFRLDHPSVSLLQYVDDLLIAADTQAACLSATRDLLMTLAELGYRVSGKKAQLCQEEVTYLGFKIHKGSRSLSNSRTQAILQIPVPKTKRQVREFLGTIGYCRLWIPGFAELAQPLYAATRPGNDPLVWGEKEEEAFQSLKLALTQPPALALPSLDKPFQLFVEETSGAAKGVLTQALGPWKRPVAYLSKRLDPVAAGWPRCLRAIAAAALLTREASKLTFGQDIEITSSHNLESLLRSPPDKWLTNARITQYQVLLLDPPRVRFKQTAALNPATLLPETDDTLPIHHCLDTLDSLTSTRPDLTDQPLAQAEATLFTDGSSYIRDGKRYAGAAVVTLDSVIWAEPLPIGTSAQKAELIALTKALEWSKDKSVNIYTDSRYAFATLHVHGMIYRERGWLTAGGKAIKNAPEILALLTAVWLPKRVAVMHCKGHQKDDAPTSTGNRRADEVAREVAIRPLSTQATISAGKRTADGSEFEKRTADGSEFESPKKKAKVE

SEQ ID NO: 6585 - protein, 2093 aa, synthetic construct
MPAAKRVKLDGGDKKYSIGLDIGTNSVGWAVITDEYKVPSKKFKVLGNTDRHSIKKNLIGALLFDSGETAEATRLKRTARRRYTRRKNRICYLQEIFSNEMAKVDDSFFHRLEESFLVEEDKKHERHPIFGNIVDEVAYHEKYPTIYHLRKKLVDSTDKADLRLIYLALAHMIKFRGHFLIEGDLNPDNSDVDKLFIQLVQTYNQLFEENPINASGVDAKAILSARLSKSRRLENLIAQLPGEKKNGLFGNLIALSLGLTPNFKSNFDLAEDAKLQLSKDTYDDDLDNLLAQIGDQYADLFLAAKNLSDAILLSDILRVNTEITKAPLSASMIKRYDEHHQDLTLLKALVRQQLPEKYKEIFFDQSKNGYAGYIDGGASQEEFYKFIKPILEKMDGTEELLVKLNREDLLRKQRTFDNGSIPHQIHLGELHAILRRQEDFYPFLKDNREKIEKILTFRIPYYVGPLARGNSRFAWMTRKSEETITPWNFEEVVDKGASAQSFIERMTNFDKNLPNEKVLPKHSLLYEYFTVYNELTKVKYVTEGMRKPAFLSGEQKKAIVDLLFKTNRKVTVKQLKEDYFKKIECFDSVEISGVEDRFNASLGTYHDLLKIIKDKDFLDNEENEDILEDIVLTLTLFEDREMIEERLKTYAHLFDDKVMKQLKRRRYTGWGRLSRKLINGIRDKQSGKTILDFLKSDGFANRNFMQLIHDDSLTFKEDIQKAQVSGQGDSLHEHIANLAGSPAIKKGILQTVKVVDELVKVMGRHKPENIVIEMARENQTTQKGQKNSRERMKRIEEGIKELGSQILKEHPVENTQLQNEKLYLYYLQNGRDMYVDQELDINRLSDYDVDHIVPQSFLKDDSIDNKVLTRSDKARGKSDNVPSEEVVKKMKNYWRQLLNAKLITQRKFDNLTKAERGGLSELDKAGFIKRQLVETRQITKHVAQILDSRMNTKYDENDKLIREVKVITLKSKLVSDFRKDFQFYKVREINNYHHAHDAYLNAVVGTALIKKYPKLESEFVYGDYKVYDVRKMIAKSEQEIGKATAKYFFYSNIMNFFKTEITLANGEIRKRPLIETNGETGEIVWDKGRDFATVRKVLSMPQVNIVKKTEVQTGGFSKESILPKRNSDKLIARKKDWDPKKYGGFDSPTVAYSVLVVAKVEKGKSKKLKSVKELLGITIMERSSFEKNPIDFLEAKGYKEVKKDLIIKLPKYSLFELENGRKRMLASAGELQKGNELALPSKYVNFLYLASHYEKLKGSPEDNEQKQLFVEQHKHYLDEIIEQISEFSKRVILADANLDKVLSAYNKHRDKPIREQAENIIHLFTLTNLGAPAAFKYFDTTIDRKRYTSTKEVLDATLIHQSITGLYETRIDLSQLGGDGGGGGGGSGGTAPLEEEYRLFLEAPIQNVTLLEQWKREIPKVWAEINPPGLASTQAPIHVQLLSTALPVRVRQYPITLEAKRSLRETIRKFRAAGILRPVHSPWNTPLLPVRKSGTSEYRMVQDLREVNKRVETIHPTVPNPYTLLSLLPPDRIWYSVLDLKDAFFCIPLAPESQLIFAFEWADAEEGESGQLTWTRLPQGFKNSPTLFNEALNRDLQGFRLDHPSVSLLQYVDDLLIAADTQAACLSATRDLLMTLAELGYRVSGKKAQLCQEEVTYLGFKIHKGSRSLSNSRTQAILQIPVPKTKRQVREFLGKIGYCRLFIPGFAELAQPLYAATRPGNDPLVWGEKEEEAFQSLKLALTQPPALALPSLDKPFQLFVEETSGAAKGVLTQALGPWKRPVAYLSKRLDPVAAGWPRCLRAIAAAALLTREASKLTFGQDIEITSSHNLESLLRSPPDKWLTNARITQYQVLLLDPPRVRFKQTAALNPATLLPETDDTLPIHHCLDTLDSLTSTRPDLTDQPLAQAEATLFTDGSSYIRDGKRYAGAAVVTLDSVIWAEPLPIGTSAQKAELIALTKALEWSKDKSVNIYTDSRYAFATLHVHGMIYRERGWLTAGGKAIKNAPEILALLTAVWLPKRVAVMHCKGHQKDDAPTSTGNRRADEVAREVAIRPLSTQATISAGKRTADGSEFEKRTADGSEFESPKKKAKVE

SEQ ID NO: 6586 - protein, 2097 aa, synthetic construct
MPAAKRVKLDGGDKKYSIGLDIGTNSVGWAVITDEYKVPSKKFKVLGNTDRHSIKKNLIGALLFDSGETAEATRLKRTARRRYTRRKNRICYLQEIFSNEMAKVDDSFFHRLEESFLVEEDKKHERHPIFGNIVDEVAYHEKYPTIYHLRKKLVDSTDKADLRLIYLALAHMIKFRGHFLIEGDLNPDNSDVDKLFIQLVQTYNQLFEENPINASGVDAKAILSARLSKSRRLENLIAQLPGEKKNGLFGNLIALSLGLTPNFKSNFDLAEDAKLQLSKDTYDDDLDNLLAQIGDQYADLFLAAKNLSDAILLSDILRVNTEITKAPLSASMIKRYDEHHQDLTLLKALVRQQLPEKYKEIFFDQSKNGYAGYIDGGASQEEFYKFIKPILEKMDGTEELLVKLNREDLLRKQRTFDNGSIPHQIHLGELHAILRRQEDFYPFLKDNREKIEKILTFRIPYYVGPLARGNSRFAWMTRKSEETITPWNFEEVVDKGASAQSFIERMTNFDKNLPNEKVLPKHSLLYEYFTVYNELTKVKYVTEGMRKPAFLSGEQKKAIVDLLFKTNRKVTVKQLKEDYFKKIECFDSVEISGVEDRFNASLGTYHDLLKIIKDKDFLDNEENEDILEDIVLTLTLFEDREMIEERLKTYAHLFDDKVMKQLKRRRYTGWGRLSRKLINGIRDKQSGKTILDFLKSDGFANRNFMQLIHDDSLTFKEDIQKAQVSGQGDSLHEHIANLAGSPAIKKGILQTVKVVDELVKVMGRHKPENIVIEMARENQTTQKGQKNSRERMKRIEEGIKELGSQILKEHPVENTQLQNEKLYLYYLQNGRDMYVDQELDINRLSDYDVDHIVPQSFLKDDSIDNKVLTRSDKARGKSDNVPSEEVVKKMKNYWRQLLNAKLITQRKFDNLTKAERGGLSELDKAGFIKRQLVETRQITKHVAQILDSRMNTKYDENDKLIREVKVITLKSKLVSDFRKDFQFYKVREINNYHHAHDAYLNAVVGTALIKKYPKLESEFVYGDYKVYDVRKMIAKSEQEIGKATAKYFFYSNIMNFFKTEITLANGEIRKRPLIETNGETGEIVWDKGRDFATVRKVLSMPQVNIVKKTEVQTGGFSKESILPKRNSDKLIARKKDWDPKKYGGFDSPTVAYSVLVVAKVEKGKSKKLKSVKELLGITIMERSSFEKNPIDFLEAKGYKEVKKDLIIKLPKYSLFELENGRKRMLASAGELQKGNELALPSKYVNFLYLASHYEKLKGSPEDNEQKQLFVEQHKHYLDEIIEQISEFSKRVILADANLDKVLSAYNKHRDKPIREQAENIIHLFTLTNLGAPAAFKYFDTTIDRKRYTSTKEVLDATLIHQSITGLYETRIDLSQLGGDGGGGGGGSGGTVSLQDEHRLFDIPVTTSLPDVWLQDFPQAWAETGGLGRAKCQAPIIIDLKPTAVPVSIKQYPMSLEAHMGIRQHIIKFLELGVLRPCRSPWNTPLLPVKKPGTQDYRPVQDLREINKRTVDIHPTVPNPYNLLSTLKPDYSWYTVLDLKDAFFCLPLAPQSQELFAFEWKDPERGISGQLTWTRLPQGFKNSPTLFNEALHRDLTDFRTQHPEVTLLQYVDDLLLAAPTKKACTQGTRHLLQELGEKGYRASAKKAQICQTKVTYLGYILSEGKRWLTPGRIETVARIPPPRNPREVREFLGTAGFCRLWIPGFAELAAPLYALTKPSTPFTWQTEHQLAFEALKKALLSAPALGLPDTSKPFTLFLDERQGIAKGVLTQKLGPWKRPVAYLSKKLDPVAAGWPPCLRIMAATAMLVKDSAKLTLGQPLTVITPHTLEAIVRQPPDRWITNARLTHYQALLLDTDRVQFGPPVTLNPATLLPVPENQPSPHDCRQVLAETHGTREDLKDQELPDADHTWYTDGSSYLDSGTRRAGAAVVDGHNTIWAQSLPPGTSAQKAELIALTKALELSKGKKANIYTDSRYAFATAHTHGSIYERRGWLTSEGKEIKNKAEIIALLKALFLPQEVAIIHCPGHQKGQDPVAVGNRQADRVARQAAMAEVLTLATEPDNTSHITAGKRTADGSEFEKRTADGSEFESPKKKAKVE

SEQ ID NO: 6587 - protein, 2090 aa, synthetic construct
MPAAKRVKLDGGDKKYSIGLDIGTNSVGWAVITDEYKVPSKKFKVLGNTDRHSIKKNLIGALLFDSGETAEATRLKRTARRRYTRRKNRICYLQEIFSNEMAKVDDSFFHRLEESFLVEEDKKHERHPIFGNIVDEVAYHEKYPTIYHLRKKLVDSTDKADLRLIYLALAHMIKFRGHFLIEGDLNPDNSDVDKLFIQLVQTYNQLFEENPINASGVDAKAILSARLSKSRRLENLIAQLPGEKKNGLFGNLIALSLGLTPNFKSNFDLAEDAKLQLSKDTYDDDLDNLLAQIGDQYADLFLAAKNLSDAILLSDILRVNTEITKAPLSASMIKRYDEHHQDLTLLKALVRQQLPEKYKEIFFDQSKNGYAGYIDGGASQEEFYKFIKPILEKMDGTEELLVKLNREDLLRKQRTFDNGSIPHQIHLGELHAILRRQEDFYPFLKDNREKIEKILTFRIPYYVGPLARGNSRFAWMTRKSEETITPWNFEEVVDKGASAQSFIERMTNFDKNLPNEKVLPKHSLLYEYFTVYNELTKVKYVTEGMRKPAFLSGEQKKAIVDLLFKTNRKVTVKQLKEDYFKKIECFDSVEISGVEDRFNASLGTYHDLLKIIKDKDFLDNEENEDILEDIVLTLTLFEDREMIEERLKTYAHLFDDKVMKQLKRRRYTGWGRLSRKLINGIRDKQSGKTILDFLKSDGFANRNFMQLIHDDSLTFKEDIQKAQVSGQGDSLHEHIANLAGSPAIKKGILQTVKVVDELVKVMGRHKPENIVIEMARENQTTQKGQKNSRERMKRIEEGIKELGSQILKEHPVENTQLQNEKLYLYYLQNGRDMYVDQELDINRLSDYDVDHIVPQSFLKDDSIDNKVLTRSDKARGKSDNVPSEEVVKKMKNYWRQLLNAKLITQRKFDNLTKAERGGLSELDKAGFIKRQLVETRQITKHVAQILDSRMNTKYDENDKLIREVKVITLKSKLVSDFRKDFQFYKVREINNYHHAHDAYLNAVVGTALIKKYPKLESEFVYGDYKVYDVRKMIAKSEQEIGKATAKYFFYSNIMNFFKTEITLANGEIRKRPLIETNGETGEIVWDKGRDFATVRKVLSMPQVNIVKKTEVQTGGFSKESILPKRNSDKLIARKKDWDPKKYGGFDSPTVAYSVLVVAKVEKGKSKKLKSVKELLGITIMERSSFEKNPIDFLEAKGYKEVKKDLIIKLPKYSLFELENGRKRMLASAGELQKGNELALPSKYVNFLYLASHYEKLKGSPEDNEQKQLFVEQHKHYLDEIIEQISEFSKRVILADANLDKVLSAYNKHRDKPIREQAENIIHLFTLTNLGAPAAFKYFDTTIDRKRYTSTKEVLDATLIHQSITGLYETRIDLSQLGGDGGGGGGGSGGTLQLEEEYRLFEPESTQKQEMDIWLKNFPQAWAETGGMGTAHCQAPVLIQLKATATPISIRQYPMPHEAYQGIKPHIRRMLDQGILKPCQSPWNTPLLPVKKPGTEDYRPVQDLREVNKRVEDIHPTVPNPYNLLSTLPPSHPWYTVLDLKDAFFCLRLHSESQLLFAFEWRDPEIGLSGQLTWTRLPQGFKNSPTLFNEALHSDLADFRVRYPALVLLQYVDDLLLAAATRTECLEGTKALLETLGNKGYRASAKKAQICLQEVTYLGYSLKDGQRWLTKARKEAILSIPVPKNSRQVREFLGTAGYCRLWIPGFAELAAPLYPLTRPGTLFQWGTEQQLAFEDIKKALLSSPALGLPDITKPFELFIDENSGFAKGVLVQKLGPWKRPVAYLSKKLDTVASGWPPCLRMVAAIAILVKDAGKLTLGQPLTILTSHPVEALVRQPPNKWLSNARMTHYQAMLLDAERVHFGPTVSLNPATLLPLPSGGNHHDCLQILAETHGTRPDLTDQPLPDADLTWYTDGSSFIRNGEREAGAAVTTESEVIWAAPLPPGTSAQRAELIALTQALKMAEGKKLTVYTDSRYAFATTHVHGEIYRRRGWLTSEGKEIKNKNEILALLEALFLPKRLSIIHCPGHQKGDSPQAKGNRLADDTAKKAATETHSSLTVLPAGKRTADGSEFEKRTADGSEFESPKKKAKVE

SEQ ID NO: 6588 - protein, 2213 aa, synthetic construct
MPAAKRVKLDGGDKKYSIGLDIGTNSVGWAVITDEYKVPSKKFKVLGNTDRHSIKKNLIGALLFDSGETAEATRLKRTARRRYTRRKNRICYLQEIFSNEMAKVDDSFFHRLEESFLVEEDKKHERHPIFGNIVDEVAYHEKYPTIYHLRKKLVDSTDKADLRLIYLALAHMIKFRGHFLIEGDLNPDNSDVDKLFIQLVQTYNQLFEENPINASGVDAKAILSARLSKSRRLENLIAQLPGEKKNGLFGNLIALSLGLTPNFKSNFDLAEDAKLQLSKDTYDDDLDNLLAQIGDQYADLFLAAKNLSDAILLSDILRVNTEITKAPLSASMIKRYDEHHQDLTLLKALVRQQLPEKYKEIFFDQSKNGYAGYIDGGASQEEFYKFIKPILEKMDGTEELLVKLNREDLLRKQRTFDNGSIPHQIHLGELHAILRRQEDFYPFLKDNREKIEKILTFRIPYYVGPLARGNSRFAWMTRKSEETITPWNFEEVVDKGASAQSFIERMTNFDKNLPNEKVLPKHSLLYEYFTVYNELTKVKYVTEGMRKPAFLSGEQKKAIVDLLFKTNRKVTVKQLKEDYFKKIECFDSVEISGVEDRFNASLGTYHDLLKIIKDKDFLDNEENEDILEDIVLTLTLFEDREMIEERLKTYAHLFDDKVMKQLKRRRYTGWGRLSRKLINGIRDKQSGKTILDFLKSDGFANRNFMQLIHDDSLTFKEDIQKAQVSGQGDSLHEHIANLAGSPAIKKGILQTVKVVDELVKVMGRHKPENIVIEMARENQTTQKGQKNSRERMKRIEEGIKELGSQILKEHPVENTQLQNEKLYLYYLQNGRDMYVDQELDINRLSDYDVDHIVPQSFLKDDSIDNKVLTRSDKARGKSDNVPSEEVVKKMKNYWRQLLNAKLITQRKFDNLTKAERGGLSELDKAGFIKRQLVETRQITKHVAQILDSRMNTKYDENDKLIREVKVITLKSKLVSDFRKDFQFYKVREINNYHHAHDAYLNAVVGTALIKKYPKLESEFVYGDYKVYDVRKMIAKSEQEIGKATAKYFFYSNIMNFFKTEITLANGEIRKRPLIETNGETGEIVWDKGRDFATVRKVLSMPQVNIVKKTEVQTGGFSKESILPKRNSDKLIARKKDWDPKKYGGFDSPTVAYSVLVVAKVEKGKSKKLKSVKELLGITIMERSSFEKNPIDFLEAKGYKEVKKDLIIKLPKYSLFELENGRKRMLASAGELQKGNELALPSKYVNFLYLASHYEKLKGSPEDNEQKQLFVEQHKHYLDEIIEQISEFSKRVILADANLDKVLSAYNKHRDKPIREQAENIIHLFTLTNLGAPAAFKYFDTTIDRKRYTSTKEVLDATLIHQSITGLYETRIDLSQLGGDGGGGGGGSGGTLGDQGSRGSDPLPEPRVTLTVEGIPTEFLVNTGAEHSVLTKPMGKMGSKRTVVAGATGSKVYPWTTKRLLKIGQKQVTHSFLVIPECPAPLLGRDLLTKLKAQIQFSTEGPQVTWEDRPAMCLVLNLEEEYRLHEKPVPPSIDPSWLQLFPMVWAEKAGMGLANQVPPVVVELKSDASPVAVRQYPMSKEAREGIRPHIQRFLDLGILVPCQSPWNTPLLPVKKPGTNDYRPVQDLREVNKRVQDIHPTVPNPYNLLSSLPPSHTWYSVLDLKDAFFCLKLHPNSQPLFAFEWRDPEKGNTGQLTWTRLPQGFKNSPTLFNEALHRDLASFRALNPQVVMLQYVDDLLVAAPTYRDCKEGTRRLLQELSKLGYRVSAKKAQLCREEVTYLGYLLKGGKRWLTPARKATVMKIPTPTTPRQVREFLGKAGFCRLFIPGFASLAAPLYPLTRPKVPFTWTEAHQEAFGRIKEALLSAPALALPDLTKPFALYVDEKEGVARGVLTQTLGPWRRPVAYLSKKLDPVASGWPTCLKAIAAVALLLKDADKLTLGQNVLVIAPHNLESIVRQPPDRWMTNARMTHYQSLLLNERVSFAPPAILNPATLLPVESDDTPIHICSEILAEETGTRPDLRDQPLPGVPAWYTDGSSFIMDGRRQAGAAIVDNKRTVWASNLPEGTSAQKAELIALTQALRLAEGKSINIYTDSRYAFATAHVHGAIYKQRGWLTSAGKDIKNKEEILALLEAIHLPKRVAIIHCPGHQRGTDPVATGNRKADEAAKQAAQSTRILTETTKNAGKRTADGSEFEKRTADGSEFESPKKKAKVE

SEQ ID NO: 6589 - protein, 2091 aa, synthetic construct; identical to SEQ ID NO: 4511

SEQ ID NO: 6590 - protein, 2091 aa, synthetic construct
MPAAKRVKLDGGDKKYSIGLDIGTNSVGWAVITDEYKVPSKKFKVLGNTDRHSIKKNLIGALLFDSGETAEATRLKRTARRRYTRRKNRICYLQEIFSNEMAKVDDSFFHRLEESFLVEEDKKHERHPIFGNIVDEVAYHEKYPTIYHLRKKLVDSTDKADLRLIYLALAHMIKFRGHFLIEGDLNPDNSDVDKLFIQLVQTYNQLFEENPINASGVDAKAILSARLSKSRRLENLIAQLPGEKKNGLFGNLIALSLGLTPNFKSNFDLAEDAKLQLSKDTYDDDLDNLLAQIGDQYADLFLAAKNLSDAILLSDILRVNTEITKAPLSASMIKRYDEHHQDLTLLKALVRQQLPEKYKEIFFDQSKNGYAGYIDGGASQEEFYKFIKPILEKMDGTEELLVKLNREDLLRKQRTFDNGSIPHQIHLGELHAILRRQEDFYPFLKDNREKIEKILTFRIPYYVGPLARGNSRFAWMTRKSEETITPWNFEEVVDKGASAQSFIERMTNFDKNLPNEKVLPKHSLLYEYFTVYNELTKVKYVTEGMRKPAFLSGEQKKAIVDLLFKTNRKVTVKQLKEDYFKKIECFDSVEISGVEDRFNASLGTYHDLLKIIKDKDFLDNEENEDILEDIVLTLTLFEDREMIEERLKTYAHLFDDKVMKQLKRRRYTGWGRLSRKLINGIRDKQSGKTILDFLKSDGFANRNFMQLIHDDSLTFKEDIQKAQVSGQGDSLHEHIANLAGSPAIKKGILQTVKVVDELVKVMGRHKPENIVIEMARENQTTQKGQKNSRERMKRIEEGIKELGSQILKEHPVENTQLQNEKLYLYYLQNGRDMYVDQELDINRLSDYDVDHIVPQSFLKDDSIDNKVLTRSDKARGKSDNVPSEEVVKKMKNYWRQLLNAKLITQRKFDNLTKAERGGLSELDKAGFIKRQLVETRQITKHVAQILDSRMNTKYDENDKLIREVKVITLKSKLVSDFRKDFQFYKVREINNYHHAHDAYLNAVVGTALIKKYPKLESEFVYGDYKVYDVRKMIAKSEQEIGKATAKYFFYSNIMNFFKTEITLANGEIRKRPLIETNGETGEIVWDKGRDFATVRKVLSMPQVNIVKKTEVQTGGFSKESILPKRNSDKLIARKKDWDPKKYGGFDSPTVAYSVLVVAKVEKGKSKKLKSVKELLGITIMERSSFEKNPIDFLEAKGYKEVKKDLIIKLPKYSLFELENGRKRMLASAGELQKGNELALPSKYVNFLYLASHYEKLKGSPEDNEQKQLFVEQHKHYLDEIIEQISEFSKRVILADANLDKVLSAYNKHRDKPIREQAENIIHLFTLTNLGAPAAFKYFDTTIDRKRYTSTKEVLDATLIHQSITGLYETRIDLSQLGGDGGGGGGGSGGTLGIEDEYRLHETSTEPDVSLGSTWLSDFPQAWAETGGMGLAVRQAPLIIPLKATSTPVSIQQYPMSHEARLGIKPHIQRLLDQGILVPCQSPWNTPLLPVKKPGTNDYRPVQDLREVNKRVEDIHPTVPNPYNLLSGLPPSHQWYTVLDLKDAFFCLRLHPTSQPLFAFEWRDPGMGISGQLTWTRLPQGFKNSPTLFNEALHRDLADFRIQHPDLILLQYVDDILLAATSELDCQQGTRALLQTLGDLGYRASAKKAQICQKQVKYLGYLLREGQRWLTEARKETVMGQPVPKTPRQLREFLGTAGFCRLWIPGFAEMAAPLYPLTKPGTLFSWGPDQQKAYQEIKQALLTAPALGLPDLTKPFELFVDEKQGYAKGVLTQKLGPWRRPVAYLSKKLDPVAAGWPPCLRMVAAIAVLTKDAGKLTMGQPLVILAPHAVEALVKQPPDRWLSNARMTHYQAMLLDTDRVQFGPVVALNPATLLPLPEEGAPHDCLEILAETHGTRPDLTDQPIPDADHTWYTDGSSFLQEGQRKAGAAVTTETEVIWAGALPAGTSAQRAELIALTQALKMAEGKRLNVYTDSRYAFATAHIHGEIYRRRGWLTSEGREIKNKSEILALLKALFLPKRLSIIHCLGHQKGDSAEARGNRLADQAAREAAIKTPPDTSTLLAGKRTADGSEFEKRTADGSEFESPKKKAKVE

SEQ ID NO: 6591 - protein, 2091 aa, synthetic construct; identical to SEQ ID NO: 4511

SEQ ID NO: 6592 - protein, 2091 aa, synthetic construct
MPAAKRVKLDGGDKKYSIGLDIGTNSVGWAVITDEYKVPSKKFKVLGNTDRHSIKKNLIGALLFDSGETAEATRLKRTARRRYTRRKNRICYLQEIFSNEMAKVDDSFFHRLEESFLVEEDKKHERHPIFGNIVDEVAYHEKYPTIYHLRKKLVDSTDKADLRLIYLALAHMIKFRGHFLIEGDLNPDNSDVDKLFIQLVQTYNQLFEENPINASGVDAKAILSARLSKSRRLENLIAQLPGEKKNGLFGNLIALSLGLTPNFKSNFDLAEDAKLQLSKDTYDDDLDNLLAQIGDQYADLFLAAKNLSDAILLSDILRVNTEITKAPLSASMIKRYDEHHQDLTLLKALVRQQLPEKYKEIFFDQSKNGYAGYIDGGASQEEFYKFIKPILEKMDGTEELLVKLNREDLLRKQRTFDNGSIPHQIHLGELHAILRRQEDFYPFLKDNREKIEKILTFRIPYYVGPLARGNSRFAWMTRKSEETITPWNFEEVVDKGASAQSFIERMTNFDKNLPNEKVLPKHSLLYEYFTVYNELTKVKYVTEGMRKPAFLSGEQKKAIVDLLFKTNRKVTVKQLKEDYFKKIECFDSVEISGVEDRFNASLGTYHDLLKIIKDKDFLDNEENEDILEDIVLTLTLFEDREMIEERLKTYAHLFDDKVMKQLKRRRYTGWGRLSRKLINGIRDKQSGKTILDFLKSDGFANRNFMQLIHDDSLTFKEDIQKAQVSGQGDSLHEHIANLAGSPAIKKGILQTVKVVDELVKVMGRHKPENIVIEMARENQTTQKGQKNSRERMKRIEEGIKELGSQILKEHPVENTQLQNEKLYLYYLQNGRDMYVDQELDINRLSDYDVDHIVPQSFLKDDSIDNKVLTRSDKARGKSDNVPSEEVVKKMKNYWRQLLNAKLITQRKFDNLTKAERGGLSELDKAGFIKRQLVETRQITKHVAQILDSRMNTKYDENDKLIREVKVITLKSKLVSDFRKDFQFYKVREINNYHHAHDAYLNAVVGTALIKKYPKLESEFVYGDYKVYDVRKMIAKSEQEIGKATAKYFFYSNIMNFFKTEITLANGEIRKRPLIETNGETGEIVWDKGRDFATVRKVLSMPQVNIVKKTEVQTGGFSKESILPKRNSDKLIARKKDWDPKKYGGFDSPTVAYSVLVVAKVEKGKSKKLKSVKELLGITIMERSSFEKNPIDFLEAKGYKEVKKDLIIKLPKYSLFELENGRKRMLASAGELQKGNELALPSKYVNFLYLASHYEKLKGSPEDNEQKQLFVEQHKHYLDEIIEQISEFSKRVILADANLDKVLSAYNKHRDKPIREQAENIIHLFTLTNLGAPAAFKYFDTTIDRKRYTSTKEVLDATLIHQSITGLYETRIDLSQLGGDGGGGGGGSGGTLNIEDEYRLHETSKGPDVPLGSTWLSDFPQAWAETGGMGLAFRQAPLIISLKATSTPVSIKQYPMSQEARLGIKPHIQRLLDQGILVPCQSPWNTPLLPVKKPGTNDYRPVQDLREVNKRVEDIHPTVPNPYNLLSGLPPSHQWYTVLDLKDAFFCLRLHPTSQSLFAFEWKDPEMGISGQLTWTRLPQGFKNSPTLFDEALHRDLADFRIQHPDLILLQYVDDLLLAATSELDCQQGTRALLQTLGDLGYRASAKKAQICQKQVKYLGYLLKEGQRWLTEARKETVMGQPTPKTPRQLREFLGTAGLCRLWIPGFAEMAAPLYPLTKTGTLFKWGPDQQKAYQEIKQALLTAPALGLPDLTKPFELFVDEKQGYAKGVLTQKLGPWRRPVAYLSKKLDPVAAGWPPCLRMVAAIAVLTKDVGKLTMGQPLVILAPHAVEALVKQPPDRWLSNARMTHYQALLLDTDRVQFGPIVALNPATLLPLPEEGLQHDCLDILAEAHGTRPDLTDQPLPDADHTWYTDGSSFLQEGQRRAGAAVTTETEVIWAKALPAGTSAQRAELIALTQALKMAAGKKLNVYTDSRYAFATAHIHGEIYRRRGLLTSEGKEIKNKDEILALLKALFLPKRLSIIHCPGHQKGNHAEARGNRMADQAAREVATRETPETSTLLAGKRTADGSEFEKRTADGSEFESPKKKAKVE

SEQ ID NO: 6593 - protein, 2091 aa, synthetic construct
MPAAKRVKLDGGDKKYSIGLDIGTNSVGWAVITDEYKVPSKKFKVLGNTDRHSIKKNLIGALLFDSGETAEATRLKRTARRRYTRRKNRICYLQEIFSNEMAKVDDSFFHRLEESFLVEEDKKHERHPIFGNIVDEVAYHEKYPTIYHLRKKLVDSTDKADLRLIYLALAHMIKFRGHFLIEGDLNPDNSDVDKLFIQLVQTYNQLFEENPINASGVDAKAILSARLSKSRRLENLIAQLPGEKKNGLFGNLIALSLGLTPNFKSNFDLAEDAKLQLSKDTYDDDLDNLLAQIGDQYADLFLAAKNLSDAILLSDILRVNTEITKAPLSASMIKRYDEHHQDLTLLKALVRQQLPEKYKEIFFDQSKNGYAGYIDGGASQEEFYKFIKPILEKMDGTEELLVKLNREDLLRKQRTFDNGSIPHQIHLGELHAILRRQEDFYPFLKDNREKIEKILTFRIPYYVGPLARGNSRFAWMTRKSEETITPWNFEEVVDKGASAQSFIERMTNFDKNLPNEKVLPKHSLLYEYFTVYNELTKVKYVTEGMRKPAFLSGEQKKAIVDLLFKTNRKVTVKQLKEDYFKKIECFDSVEISGVEDRFNASLGTYHDLLKIIKDKDFLDNEENEDILEDIVLTLTLFEDREMIEERLKTYAHLFDDKVMKQLKRRRYTGWGRLSRKLINGIRDKQSGKTILDFLKSDGFANRNFMQLIHDDSLTFKEDIQKAQVSGQGDSLHEHIANLAGSPAIKKGILQTVKVVDELVKVMGRHKPENIVIEMARENQTTQKGQKNSRERMKRIEEGIKELGSQILKEHPVENTQLQNEKLYLYYLQNGRDMYVDQELDINRLSDYDVDHIVPQSFLKDDSIDNKVLTRSDKARGKSDNVPSEEVVKKMKNYWRQLLNAKLITQRKFDNLTKAERGGLSELDKAGFIKRQLVETRQITKHVAQILDSRMNTKYDENDKLIREVKVITLKSKLVSDFRKDFQFYKVREINNYHHAHDAYLNAVVGTALIKKYPKLESEFVYGDYKVYDVRKMIAKSEQEIGKATAKYFFYSNIMNFFKTEITLANGEIRKRPLIETNGETGEIVWDKGRDFATVRKVLSMPQVNIVKKTEVQTGGFSKESILPKRNSDKLIARKKDWDPKKYGGFDSPTVAYSVLVVAKVEKGKSKKLKSVKELLGITIMERSSFEKNPIDFLEAKGYKEVKKDLIIKLPKYSLFELENGRKRMLASAGELQKGNELALPSKYVNFLYLASHYEKLKGSPEDNEQKQLFVEQHKHYLDEIIEQISEFSKRVILADANLDKVLSAYNKHRDKPIREQAENIIHLFTLTNLGAPAAFKYFDTTIDRKRYTSTKEVLDATLIHQSITGLYETRIDLSQLGGDGGGGGGGSGGTLNIEDEYRLHETSKGPDVPLGSTWLSDFPQAWAETGGMGLAVRQAPLIIPLKATSTPVSIKQYPMSQEARLGIKPHIQRLLDQGILVPCQSPWNTPLLPVKKPGTNDYRPVQDLREVNKRVEDIHPTVPNPYNLLSGLPPSHQWYTVLDLKDAFFCLRLHPTSQSLFAFEWRDPEMGISGQLTWTRLPQGFKNSPTLFNEALHRDLADFRIQHPDLILLQYVDDLLLAATSELDCQQGTRALLQTLGDLGYRASAKKAQICQKQVKYLGYLLKEGQRWLTEARKETVMGQPTPKTPRQLREFLGTAGFCRLWIPGFAEMAAPLYPLTKPGTLFEWGPDQQKAYQEIKQALLTAPALGLPDLTKPFELFVDEKQGYAKGVLTQKLGPWRRPVAYLSKKLDPVAAGWPPCLRMVAAIAVLTKDAGKLTMGQPLVILAPHAVEALVKQPPDRWLSNARMTHYQALLLDTDRVQFGPIVALNPATLLPLPEEGLQHDCLDILAEAHGTRPDLTDQPLPDADHTWYTDGSSFLQEGQRKAGAAVTTETEVVWAKALPAGTSAQRAELIALTQALKMAEGKKLNVYTDSRYAFATAHIHGEIYRRRGWLTSEGKEIKNKDEILALLKALFLPKRLSIIHCPGHQKGNRAEARGNRMADQAAREVATRETPETSTLLAGKRTADGSEFEKRTADGSEFESPKKKAKVE

SEQ ID NO: 6594 - protein, 2091 aa, synthetic construct
MPAAKRVKLDGGDKKYSIGLDIGTNSVGWAVITDEYKVPSKKFKVLGNTDRHSIKKNLIGALLFDSGETAEATRLKRTARRRYTRRKNRICYLQEIFSNEMAKVDDSFFHRLEESFLVEEDKKHERHPIFGNIVDEVAYHEKYPTIYHLRKKLVDSTDKADLRLIYLALAHMIKFRGHFLIEGDLNPDNSDVDKLFIQLVQTYNQLFEENPINASGVDAKAILSARLSKSRRLENLIAQLPGEKKNGLFGNLIALSLGLTPNFKSNFDLAEDAKLQLSKDTYDDDLDNLLAQIGDQYADLFLAAKNLSDAILLSDILRVNTEITKAPLSASMIKRYDEHHQDLTLLKALVRQQLPEKYKEIFFDQSKNGYAGYIDGGASQEEFYKFIKPILEKMDGTEELLVKLNREDLLRKQRTFDNGSIPHQIHLGELHAILRRQEDFYPFLKDNREKIEKILTFRIPYYVGPLARGNSRFAWMTRKSEETITPWNFEEVVDKGASAQSFIERMTNFDKNLPNEKVLPKHSLLYEYFTVYNELTKVKYVTEGMRKPAFLSGEQKKAIVDLLFKTNRKVTVKQLKEDYFKKIECFDSVEISGVEDRFNASLGTYHDLLKIIKDKDFLDNEENEDILEDIVLTLTLFEDREMIEERLKTYAHLFDDKVMKQLKRRRYTGWGRLSRKLINGIRDKQSGKTILDFLKSDGFANRNFMQLIHDDSLTFKEDIQKAQVSGQGDSLHEHIANLAGSPAIKKGILQTVKVVDELVKVMGRHKPENIVIEMARENQTTQKGQKNSRERMKRIEEGIKELGSQILKEHPVENTQLQNEKLYLYYLQNGRDMYVDQELDINRLSDYDVDHIVPQSFLKDDSIDNKVLTRSDKARGKSDNVPSEEVVKKMKNYWRQLLNAKLITQRKFDNLTKAERGGLSELDKAGFIKRQLVETRQITKHVAQILDSRMNTKYDENDKLIREVKVITLKSKLVSDFRKDFQFYKVREINNYHHAHDAYLNAVVGTALIKKYPKLESEFVYGDYKVYDVRKMIAKSEQEIGKATAKYFFYSNIMNFFKTEITLANGEIRKRPLIETNGETGEIVWDKGRDFATVRKVLSMPQVNIVKKTEVQTGGFSKESILPKRNSDKLIARKKDWDPKKYGGFDSPTVAYSVLVVAKVEKGKSKKLKSVKELLGITIMERSSFEKNPIDFLEAKGYKEVKKDLIIKLPKYSLFELENGRKRMLASAGELQKGNELALPSKYVNFLYLASHYEKLKGSPEDNEQKQLFVEQHKHYLDEIIEQISEFSKRVILADANLDKVLSAYNKHRDKPIREQAENIIHLFTLTNLGAPAAFKYFDTTIDRKRYTSTKEVLDATLIHQSITGLYETRIDLSQLGGDGGGGGGGSGGTLNIEDEYRLHETSKGPDVPLGSTWLSDFPQAWAETGGMGLAVRQAPLIIPLKATSTPVSIKQYPMSQEARLGIKPHIQRLLDQGILVPCQSPWNTPLLPVKKPGTNDYRPVQDLREVNKRVEDIHPTVPNPYNLLSGLPPSHQWYTVLDLKDAFFCLRLHPTSQSLFAFEWRDPEMGISGQLTWTRLPQGFKNSPTLFNEALHRDLADFRIQHPDLILLQYVDDLLLAATSELDCQQGTRALLQTLGDLGYRASAKKAQICQKQVKYLGYLLKEGQRWLTEARKETVMGQPTPKTPRQLREFLGKAGFCRLFIPGFAEMAAPLYPLTKPGTLFEWGPDQQKAYQEIKQALLTAPALGLPDLTKPFELFVDEKQGYAKGVLTQKLGPWRRPVAYLSKKLDPVAAGWPPCLRMVAAIAVLTKDAGKLTMGQPLVILAPHAVEALVKQPPDRWLSNARMTHYQALLLDTDRVQFGPIVALNPATLLPLPEEGLQHDCLDILAEAHGTRPDLTDQPLPDADHTWYTDGSSFLQEGQRKAGAAVTTETEVVWAKALPAGTSAQRAELIALTQALKMAEGKKLNVYTDSRYAFATAHIHGEIYRRRGWLTSEGKEIKNKDEILALLKALFLPKRLSIIHCPGHQKGNRAEARGNRMADQAAREVATRETPETSTLLAGKRTADGSEFEKRTADGSEFESPKKKAKVE

SEQ ID NO: 6595 - protein, 2111 aa, synthetic construct
MPAAKRVKLDGGDKKYSIGLDIGTNSVGWAVITDEYKVPSKKFKVLGNTDRHSIKKNLIGALLFDSGETAEATRLKRTARRRYTRRKNRICYLQEIFSNEMAKVDDSFFHRLEESFLVEEDKKHERHPIFGNIVDEVAYHEKYPTIYHLRKKLVDSTDKADLRLIYLALAHMIKFRGHFLIEGDLNPDNSDVDKLFIQLVQTYNQLFEENPINASGVDAKAILSARLSKSRRLENLIAQLPGEKKNGLFGNLIALSLGLTPNFKSNFDLAEDAKLQLSKDTYDDDLDNLLAQIGDQYADLFLAAKNLSDAILLSDILRVNTEITKAPLSASMIKRYDEHHQDLTLLKALVRQQLPEKYKEIFFDQSKNGYAGYIDGGASQEEFYKFIKPILEKMDGTEELLVKLNREDLLRKQRTFDNGSIPHQIHLGELHAILRRQEDFYPFLKDNREKIEKILTFRIPYYVGPLARGNSRFAWMTRKSEETITPWNFEEVVDKGASAQSFIERMTNFDKNLPNEKVLPKHSLLYEYFTVYNELTKVKYVTEGMRKPAFLSGEQKKAIVDLLFKTNRKVTVKQLKEDYFKKIECFDSVEISGVEDRFNASLGTYHDLLKIIKDKDFLDNEENEDILEDIVLTLTLFEDREMIEERLKTYAHLFDDKVMKQLKRRRYTGWGRLSRKLINGIRDKQSGKTILDFLKSDGFANRNFMQLIHDDSLTFKEDIQKAQVSGQGDSLHEHIANLAGSPAIKKGILQTVKVVDELVKVMGRHKPENIVIEMARENQTTQKGQKNSRERMKRIEEGIKELGSQILKEHPVENTQLQNEKLYLYYLQNGRDMYVDQELDINRLSDYDVDHIVPQSFLKDDSIDNKVLTRSDKARGKSDNVPSEEVVKKMKNYWRQLLNAKLITQRKFDNLTKAERGGLSELDKAGFIKRQLVETRQITKHVAQILDSRMNTKYDENDKLIREVKVITLKSKLVSDFRKDFQFYKVREINNYHHAHDAYLNAVVGTALIKKYPKLESEFVYGDYKVYDVRKMIAKSEQEIGKATAKYFFYSNIMNFFKTEITLANGEIRKRPLIETNGETGEIVWDKGRDFATVRKVLSMPQVNIVKKTEVQTGGFSKESILPKRNSDKLIARKKDWDPKKYGGFDSPTVAYSVLVVAKVEKGKSKKLKSVKELLGITIMERSSFEKNPIDFLEAKGYKEVKKDLIIKLPKYSLFELENGRKRMLASAGELQKGNELALPSKYVNFLYLASHYEKLKGSPEDNEQKQLFVEQHKHYLDEIIEQISEFSKRVILADANLDKVLSAYNKHRDKPIREQAENIIHLFTLTNLGAPAAFKYFDTTIDRKRYTSTKEVLDATLIHQSITGLYETRIDLSQLGGDGGGGGGGSGGTLNIEDEYRLHETSKEPDVSLGSTWLSDFPQAWAETGGMGLAVRQAPLIIPLKATSTPVSIKQYPMSQEARLGIKPHIQRLLDQGILVPCQSPWNTPLLPVKKPGTNDYRPVQDLREVNKRVEDIHPTVPNPYNLLSGLPPSHQWYTVLDLKDAFFCLRLHPTSQPLFAFEWRDPEMGISGQLTWTRLPQGFKNSPTLFNEALHRDLADFRIQHPDLILLQYVDDLLLAATSELDCQQGTRALLQTLGNLGYRASAKKAQICQKQVKYLGYLLKEGQRWLTEARKETVMGQPTPKTPRQLREFLGKAGFCRLFIPGFAEMAAPLYPLTKPGTLFNWGPDQQKAYQEIKQALLTAPALGLPDLTKPFELFVDEKQGYAKGVLTQKLGPWRRPVAYLSKKLDPVAAGWPPCLRMVAAIAVLTKDAGKLTMGQPLVILAPHAVEALVKQPPDRWLSNARMTHYQALLLDTDRVQFGPVVALNPATLLPLPEEGLQHNCLDILAEAHGTRPDLTDQPLPDADHTWYTDGSSLLQEGQRKAGAAVTTETEVIWAKALPAGTSAQRAELIALTQALKMAEGKKLNVYTDSRYAFATAHIHGEIYRRRGWLTSEGKEIKNKDEILALLKALFLPKRLSIIHCPGHQKGHSAEARGNRMADQAARKAAITETPDTSTLLIENSSPSGGSKRTADGSEFEAGKRTADGSEFEKRTADGSEFESPKKKAKVE

SEQ ID NO: 6596 - protein, 2111 aa, synthetic construct; identical to SEQ ID NO: 6595

SEQ ID NO: 6597 - protein, 2091 aa, synthetic construct
MPAAKRVKLDGGDKKYSIGLDIGTNSVGWAVITDEYKVPSKKFKVLGNTDRHSIKKNLIGALLFDSGETAEATRLKRTARRRYTRRKNRICYLQEIFSNEMAKVDDSFFHRLEESFLVEEDKKHERHPIFGNIVDEVAYHEKYPTIYHLRKKLVDSTDKADLRLIYLALAHMIKFRGHFLIEGDLNPDNSDVDKLFIQLVQTYNQLFEENPINASGVDAKAILSARLSKSRRLENLIAQLPGEKKNGLFGNLIALSLGLTPNFKSNFDLAEDAKLQLSKDTYDDDLDNLLAQIGDQYADLFLAAKNLSDAILLSDILRVNTEITKAPLSASMIKRYDEHHQDLTLLKALVRQQLPEKYKEIFFDQSKNGYAGYIDGGASQEEFYKFIKPILEKMDGTEELLVKLNREDLLRKQRTFDNGSIPHQIHLGELHAILRRQEDFYPFLKDNREKIEKILTFRIPYYVGPLARGNSRFAWMTRKSEETITPWNFEEVVDKGASAQSFIERMTNFDKNLPNEKVLPKHSLLYEYFTVYNELTKVKYVTEGMRKPAFLSGEQKKAIVDLLFKTNRKVTVKQLKEDYFKKIECFDSVEISGVEDRFNASLGTYHDLLKIIKDKDFLDNEENEDILEDIVLTLTLFEDREMIEERLKTYAHLFDDKVMKQLKRRRYTGWGRLSRKLINGIRDKQSGKTILDFLKSDGFANRNFMQLIHDDSLTFKEDIQKAQVSGQGDSLHEHIANLAGSPAIKKGILQTVKVVDELVKVMGRHKPENIVIEMARENQTTQKGQKNSRERMKRIEEGIKELGSQILKEHPVENTQLQNEKLYLYYLQNGRDMYVDQELDINRLSDYDVDHIVPQSFLKDDSIDNKVLTRSDKARGKSDNVPSEEVVKKMKNYWRQLLNAKLITQRKFDNLTKAERGGLSELDKAGFIKRQLVETRQITKHVAQILDSRMNTKYDENDKLIREVKVITLKSKLVSDFRKDFQFYKVREINNYHHAHDAYLNAVVGTALIKKYPKLESEFVYGDYKVYDVRKMIAKSEQEIGKATAKYFFYSNIMNFFKTEITLANGEIRKRPLIETNGETGEIVWDKGRDFATVRKVLSMPQVNIVKKTEVQTGGFSKESILPKRNSDKLIARKKDWDPKKYGGFDSPTVAYSVLVVAKVEKGKSKKLKSVKELLGITIMERSSFEKNPIDFLEAKGYKEVKKDLIIKLPKYSLFELENGRKRMLASAGELQKGNELALPSKYVNFLYLASHYEKLKGSPEDNEQKQLFVEQHKHYLDEIIEQISEFSKRVILADANLDKVLSAYNKHRDKPIREQAENIIHLFTLTNLGAPAAFKYFDTTIDRKRYTSTKEVLDATLIHQSITGLYETRIDLSQLGGDGGGGGGGSGGTLNIEDEYRLHEISTEPDVSPGSTWLSDFPQAWAETGGMGLAVRQAPLIIPLKATSTPVSIKQYPMSQEAKLGIKPHIQRLLDQGILVPCQSPWNTPLLPVKKPGTNDYRPVQGLREVNKRVEDIHPTVPNPYNLLSGLPTSHRWYTVLDLKDAFFCLRLHPTSQPLFASEWRDPGMGISGQLTWTRLPQGFKNSPTLFNEALHRGLADFRIQHPDLILLQYVDDLLLAATSELDCQQGTRALLKTLGNLGYRASAKKAQICQKQVKYLGYLLREGQRWLTEARKETVMGQPTPKTPRQLREFLGTAGFCRLWIPRFAEMAAPLYPLTKPGTLFNWGPDQQKAYHEIKQALLTAPALGLPDLTKPFELFVDEKQGYAKGVLTQKLGPWRRPVAYLSKKLDPVAAGWPPCLRMVAAIAVLTKDAGKLTMGQPLVILAPHAVEALVKQPPDRWLSNARMTHYQAMLLDTDRVQFGPVVALNPATLLPLPEEGAPHDCLEILAETHGTEPDLTDQPIPDADHTWYTDGSSFLQEGQRKAGAAVTTETEVIWARALPAGTSAQRAELIALTQALKMAEGKRLNVYTDSRYAFATAHIHGEIYKRRGWLTSEGREIKNKSEILALLKALFLPKRLSIIHCLGHQKGDSAEARGNRLADQAAREAAIKTPPDTSTLLAGKRTADGSEFEKRTADGSEFESPKKKAKVE

SEQ ID NO: 6598 - protein, 2082 aa, synthetic construct
MPAAKRVKLDGGDKKYSIGLDIGTNSVGWAVITDEYKVPSKKFKVLGNTDRHSIKKNLIGALLFDSGETAEATRLKRTARRRYTRRKNRICYLQEIFSNEMAKVDDSFFHRLEESFLVEEDKKHERHPIFGNIVDEVAYHEKYPTIYHLRKKLVDSTDKADLRLIYLALAHMIKFRGHFLIEGDLNPDNSDVDKLFIQLVQTYNQLFEENPINASGVDAKAILSARLSKSRRLENLIAQLPGEKKNGLFGNLIALSLGLTPNFKSNFDLAEDAKLQLSKDTYDDDLDNLLAQIGDQYADLFLAAKNLSDAILLSDILRVNTEITKAPLSASMIKRYDEHHQDLTLLKALVRQQLPEKYKEIFFDQSKNGYAGYIDGGASQEEFYKFIKPILEKMDGTEELLVKLNREDLLRKQRTFDNGSIPHQIHLGELHAILRRQEDFYPFLKDNREKIEKILTFRIPYYVGPLARGNSRFAWMTRKSEETITPWNFEEVVDKGASAQSFIERMTNFDKNLPNEKVLPKHSLLYEYFTVYNELTKVKYVTEGMRKPAFLSGEQKKAIVDLLFKTNRKVTVKQLKEDYFKKIECFDSVEISGVEDRFNASLGTYHDLLKIIKDKDFLDNEENEDILEDIVLTLTLFEDREMIEERLKTYAHLFDDKVMKQLKRRRYTGWGRLSRKLINGIRDKQSGKTILDFLKSDGFANRNFMQLIHDDSLTFKEDIQKAQVSGQGDSLHEHIANLAGSPAIKKGILQTVKVVDELVKVMGRHKPENIVIEMARENQTTQKGQKNSRERMKRIEEGIKELGSQILKEHPVENTQLQNEKLYLYYLQNGRDMYVDQELDINRLSDYDVDHIVPQSFLKDDSIDNKVLTRSDKARGKSDNVPSEEVVKKMKNYWRQLLNAKLITQRKFDNLTKAERGGLSELDKAGFIKRQLVETRQITKHVAQILDSRMNTKYDENDKLIREVKVITLKSKLVSDFRKDFQFYKVREINNYHHAHDAYLNAVVGTALIKKYPKLESEFVYGDYKVYDVRKMIAKSEQEIGKATAKYFFYSNIMNFFKTEITLANGEIRKRPLIETNGETGEIVWDKGRDFATVRKVLSMPQVNIVKKTEVQTGGFSKESILPKRNSDKLIARKKDWDPKKYGGFDSPTVAYSVLVVAKVEKGKSKKLKSVKELLGITIMERSSFEKNPIDFLEAKGYKEVKKDLIIKLPKYSLFELENGRKRMLASAGELQKGNELALPSKYVNFLYLASHYEKLKGSPEDNEQKQLFVEQHKHYLDEIIEQISEFSKRVILADANLDKVLSAYNKHRDKPIREQAENIIHLFTLTNLGAPAAFKYFDTTIDRKRYTSTKEVLDATLIHQSITGLYETRIDLSQLGGDGGGGGGGSGGIPWLMKKPLQLTTLVPLQEYEERLLKQTMLTGSYKEKLQSLFLKYDALWQHWENQVGHRRIKPHHIATGTVNPRPQKQYPINPKAKASIQTVINDLLKQGVLIQQNSIMNTPVYPVPKPDGKWRMVLDYREVNKTIPLIAAQNQHSAGILSSIFRGKYKTTLDLSNGFWAHSITPESYWLTAFTWLGQQYCWTRLPQGFLNSPALFNADVVDLLKEVPNVQVYVDDIYISHDDPREHLEQLEKVFSLLLNAGYVVSLKKSEIAQHEVEFLGFNITKEGRGLTETFKQKLLNITPPRDLKQLQSILGKLNFARNFIPNFSELVKPLYNIIATAPGKYITWTTDNSQQLQNIISMLNSAENLEERNPEVRLIMKVNTSPSAGYIRFYNEFAKRPIMYLNYVYTKAEVKFTNTEKLLTTIHKGLIKALDLGMGQEILVYSPIVSMTKIQKTPLPERKALPIRWITWMSYLEDPRIQFHYDKTLPELQQVPTVTDDIIAKIKHPSEFSMVFYTDGSAIKHPNVNKSHNAGMGIAQVQFKPEFTVINTWSIPLGDHTAQLAEVAAVEFACKKALKIDGPVLIVTDSFYVAESVNKELPYWQSNGFFNNKKKPLKHVSKWKSIADCIQLKPDIIIIHEKGHQPTASTFHTEGNNLADKLATQGSYVVNAGKRTADGSEFEKRTADGSEFESPKKKAKVE

SEQ ID NO: 6599 - protein, 2089 aa, synthetic construct
MPAAKRVKLDGGDKKYSIGLDIGTNSVGWAVITDEYKVPSKKFKVLGNTDRHSIKKNLIGALLFDSGETAEATRLKRTARRRYTRRKNRICYLQEIFSNEMAKVDDSFFHRLEESFLVEEDKKHERHPIFGNIVDEVAYHEKYPTIYHLRKKLVDSTDKADLRLIYLALAHMIKFRGHFLIEGDLNPDNSDVDKLFIQLVQTYNQLFEENPINASGVDAKAILSARLSKSRRLENLIAQLPGEKKNGLFGNLIALSLGLTPNFKSNFDLAEDAKLQLSKDTYDDDLDNLLAQIGDQYADLFLAAKNLSDAILLSDILRVNTEITKAPLSASMIKRYDEHHQDLTLLKALVRQQLPEKYKEIFFDQSKNGYAGYIDGGASQEEFYKFIKPILEKMDGTEELLVKLNREDLLRKQRTFDNGSIPHQIHLGELHAILRRQEDFYPFLKDNREKIEKILTFRIPYYVGPLARGNSRFAWMTRKSEETITPWNFEEVVDKGASAQSFIERMTNFDKNLPNEKVLPKHSLLYEYFTVYNELTKVKYVTEGMRKPAFLSGEQKKAIVDLLFKTNRKVTVKQLKEDYFKKIECFDSVEISGVEDRFNASLGTYHDLLKIIKDKDFLDNEENEDILEDIVLTLTLFEDREMIEERLKTYAHLFDDKVMKQLKRRRYTGWGRLSRKLINGIRDKQSGKTILDFLKSDGFANRNFMQLIHDDSLTFKEDIQKAQVSGQGDSLHEHIANLAGSPAIKKGILQTVKVVDELVKVMGRHKPENIVIEMARENQTTQKGQKNSRERMKRIEEGIKELGSQILKEHPVENTQLQNEKLYLYYLQNGRDMYVDQELDINRLSDYDVDHIVPQSFLKDDSIDNKVLTRSDKARGKSDNVPSEEVVKKMKNYWRQLLNAKLITQRKFDNLTKAERGGLSELDKAGFIKRQLVETRQITKHVAQILDSRMNTKYDENDKLIREVKVITLKSKLVSDFRKDFQFYKVREINNYHHAHDAYLNAVVGTALIKKYPKLESEFVYGDYKVYDVRKMIAKSEQEIGKATAKYFFYSNIMNFFKTEITLANGEIRKRPLIETNGETGEIVWDKGRDFATVRKVLSMPQVNIVKKTEVQTGGFSKESILPKRNSDKLIARKKDWDPKKYGGFDSPTVAYSVLVVAKVEKGKSKKLKSVKELLGITIMERSSFEKNPIDFLEAKGYKEVKKDLIIKLPKYSLFELENGRKRMLASAGELQKGNELALPSKYVNFLYLASHYEKLKGSPEDNEQKQLFVEQHKHYLDEIIEQISEFSKRVILADANLDKVLSAYNKHRDKPIREQAENIIHLFTLTNLGAPAAFKYFDTTIDRKRYTSTKEVLDATLIHQSITGLYETRIDLSQLGGDGGGGGGGSGGVLNLEEEYRLHEKPVPSSIDPSWLQLFPTVWAERAGMGLANQVPPVVVELRSGASPVAVRQYPMSKEAREGIRPHIQRFLDLGVLVPCQSPWNTPLLPVKKPGTNDYRPVQDLREINKRVQDIHPTVPNPYNLLSSLPPSHTWYSVLDLKDAFFCLKLHPNSQPLFAFEWRDPEKGNTGQLTWTRLPQGFKNSPTLFNEALHRDLAPFRALNPQVVLLQYVDDLLVAAPTYRDCKEGTQKLLQELSKLGYRVSAKKAQLCQKEVTYLGYLLKEGKRWLTPARKATVMKIPPPTTPRQVREFLGTAGFCRLWIPGFASLAAPLYPLTKPSIPFIWTEEHQKAFDRIKEALLSAPALALPDLTKPFTLYVDERAGVARGVLTQTLGPWRRPVAYLSKKLDPVASGWPTCLKAVAAVALLLKDADKLTLGQNVTVIASHSLESIVRQPPDRWMTNARMTHYQSLLLNERVSFAPPAVLNPATLLPVESEATPVHRCSEILAEETGTRRDLKDQPLPGVPAWYTDGSSFIAEGKRRAGAAIVDGKRTVWASSLPEGTSAQKAELVALTQALRLAEGKDINIYTDSRYAFATAHIHGAIYKQRGWLTSAGKDIKNKEEILALLEAIHLPKRVAIIHCPGHQKGNDPVATGNRRADEAAKQAALSTRVLAETTKPAGKRTADGSEFEKRTADGSEFESPKKKAKVE

SEQ ID NO: 6600 - protein, 2089 aa, synthetic construct
MPAAKRVKLDGGDKKYSIGLDIGTNSVGWAVITDEYKVPSKKFKVLGNTDRHSIKKNLIGALLFDSGETAEATRLKRTARRRYTRRKNRICYLQEIFSNEMAKVDDSFFHRLEESFLVEEDKKHERHPIFGNIVDEVAYHEKYPTIYHLRKKLVDSTDKADLRLIYLALAHMIKFRGHFLIEGDLNPDNSDVDKLFIQLVQTYNQLFEENPINASGVDAKAILSARLSKSRRLENLIAQLPGEKKNGLFGNLIALSLGLTPNFKSNFDLAEDAKLQLSKDTYDDDLDNLLAQIGDQYADLFLAAKNLSDAILLSDILRVNTEITKAPLSASMIKRYDEHHQDLTLLKALVRQQLPEKYKEIFFDQSKNGYAGYIDGGASQEEFYKFIKPILEKMDGTEELLVKLNREDLLRKQRTFDNGSIPHQIHLGELHAILRRQEDFYPFLKDNREKIEKILTFRIPYYVGPLARGNSRFAWMTRKSEETITPWNFEEVVDKGASAQSFIERMTNFDKNLPNEKVLPKHSLLYEYFTVYNELTKVKYVTEGMRKPAFLSGEQKKAIVDLLFKTNRKVTVKQLKEDYFKKIECFDSVEISGVEDRFNASLGTYHDLLKIIKDKDFLDNEENEDILEDIVLTLTLFEDREMIEERLKTYAHLFDDKVMKQLKRRRYTGWGRLSRKLINGIRDKQSGKTILDFLKSDGFANRNFMQLIHDDSLTFKEDIQKAQVSGQGDSLHEHIANLAGSPAIKKGILQTVKVVDELVKVMGRHKPENIVIEMARENQTTQKGQKNSRERMKRIEEGIKELGSQILKEHPVENTQLQNEKLYLYYLQNGRDMYVDQELDINRLSDYDVDHIVPQSFLKDDSIDNKVLTRSDKARGKSDNVPSEEVVKKMKNYWRQLLNAKLITQRKFDNLTKAERGGLSELDKAGFIKRQLVETRQITKHVAQILDSRMNTKYDENDKLIREVKVITLKSKLVSDFRKDFQFYKVREINNYHHAHDAYLNAVVGTALIKKYPKLESEFVYGDYKVYDVRKMIAKSEQEIGKATAKYFFYSNIMNFFKTEITLANGEIRKRPLIETNGETGEIVWDKGRDFATVRKVLSMPQVNIVKKTEVQTGGFSKESILPKRNSDKLIARKKDWDPKKYGGFDSPTVAYSVLVVAKVEKGKSKKLKSVKELLGITIMERSSFEKNPIDFLEAKGYKEVKKDLIIKLPKYSLFELENGRKRMLASAGELQKGNELALPSKYVNFLYLASHYEKLKGSPEDNEQKQLFVEQHKHYLDEIIEQISEFSKRVILADANLDKVLSAYNKHRDKPIREQAENIIHLFTLTNLGAPAAFKYFDTTIDRKRYTSTKEVLDATLIHQSITGLYETRIDLSQLGGDGGGGGGGSGGVLNLEEEYRLHEKPVPSSIDPSWLQLFPTVWAERAGMGLANQVPPVVVELRSGASPVAVRQYPMSKEAREGIRPHIQRFLDLGVLVPCQSPWNTPLLPVKKPGTNDYRPVQDLREINKRVQDIHPTVPNPYNLLSSLPPSHTWYSVLDLKDAFFCLKLHPNSQPLFAFEWRDPEKGNTGQLTWTRLPQGFKNSPTLFNEALHRDLAPFRALNPQVVLLQYVDDLLVAAPTYRDCKEGTQKLLQELSKLGYRVSAKKAQLCQKEVTYLGYLLKEGKRWLTPARKATVMKIPPPTTPRQVREFLGKAGFCRLFIPGFASLAAPLYPLTKPSIPFIWTEEHQKAFDRIKEALLSAPALALPDLTKPFTLYVDERAGVARGVLTQTLGPWRRPVAYLSKKLDPVASGWPTCLKAVAAVALLLKDADKLTLGQNVTVIASHSLESIVRQPPDRWMTNARMTHYQSLLLNERVSFAPPAVLNPATLLPVESEATPVHRCSEILAEETGTRRDLKDQPLPGVPAWYTDGSSFIAEGKRRAGAAIVDGKRTVWASSLPEGTSAQKAELVALTQALRLAEGKDINIYTDSRYAFATAHIHGAIYKQRGWLTSAGKDIKNKEEILALLEAIHLPKRVAIIHCPGHQKGNDPVATGNRRADEAAKQAALSTRVLAETTKPAGKRTADGSEFEKRTADGSEFESPKKKAKVE

SEQ ID NO: 6601 - protein, 2091 aa, synthetic construct
MPAAKRVKLDGGDKKYSIGLDIGTNSVGWAVITDEYKVPSKKFKVLGNTDRHSIKKNLIGALLFDSGETAEATRLKRTARRRYTRRKNRICYLQEIFSNEMAKVDDSFFHRLEESFLVEEDKKHERHPIFGNIVDEVAYHEKYPTIYHLRKKLVDSTDKADLRLIYLALAHMIKFRGHFLIEGDLNPDNSDVDKLFIQLVQTYNQLFEENPINASGVDAKAILSARLSKSRRLENLIAQLPGEKKNGLFGNLIALSLGLTPNFKSNFDLAEDAKLQLSKDTYDDDLDNLLAQIGDQYADLFLAAKNLSDAILLSDILRVNTEITKAPLSASMIKRYDEHHQDLTLLKALVRQQLPEKYKEIFFDQSKNGYAGYIDGGASQEEFYKFIKPILEKMDGTEELLVKLNREDLLRKQRTFDNGSIPHQIHLGELHAILRRQEDFYPFLKDNREKIEKILTFRIPYYVGPLARGNSRFAWMTRKSEETITPWNFEEVVDKGASAQSFIERMTNFDKNLPNEKVLPKHSLLYEYFTVYNELTKVKYVTEGMRKPAFLSGEQKKAIVDLLFKTNRKVTVKQLKEDYFKKIECFDSVEISGVEDRFNASLGTYHDLLKIIKDKDFLDNEENEDILEDIVLTLTLFEDREMIEERLKTYAHLFDDKVMKQLKRRRYTGWGRLSRKLINGIRDKQSGKTILDFLKSDGFANRNFMQLIHDDSLTFKEDIQKAQVSGQGDSLHEHIANLAGSPAIKKGILQTVKVVDELVKVMGRHKPENIVIEMARENQTTQKGQKNSRERMKRIEEGIKELGSQILKEHPVENTQLQNEKLYLYYLQNGRDMYVDQELDINRLSDYDVDHIVPQSFLKDDSIDNKVLTRSDKARGKSDNVPSEEVVKKMKNYWRQLLNAKLITQRKFDNLTKAERGGLSELDKAGFIKRQLVETRQITKHVAQILDSRMNTKYDENDKLIREVKVITLKSKLVSDFRKDFQFYKVREINNYHHAHDAYLNAVVGTALIKKYPKLESEFVYGDYKVYDVRKMIAKSEQEIGKATAKYFFYSNIMNFFKTEITLANGEIRKRPLIETNGETGEIVWDKGRDFATVRKVLSMPQVNIVKKTEVQTGGFSKESILPKRNSDKLIARKKDWDPKKYGGFDSPTVAYSVLVVAKVEKGKSKKLKSVKELLGITIMERSSFEKNPIDFLEAKGYKEVKKDLIIKLPKYSLFELENGRKRMLASAGELQKGNELALPSKYVNFLYLASHYEKLKGSPEDNEQKQLFVEQHKHYLDEIIEQISEFSKRVILADANLDKVLSAYNKHRDKPIREQAENIIHLFTLTNLGAPAAFKYFDTTIDRKRYTSTKEVLDATLIHQSITGLYETRIDLSQLGGDGGGGGGGSGGTLNIEDEYRLHETSKEPDVPLGSTWLSDFPQAWAETGGMGLAVRQAPLIIPLKATSTPVSIKQYPMSQEARLGIKPHIQRLLDQGILVPCQSPWNTPLLPVKKPGTNDYRPVQDLREVNKRVEDIHPTVPNPYNLLSGLPPSHQWYTVLDLKDAFFCLRLHPTSQPLFAFEWRDPEMGISGQLTWTRLPQGFKNSPTLFNEALHRDLADFRIQHPDLILLQYVDDLLLAATSEQDCQRGTRALLQTLGNLGYRASAKKAQICQKQVKYLGYLLKEGQRWLTEARKETVMGQPTPKTPRQLREFLGKAGFCRLFIPGFAEMAAPLYPLTKPGTLFNWGPDQQKAYQEIKQALLTAPALGLPDLTKPFELFVDEKQGYAKGVLTQKLGPWRRPVAYLSKKLDPVAAGWPPCLRMVAAIAVLTKDAGKLTMGQPLVILAPHAVEALVKQPPDRWLSNARMTHYQAMLLDTDRVQFGPVVALNPATLLPLPEKEAPHDCLEILAETHGTRPDLTDQPIPDADYTWYTDGSSFLQEGQRRAGAAVTTETEVIWARALPAGTSAQRAELIALTQALKMAEGKKLNVYTDSRYAFATAHVHGEIYRRRGWLTSEGREIKNKNEILALLKALFLPKRLSIIHCPGHQKGNSAEARGNRMADQAAREAAMKAVLETSTLLAGKRTADGSEFEKRTADGSEFESPKKKAKVE

SEQ ID NO: 6602 - protein, 2168 aa, synthetic construct
MPAAKRVKLDGGDKKYSIGLDIGTNSVGWAVITDEYKVPSKKFKVLGNTDRHSIKKNLIGALLFDSGETAEATRLKRTARRRYTRRKNRICYLQEIFSNEMAKVDDSFFHRLEESFLVEEDKKHERHPIFGNIVDEVAYHEKYPTIYHLRKKLVDSTDKADLRLIYLALAHMIKFRGHFLIEGDLNPDNSDVDKLFIQLVQTYNQLFEENPINASGVDAKAILSARLSKSRRLENLIAQLPGEKKNGLFGNLIALSLGLTPNFKSNFDLAEDAKLQLSKDTYDDDLDNLLAQIGDQYADLFLAAKNLSDAILLSDILRVNTEITKAPLSASMIKRYDEHHQDLTLLKALVRQQLPEKYKEIFFDQSKNGYAGYIDGGASQEEFYKFIKPILEKMDGTEELLVKLNREDLLRKQRTFDNGSIPHQIHLGELHAILRRQEDFYPFLKDNREKIEKILTFRIPYYVGPLARGNSRFAWMTRKSEETITPWNFEEVVDKGASAQSFIERMTNFDKNLPNEKVLPKHSLLYEYFTVYNELTKVKYVTEGMRKPAFLSGEQKKAIVDLLFKTNRKVTVKQLKEDYFKKIECFDSVEISGVEDRFNASLGTYHDLLKIIKDKDFLDNEENEDILEDIVLTLTLFEDREMIEERLKTYAHLFDDKVMKQLKRRRYTGWGRLSRKLINGIRDKQSGKTILDFLKSDGFANRNFMQLIHDDSLTFKEDIQKAQVSGQGDSLHEHIANLAGSPAIKKGILQTVKVVDELVKVMGRHKPENIVIEMARENQTTQKGQKNSRERMKRIEEGIKELGSQILKEHPVENTQLQNEKLYLYYLQNGRDMYVDQELDINRLSDYDVDHIVPQSFLKDDSIDNKVLTRSDKARGKSDNVPSEEVVKKMKNYWRQLLNAKLITQRKFDNLTKAERGGLSELDKAGFIKRQLVETRQITKHVAQILDSRMNTKYDENDKLIREVKVITLKSKLVSDFRKDFQFYKVREINNYHHAHDAYLNAVVGTALIKKYPKLESEFVYGDYKVYDVRKMIAKSEQEIGKATAKYFFYSNIMNFFKTEITLANGEIRKRPLIETNGETGEIVWDKGRDFATVRKVLSMPQVNIVKKTEVQTGGFSKESILPKRNSDKLIARKKDWDPKKYGGFDSPTVAYSVLVVAKVEKGKSKKLKSVKELLGITIMERSSFEKNPIDFLEAKGYKEVKKDLIIKLPKYSLFELENGRKRMLASAGELQKGNELALPSKYVNFLYLASHYEKLKGSPEDNEQKQLFVEQHKHYLDEIIEQISEFSKRVILADANLDKVLSAYNKHRDKPIREQAENIIHLFTLTNLGAPAAFKYFDTTIDRKRYTSTKEVLDATLIHQSITGLYETRIDLSQLGGDGGGGSGSSGGMDLLKPLTVERKGVKIKGYWNSQADITCVPKDLLQGEEPVRQQNVTTIHGTQEGDVYYVNLKIDGRRINTEVIGTTLDYAIITPGDVPWILKKPLELTIKLDLEEQQGTLLNNSILSKKGKEELKQLFEKYSALWQSWENQVGHRRIRPHKIATGTVKPTPQKQYHINPKAKPDIQIVINDLLKQGVLIQKESTMNTPVYPVPKPNGRWRMVLDYRAVNKVTPLIAVQNQHSYGILGSLFKGRYKTTIDLSNGFWAHPIVPEDYWITAFTWQGKQYCWTVLPQGFLNSPGLFTGDVVDLLQGIPNVEVYVDDVYISHDSEKEHLEYLDILFNRLKEAGYIISLKKSNIANSIVDFLGFQITNEGRGLTDTFKEKLENITAPTTLKQLQSILGLLNFARNFIPDFTELIAPLYALIPKSTKNYVPWQIEHSTTLETLITKLNGAEYLQGRKGDKTLIMKVNASYTTGYIRYYNEGEKKPISYVSIVFSKTELKFTELEKLLTTVHKGLLKALDLSMGQNIHVYSPIVSMQNIQKTPQTAKKALASRWLSWLSYLEDPRIRFFYDPQMPALKDLPAVDTGKDNKKHPSNFQHIFYTDGSAITSPTKEGHLNAGMGIVYFINKDGNLQKQQEWSISLGNHTAQFAEIAAFEFALKKCLPLGGNILVVTDSNYVAKAYNEELDVWASNGFVNNRKKPLKHISKWKSVADLKRLRPDVVVTHEPGHQKLDSSPHAYGNNLADQLATQASFKVHAGKRTADGSEFEKRTADGSEFESPKKKAKVE

SEQ ID NO: 6603 - protein, 2090 aa, synthetic construct
MPAAKRVKLDGGDKKYSIGLDIGTNSVGWAVITDEYKVPSKKFKVLGNTDRHSIKKNLIGALLFDSGETAEATRLKRTARRRYTRRKNRICYLQEIFSNEMAKVDDSFFHRLEESFLVEEDKKHERHPIFGNIVDEVAYHEKYPTIYHLRKKLVDSTDKADLRLIYLALAHMIKFRGHFLIEGDLNPDNSDVDKLFIQLVQTYNQLFEENPINASGVDAKAILSARLSKSRRLENLIAQLPGEKKNGLFGNLIALSLGLTPNFKSNFDLAEDAKLQLSKDTYDDDLDNLLAQIGDQYADLFLAAKNLSDAILLSDILRVNTEITKAPLSASMIKRYDEHHQDLTLLKALVRQQLPEKYKEIFFDQSKNGYAGYIDGGASQEEFYKFIKPILEKMDGTEELLVKLNREDLLRKQRTFDNGSIPHQIHLGELHAILRRQEDFYPFLKDNREKIEKILTFRIPYYVGPLARGNSRFAWMTRKSEETITPWNFEEVVDKGASAQSFIERMTNFDKNLPNEKVLPKHSLLYEYFTVYNELTKVKYVTEGMRKPAFLSGEQKKAIVDLLFKTNRKVTVKQLKEDYFKKIECFDSVEISGVEDRFNASLGTYHDLLKIIKDKDFLDNEENEDILEDIVLTLTLFEDREMIEERLKTYAHLFDDKVMKQLKRRRYTGWGRLSRKLINGIRDKQSGKTILDFLKSDGFANRNFMQLIHDDSLTFKEDIQKAQVSGQGDSLHEHIANLAGSPAIKKGILQTVKVVDELVKVMGRHKPENIVIEMARENQTTQKGQKNSRERMKRIEEGIKELGSQILKEHPVENTQLQNEKLYLYYLQNGRDMYVDQELDINRLSDYDVDHIVPQSFLKDDSIDNKVLTRSDKARGKSDNVPSEEVVKKMKNYWRQLLNAKLITQRKFDNLTKAERGGLSELDKAGFIKRQLVETRQITKHVAQILDSRMNTKYDENDKLIREVKVITLKSKLVSDFRKDFQFYKVREINNYHHAHDAYLNAVVGTALIKKYPKLESEFVYGDYKVYDVRKMIAKSEQEIGKATAKYFFYSNIMNFFKTEITLANGEIRKRPLIETNGETGEIVWDKGRDFATVRKVLSMPQVNIVKKTEVQTGGFSKESILPKRNSDKLIARKKDWDPKKYGGFDSPTVAYSVLVVAKVEKGKSKKLKSVKELLGITIMERSSFEKNPIDFLEAKGYKEVKKDLIIKLPKYSLFELENGRKRMLASAGELQKGNELALPSKYVNFLYLASHYEKLKGSPEDNEQKQLFVEQHKHYLDEIIEQISEFSKRVILADANLDKVLSAYNKHRDKPIREQAENIIHLFTLTNLGAPAAFKYFDTTIDRKRYTSTKEVLDATLIHQSITGLYETRIDLSQLGGDGGGGSGSSGGTLQLEEEYRLFEPESTQKQEMDIWLKNFPQAWAETGGMGTAHCQAPVLIQLKATATPISIRQYPMPHEAYQGIKPHIRRMLDQGILKPCQSPWNTPLLPVKKPGTEDYRPVQDLREVNKRVEDIHPTVPNPYNLLSTLPPSHPWYTVLDLKDAFFCLRLHSESQLLFAFEWRDPEIGLSGQLTWTRLPQGFKNSPTLFNEALHSDLADFRVRYPALVLLQYVDDLLLAAATRTECLEGTKALLETLGNKGYRASAKKAQICLQEVTYLGYSLKDGQRWLTKARKEAILSIPVPKNSRQVREFLGKAGYCRLFIPGFAELAAPLYPLTRPGTLFQWGTEQQLAFEDIKKALLSSPALGLPDITKPFELFIDENSGFAKGVLVQKLGPWKRPVAYLSKKLDTVASGWPPCLRMVAAIAILVKDAGKLTLGQPLTILTSHPVEALVRQPPNKWLSNARMTHYQAMLLDAERVHFGPTVSLNPATLLPLPSGGNHHDCLQILAETHGTRPDLTDQPLPDADLTWYTDGSSFIRNGEREAGAAVTTESEVIWAAPLPPGTSAQRAELIALTQALKMAEGKKLTVYTDSRYAFATTHVHGEIYRRRGWLTSEGKEIKNKNEILALLEALFLPKRLSIIHCPGHQKGDSPQAKGNRLADDTAKKAATETHSSLTVLPAGKRTADGSEFEKRTADGSEFESPKKKAKVE

SEQ ID NO: 6604 - protein, 2213 aa, synthetic construct
MPAAKRVKLDGGDKKYSIGLDIGTNSVGWAVITDEYKVPSKKFKVLGNTDRHSIKKNLIGALLFDSGETAEATRLKRTARRRYTRRKNRICYLQEIFSNEMAKVDDSFFHRLEESFLVEEDKKHERHPIFGNIVDEVAYHEKYPTIYHLRKKLVDSTDKADLRLIYLALAHMIKFRGHFLIEGDLNPDNSDVDKLFIQLVQTYNQLFEENPINASGVDAKAILSARLSKSRRLENLIAQLPGEKKNGLFGNLIALSLGLTPNFKSNFDLAEDAKLQLSKDTYDDDLDNLLAQIGDQYADLFLAAKNLSDAILLSDILRVNTEITKAPLSASMIKRYDEHHQDLTLLKALVRQQLPEKYKEIFFDQSKNGYAGYIDGGASQEEFYKFIKPILEKMDGTEELLVKLNREDLLRKQRTFDNGSIPHQIHLGELHAILRRQEDFYPFLKDNREKIEKILTFRIPYYVGPLARGNSRFAWMTRKSEETITPWNFEEVVDKGASAQSFIERMTNFDKNLPNEKVLPKHSLLYEYFTVYNELTKVKYVTEGMRKPAFLSGEQKKAIVDLLFKTNRKVTVKQLKEDYFKKIECFDSVEISGVEDRFNASLGTYHDLLKIIKDKDFLDNEENEDILEDIVLTLTLFEDREMIEERLKTYAHLFDDKVMKQLKRRRYTGWGRLSRKLINGIRDKQSGKTILDFLKSDGFANRNFMQLIHDDSLTFKEDIQKAQVSGQGDSLHEHIANLAGSPAIKKGILQTVKVVDELVKVMGRHKPENIVIEMARENQTTQKGQKNSRERMKRIEEGIKELGSQILKEHPVENTQLQNEKLYLYYLQNGRDMYVDQELDINRLSDYDVDHIVPQSFLKDDSIDNKVLTRSDKARGKSDNVPSEEVVKKMKNYWRQLLNAKLITQRKFDNLTKAERGGLSELDKAGFIKRQLVETRQITKHVAQILDSRMNTKYDENDKLIREVKVITLKSKLVSDFRKDFQFYKVREINNYHHAHDAYLNAVVGTALIKKYPKLESEFVYGDYKVYDVRKMIAKSEQEIGKATAKYFFYSNIMNFFKTEITLANGEIRKRPLIETNGETGEIVWDKGRDFATVRKVLSMPQVNIVKKTEVQTGGFSKESILPKRNSDKLIARKKDWDPKKYGGFDSPTVAYSVLVVAKVEKGKSKKLKSVKELLGITIMERSSFEKNPIDFLEAKGYKEVKKDLIIKLPKYSLFELENGRKRMLASAGELQKGNELALPSKYVNFLYLASHYEKLKGSPEDNEQKQLFVEQHKHYLDEIIEQISEFSKRVILADANLDKVLSAYNKHRDKPIREQAENIIHLFTLTNLGAPAAFKYFDTTIDRKRYTSTKEVLDATLIHQSITGLYETRIDLSQLGGDGGGGSGSSGGTLGDQGSRGSDPLPEPRVTLTVEGIPTEFLVNTGAEHSVLTKPMGKMGSKRTVVAGATGSKVYPWTTKRLLKIGQKQVTHSFLVIPECPAPLLGRDLLTKLKAQIQFSTEGPQVTWEDRPAMCLVLNLEEEYRLHEKPVPPSIDPSWLQLFPMVWAEKAGMGLANQVPPVVVELKSDASPVAVRQYPMSKEAREGIRPHIQRFLDLGILVPCQSPWNTPLLPVKKPGTNDYRPVQDLREVNKRVQDIHPTVPNPYNLLSSLPPSHTWYSVLDLKDAFFCLKLHPNSQPLFAFEWRDPEKGNTGQLTWTRLPQGFKNSPTLFDEALHRDLASFRALNPQVVMLQYVDDLLVAAPTYRDCKEGTRRLLQELSKLGYRVSAKKAQLCREEVTYLGYLLKGGKRWLTPARKATVMKIPTPTTPRQVREFLGTAGFCRLWIPGFASLAAPLYPLTREKVPFTWTEAHQEAFGRIKEALLSAPALALPDLTKPFALYVDEKEGVARGVLTQTLGPWRRPVAYLSKKLDPVASGWPTCLKAIAAVALLLKDADKLTLGQNVLVIAPHNLESIVRQPPDRWMTNARMTHYQSLLLNERVSFAPPAILNPATLLPVESDDTPIHICSEILAEETGTRPDLRDQPLPGVPAWYTDGSSFIMDGRRQAGAAIVDNKRTVWASNLPEGTSAQKAELIALTQALRLAEGKSINIYTDSRYAFATAHVHGAIYKQRGLLTSAGKDIKNKEEILALLEAIHLPKRVAIIHCPGHQRGTDPVATGNRKADEAAKQAAQSTRILTETTKNAGKRTADGSEFEKRTADGSEFESPKKKAKVE

SEQ ID NO: 6605 - protein, 2091 aa, synthetic construct
MPAAKRVKLDGGDKKYSIGLDIGTNSVGWAVITDEYKVPSKKFKVLGNTDRHSIKKNLIGALLFDSGETAEATRLKRTARRRYTRRKNRICYLQEIFSNEMAKVDDSFFHRLEESFLVEEDKKHERHPIFGNIVDEVAYHEKYPTIYHLRKKLVDSTDKADLRLIYLALAHMIKFRGHFLIEGDLNPDNSDVDKLFIQLVQTYNQLFEENPINASGVDAKAILSARLSKSRRLENLIAQLPGEKKNGLFGNLIALSLGLTPNFKSNFDLAEDAKLQLSKDTYDDDLDNLLAQIGDQYADLFLAAKNLSDAILLSDILRVNTEITKAPLSASMIKRYDEHHQDLTLLKALVRQQLPEKYKEIFFDQSKNGYAGYIDGGASQEEFYKFIKPILEKMDGTEELLVKLNREDLLRKQRTFDNGSIPHQIHLGELHAILRRQEDFYPFLKDNREKIEKILTFRIPYYVGPLARGNSRFAWMTRKSEETITPWNFEEVVDKGASAQSFIERMTNFDKNLPNEKVLPKHSLLYEYFTVYNELTKVKYVTEGMRKPAFLSGEQKKAIVDLLFKTNRKVTVKQLKEDYFKKIECFDSVEISGVEDRFNASLGTYHDLLKIIKDKDFLDNEENEDILEDIVLTLTLFEDREMIEERLKTYAHLFDDKVMKQLKRRRYTGWGRLSRKLINGIRDKQSGKTILDFLKSDGFANRNFMQLIHDDSLTFKEDIQKAQVSGQGDSLHEHIANLAGSPAIKKGILQTVKVVDELVKVMGRHKPENIVIEMARENQTTQKGQKNSRERMKRIEEGIKELGSQILKEHPVENTQLQNEKLYLYYLQNGRDMYVDQELDINRLSDYDVDHIVPQSFLKDDSIDNKVLTRSDKARGKSDNVPSEEVVKKMKNYWRQLLNAKLITQRKFDNLTKAERGGLSELDKAGFIKRQLVETRQITKHVAQILDSRMNTKYDENDKLIREVKVITLKSKLVSDFRKDFQFYKVREINNYHHAHDAYLNAVVGTALIKKYPKLESEFVYGDYKVYDVRKMIAKSEQEIGKATAKYFFYSNIMNFFKTEITLANGEIRKRPLIETNGETGEIVWDKGRDFATVRKVLSMPQVNIVKKTEVQTGGFSKESILPKRNSDKLIARKKDWDPKKYGGFDSPTVAYSVLVVAKVEKGKSKKLKSVKELLGITIMERSSFEKNPIDFLEAKGYKEVKKDLIIKLPKYSLFELENGRKRMLASAGELQKGNELALPSKYVNFLYLASHYEKLKGSPEDNEQKQLFVEQHKHYLDEIIEQISEFSKRVILADANLDKVLSAYNKHRDKPIREQAENIIHLFTLTNLGAPAAFKYFDTTIDRKRYTSTKEVLDATLIHQSITGLYETRIDLSQLGGDGGGGSGSSGGTLGIEDEYRLHETSTEPDVSLGSTWLSDFPQAWAETGGMGLAVRQAPLIIPLKATSTPVSIQQYPMSHEARLGIKPHIQRLLDQGILVPCQSPWNTPLLPVKKPGTNDYRPVQDLREVNKRVEDIHPTVPNPYNLLSGLPPSHQWYTVLDLKDAFFCLRLHPTSQPLFAFEWRDPGMGISGQLTWTRLPQGFKNSPTLFDEALHRDLADFRIQHPDLILLQYVDDILLAATSELDCQQGTRALLQTLGDLGYRASAKKAQICQKQVKYLGYLLREGQRWLTEARKETVMGQPVPKTPRQLREFLGTAGFCRLWIPGFAEMAAPLYPLTKTGTLFSWGPDQQKAYQEIKQALLTAPALGLPDLTKPFELFVDEKQGYAKGVLTQKLGPWRRPVAYLSKKLDPVAAGWPPCLRMVAAIAVLTKDAGKLTMGQPLVILAPHAVEALVKQPPDRWLSNARMTHYQAMLLDTDRVQFGPVVALNPATLLPLPEEGAPHDCLEILAETHGTRPDLTDQPIPDADHTWYTDGSSFLQEGQRKAGAAVTTETEVIWAGALPAGTSAQRAELIALTQALKMAEGKRLNVYTDSRYAFATAHIHGEIYRRRGLLTSEGREIKNKSEILALLKALFLPKRLSIIHCLGHQKGDSAEARGNRLADQAAREAAIKTPPDTSTLLAGKRTADGSEFEKRTADGSEFESPKKKAKVE

SEQ ID NO: 6606 - protein, 2091 aa, synthetic construct
MPAAKRVKLDGGDKKYSIGLDIGTNSVGWAVITDEYKVPSKKFKVLGNTDRHSIKKNLIGALLFDSGETAEATRLKRTARRRYTRRKNRICYLQEIFSNEMAKVDDSFFHRLEESFLVEEDKKHERHPIFGNIVDEVAYHEKYPTIYHLRKKLVDSTDKADLRLIYLALAHMIKFRGHFLIEGDLNPDNSDVDKLFIQLVQTYNQLFEENPINASGVDAKAILSARLSKSRRLENLIAQLPGEKKNGLFGNLIALSLGLTPNFKSNFDLAEDAKLQLSKDTYDDDLDNLLAQIGDQYADLFLAAKNLSDAILLSDILRVNTEITKAPLSASMIKRYDEHHQDLTLLKALVRQQLPEKYKEIFFDQSKNGYAGYIDGGASQEEFYKFIKPILEKMDGTEELLVKLNREDLLRKQRTFDNGSIPHQIHLGELHAILRRQEDFYPFLKDNREKIEKILTFRIPYYVGPLARGNSRFAWMTRKSEETITPWNFEEVVDKGASAQSFIERMTNFDKNLPNEKVLPKHSLLYEYFTVYNELTKVKYVTEGMRKPAFLSGEQKKAIVDLLFKTNRKVTVKQLKEDYFKKIECFDSVEISGVEDRFNASLGTYHDLLKIIKDKDFLDNEENEDILEDIVLTLTLFEDREMIEERLKTYAHLFDDKVMKQLKRRRYTGWGRLSRKLINGIRDKQSGKTILDFLKSDGFANRNFMQLIHDDSLTFKEDIQKAQVSGQGDSLHEHIANLAGSPAIKKGILQTVKVVDELVKVMGRHKPENIVIEMARENQTTQKGQKNSRERMKRIEEGIKELGSQILKEHPVENTQLQNEKLYLYYLQNGRDMYVDQELDINRLSDYDVDHIVPQSFLKDDSIDNKVLTRSDKARGKSDNVPSEEVVKKMKNYWRQLLNAKLITQRKFDNLTKAERGGLSELDKAGFIKRQLVETRQITKHVAQILDSRMNTKYDENDKLIREVKVITLKSKLVSDFRKDFQFYKVREINNYHHAHDAYLNAVVGTALIKKYPKLESEFVYGDYKVYDVRKMIAKSEQEIGKATAKYFFYSNIMNFFKTEITLANGEIRKRPLIETNGETGEIVWDKGRDFATVRKVLSMPQVNIVKKTEVQTGGFSKESILPKRNSDKLIARKKDWDPKKYGGFDSPTVAYSVLVVAKVEKGKSKKLKSVKELLGITIMERSSFEKNPIDFLEAKGYKEVKKDLIIKLPKYSLFELENGRKRMLASAGELQKGNELALPSKYVNFLYLASHYEKLKGSPEDNEQKQLFVEQHKHYLDEIIEQISEFSKRVILADANLDKVLSAYNKHRDKPIREQAENIIHLFTLTNLGAPAAFKYFDTTIDRKRYTSTKEVLDATLIHQSITGLYETRIDLSQLGGDGGGGSGSSGGTLGIEDEYRLHETSTEPDVSLGSTWLSDFPQAWAETGGMGLAVRQAPLIIPLKATSTPVSIQQYPMSHEARLGIKPHIQRLLDQGILVPCQSPWNTPLLPVKKPGTNDYRPVQDLREVNKRVEDIHPTVPNPYNLLSGLPPSHQWYTVLDLKDAFFCLRLHPTSQPLFAFEWRDPGMGISGQLTWTRLPQGFKNSPTLFNEALHRDLADFRIQHPDLILLQYVDDILLAATSELDCQQGTRALLQTLGDLGYRASAKKAQICQKQVKYLGYLLREGQRWLTEARKETVMGQPVPKTPRQLREFLGTAGFCRLWIPGFAEMAAPLYPLTKPGTLFSWGPDQQKAYQEIKQALLTAPALGLPDLTKPFELFVDEKQGYAKGVLTQKLGPWRRPVAYLSKKLDPVAAGWPPCLRMVAAIAVLTKDAGKLTMGQPLVILAPHAVEALVKQPPDRWLSNARMTHYQAMLLDTDRVQFGPVVALNPATLLPLPEEGAPHDCLEILAETHGTRPDLTDQPIPDADHTWYTDGSSFLQEGQRKAGAAVTTETEVIWAGALPAGTSAQRAELIALTQALKMAEGKRLNVYTDSRYAFATAHIHGEIYRRRGWLTSEGREIKNKSEILALLKALFLPKRLSIIHCLGHQKGDSAEARGNRLADQAAREAAIKTPPDTSTLLAGKRTADGSEFEKRTADGSEFESPKKKAKVE

SEQ ID NO: 6607 - protein, 2091 aa, synthetic construct
MPAAKRVKLDGGDKKYSIGLDIGTNSVGWAVITDEYKVPSKKFKVLGNTDRHSIKKNLIGALLFDSGETAEATRLKRTARRRYTRRKNRICYLQEIFSNEMAKVDDSFFHRLEESFLVEEDKKHERHPIFGNIVDEVAYHEKYPTIYHLRKKLVDSTDKADLRLIYLALAHMIKFRGHFLIEGDLNPDNSDVDKLFIQLVQTYNQLFEENPINASGVDAKAILSARLSKSRRLENLIAQLPGEKKNGLFGNLIALSLGLTPNFKSNFDLAEDAKLQLSKDTYDDDLDNLLAQIGDQYADLFLAAKNLSDAILLSDILRVNTEITKAPLSASMIKRYDEHHQDLTLLKALVRQQLPEKYKEIFFDQSKNGYAGYIDGGASQEEFYKFIKPILEKMDGTEELLVKLNREDLLRKQRTFDNGSIPHQIHLGELHAILRRQEDFYPFLKDNREKIEKILTFRIPYYVGPLARGNSRFAWMTRKSEETITPWNFEEVVDKGASAQSFIERMTNFDKNLPNEKVLPKHSLLYEYFTVYNELTKVKYVTEGMRKPAFLSGEQKKAIVDLLFKTNRKVTVKQLKEDYFKKIECFDSVEISGVEDRFNASLGTYHDLLKIIKDKDFLDNEENEDILEDIVLTLTLFEDREMIEERLKTYAHLFDDKVMKQLKRRRYTGWGRLSRKLINGIRDKQSGKTILDFLKSDGFANRNFMQLIHDDSLTFKEDIQKAQVSGQGDSLHEHIANLAGSPAIKKGILQTVKVVDELVKVMGRHKPENIVIEMARENQTTQKGQKNSRERMKRIEEGIKELGSQILKEHPVENTQLQNEKLYLYYLQNGRDMYVDQELDINRLSDYDVDHIVPQSFLKDDSIDNKVLTRSDKARGKSDNVPSEEVVKKMKNYWRQLLNAKLITQRKFDNLTKAERGGLSELDKAGFIKRQLVETRQITKHVAQILDSRMNTKYDENDKLIREVKVITLKSKLVSDFRKDFQFYKVREINNYHHAHDAYLNAVVGTALIKKYPKLESEFVYGDYKVYDVRKMIAKSEQEIGKATAKYFFYSNIMNFFKTEITLANGEIRKRPLIETNGETGEIVWDKGRDFATVRKVLSMPQVNIVKKTEVQTGGFSKESILPKRNSDKLIARKKDWDPKKYGGFDSPTVAYSVLVVAKVEKGKSKKLKSVKELLGITIMERSSFEKNPIDFLEAKGYKEVKKDLIIKLPKYSLFELENGRKRMLASAGELQKGNELALPSKYVNFLYLASHYEKLKGSPEDNEQKQLFVEQHKHYLDEIIEQISEFSKRVILADANLDKVLSAYNKHRDKPIREQAENIIHLFTLTNLGAPAAFKYFDTTIDRKRYTSTKEVLDATLIHQSITGLYETRIDLSQLGGDGGGGSGSSGGTLNIEDEYRLHETSKGPDVPLGSTWLSDFPQAWAETGGMGLAVRQAPLIIPLKATSTPVSIKQYPMSQEARLGIKPHIQRLLDQGILVPCQSPWNTPLLPVKKPGTNDYRPVQDLREVNKRVEDIHPTVPNPYNLLSGLPPSHQWYTVLDLKDAFFCLRLHPTSQSLFAFEWRDPEMGISGQLTWTRLPQGFKNSPTLFNEALHRDLADFRIQHPDLILLQYVDDLLLAATSELDCQQGTRALLQTLGDLGYRASAKKAQICQKQVKYLGYLLKEGQRWLTEARKETVMGQPTPKTPRQLREFLGKAGFCRLFIPGFAEMAAPLYPLTKPGTLFEWGPDQQKAYQEIKQALLTAPALGLPDLTKPFELFVDEKQGYAKGVLTQKLGPWRRPVAYLSKKLDPVAAGWPPCLRMVAAIAVLTKDAGKLTMGQPLVILAPHAVEALVKQPPDRWLSNARMTHYQALLLDTDRVQFGPIVALNPATLLPLPEEGLQHDCLDILAEAHGTRPDLTDQPLPDADHTWYTDGSSFLQEGQRKAGAAVTTETEVVWAKALPAGTSAQRAELIALTQALKMAEGKKLNVYTDSRYAFATAHIHGEIYRRRGWLTSEGKEIKNKDEILALLKALFLPKRLSIIHCPGHQKGNRAEARGNRMADQAAREVATRETPETSTLLAGKRTADGSEFEKRTADGSEFESPKKKAKVE

SEQ ID NO: 6608 - protein, 2082 aa, synthetic construct
MPAAKRVKLDGGDKKYSIGLDIGTNSVGWAVITDEYKVPSKKFKVLGNTDRHSIKKNLIGALLFDSGETAEATRLKRTARRRYTRRKNRICYLQEIFSNEMAKVDDSFFHRLEESFLVEEDKKHERHPIFGNIVDEVAYHEKYPTIYHLRKKLVDSTDKADLRLIYLALAHMIKFRGHFLIEGDLNPDNSDVDKLFIQLVQTYNQLFEENPINASGVDAKAILSARLSKSRRLENLIAQLPGEKKNGLFGNLIALSLGLTPNFKSNFDLAEDAKLQLSKDTYDDDLDNLLAQIGDQYADLFLAAKNLSDAILLSDILRVNTEITKAPLSASMIKRYDEHHQDLTLLKALVRQQLPEKYKEIFFDQSKNGYAGYIDGGASQEEFYKFIKPILEKMDGTEELLVKLNREDLLRKQRTFDNGSIPHQIHLGELHAILRRQEDFYPFLKDNREKIEKILTFRIPYYVGPLARGNSRFAWMTRKSEETITPWNFEEVVDKGASAQSFIERMTNFDKNLPNEKVLPKHSLLYEYFTVYNELTKVKYVTEGMRKPAFLSGEQKKAIVDLLFKTNRKVTVKQLKEDYFKKIECFDSVEISGVEDRFNASLGTYHDLLKIIKDKDFLDNEENEDILEDIVLTLTLFEDREMIEERLKTYAHLFDDKVMKQLKRRRYTGWGRLSRKLINGIRDKQSGKTILDFLKSDGFANRNFMQLIHDDSLTFKEDIQKAQVSGQGDSLHEHIANLAGSPAIKKGILQTVKVVDELVKVMGRHKPENIVIEMARENQTTQKGQKNSRERMKRIEEGIKELGSQILKEHPVENTQLQNEKLYLYYLQNGRDMYVDQELDINRLSDYDVDHIVPQSFLKDDSIDNKVLTRSDKARGKSDNVPSEEVVKKMKNYWRQLLNAKLITQRKFDNLTKAERGGLSELDKAGFIKRQLVETRQITKHVAQILDSRMNTKYDENDKLIREVKVITLKSKLVSDFRKDFQFYKVREINNYHHAHDAYLNAVVGTALIKKYPKLESEFVYGDYKVYDVRKMIAKSEQEIGKATAKYFFYSNIMNFFKTEITLANGEIRKRPLIETNGETGEIVWDKGRDFATVRKVLSMPQVNIVKKTEVQTGGFSKESILPKRNSDKLIARKKDWDPKKYGGFDSPTVAYSVLVVAKVEKGKSKKLKSVKELLGITIMERSSFEKNPIDFLEAKGYKEVKKDLIIKLPKYSLFELENGRKRMLASAGELQKGNELALPSKYVNFLYLASHYEKLKGSPEDNEQKQLFVEQHKHYLDEIIEQISEFSKRVILADANLDKVLSAYNKHRDKPIREQAENIIHLFTLTNLGAPAAFKYFDTTIDRKRYTSTKEVLDATLIHQSITGLYETRIDLSQLGGDGGGGSGSSGGVPWLMKKPLQLTVLVPLHEYQERLLQQTALPKEQKELLQKLFLKYDALWQHWENQVGHRRIKPHNIATGTLAPRPQKQYPINPKAKPSIQIVIDDLLKQGVLIQQNSTMNTPVYPVPKPDGKWRMVLDYREVNKTIPLIAAQNQHSAGILSSIYRGKYKTTLDLTNGFWAHPITPESYWLTAFTWQGKQYCWTRLPQGFLNSPALFNADVVDLLKEIPNVQAYVDDIYISHDDPQEHLEQLEKIFSILLNAGYVVSLKKSEIAQREVEFLGFNITKEGRGLTDTFKQKLLNITPPKDLKQLQSILGLLNFARNFIPNYSELVKPLYTIVAPANGKFISWTEDNSNQLQHIISVLNQADNLEERNPETRLIIKVNSSPSAGYIRYYNEGSKRPIMYVNYIFSKAEAKFTQTEKLLTTMHKGLIKAMDLAMGQEILVYSPIVSMTKIQRTPLPERKALPVRWITWMTYLEDPRIQFHYDKSLPELQQIPNVTEDVIAKTKHPSEFAMVFYTDGSAIKHPDVNKSHSAGMGIAQVQFIPEYKIVHQWSIPLGDHTAQLAEIAAVEFACKKALKISGPVLIVTDSFYVAESANKELPYWKSNGFLNNKKKPLRHVSKWKSIAECLQLKPDIIIMHEKGHQQPMTTLHTEGNNLADKLATQGSYVVHAGKRTADGSEFEKRTADGSEFESPKKKAKVE

SEQ ID NO: 6609 - protein, 2082 aa, synthetic construct
MPAAKRVKLDGGDKKYSIGLDIGTNSVGWAVITDEYKVPSKKFKVLGNTDRHSIKKNLIGALLFDSGETAEATRLKRTARRRYTRRKNRICYLQEIFSNEMAKVDDSFFHRLEESFLVEEDKKHERHPIFGNIVDEVAYHEKYPTIYHLRKKLVDSTDKADLRLIYLALAHMIKFRGHFLIEGDLNPDNSDVDKLFIQLVQTYNQLFEENPINASGVDAKAILSARLSKSRRLENLIAQLPGEKKNGLFGNLIALSLGLTPNFKSNFDLAEDAKLQLSKDTYDDDLDNLLAQIGDQYADLFLAAKNLSDAILLSDILRVNTEITKAPLSASMIKRYDEHHQDLTLLKALVRQQLPEKYKEIFFDQSKNGYAGYIDGGASQEEFYKFIKPILEKMDGTEELLVKLNREDLLRKQRTFDNGSIPHQIHLGELHAILRRQEDFYPFLKDNREKIEKILTFRIPYYVGPLARGNSRFAWMTRKSEETITPWNFEEVVDKGASAQSFIERMTNFDKNLPNEKVLPKHSLLYEYFTVYNELTKVKYVTEGMRKPAFLSGEQKKAIVDLLFKTNRKVTVKQLKEDYFKKIECFDSVEISGVEDRFNASLGTYHDLLKIIKDKDFLDNEENEDILEDIVLTLTLFEDREMIEERLKTYAHLFDDKVMKQLKRRRYTGWGRLSRKLINGIRDKQSGKTILDFLKSDGFANRNFMQLIHDDSLTFKEDIQKAQVSGQGDSLHEHIANLAGSPAIKKGILQTVKVVDELVKVMGRHKPENIVIEMARENQTTQKGQKNSRERMKRIEEGIKELGSQILKEHPVENTQLQNEKLYLYYLQNGRDMYVDQELDINRLSDYDVDHIVPQSFLKDDSIDNKVLTRSDKARGKSDNVPSEEVVKKMKNYWRQLLNAKLITQRKFDNLTKAERGGLSELDKAGFIKRQLVETRQITKHVAQILDSRMNTKYDENDKLIREVKVITLKSKLVSDFRKDFQFYKVREINNYHHAHDAYLNAVVGTALIKKYPKLESEFVYGDYKVYDVRKMIAKSEQEIGKATAKYFFYSNIMNFFKTEITLANGEIRKRPLIETNGETGEIVWDKGRDFATVRKVLSMPQVNIVKKTEVQTGGFSKESILPKRNSDKLIARKKDWDPKKYGGFDSPTVAYSVLVVAKVEKGKSKKLKSVKELLGITIMERSSFEKNPIDFLEAKGYKEVKKDLIIKLPKYSLFELENGRKRMLASAGELQKGNELALPSKYVNFLYLASHYEKLKGSPEDNEQKQLFVEQHKHYLDEIIEQISEFSKRVILADANLDKVLSAYNKHRDKPIREQAENIIHLFTLTNLGAPAAFKYFDTTIDRKRYTSTKEVLDATLIHQSITGLYETRIDLSQLGGDGGGGSGSSGGIPWLMKKPLQLTTLVPLQEYEERLLKQTMLTGSYKEKLQSLFLKYDALWQHWENQVGHRRIKPHHIATGTVNPRPQKQYPINPKAKASIQTVINDLLKQGVLIQQNSIMNTPVYPVPKPDGKWRMVLDYREVNKTIPLIAAQNQHSAGILSSIFRGKYKTTLDLSNGFWAHSITPESYWLTAFTWLGQQYCWTRLPQGFLNSPALFNADVVDLLKEVPNVQVYVDDIYISHDDPREHLEQLEKVFSLLLNAGYVVSLKKSEIAQHEVEFLGFNITKEGRGLTETFKQKLLNITPPRDLKQLQSILGLLNFARNFIPNFSELVKPLYNIIATAPGKYITWTTDNSQQLQNIISMLNSAENLEERNPEVRLIMKVNTSPSAGYIRFYNEFAKRPIMYLNYVYTKAEVKFTNTEKLLTTIHKGLIKALDLGMGQEILVYSPIVSMTKIQKTPLPERKALPIRWITWMSYLEDPRIQFHYDKTLPELQQVPTVTDDIIAKIKHPSEFSMVFYTDGSAIKHPNVNKSHNAGMGIAQVQFKPEFTVINTWSIPLGDHTAQLAEVAAVEFACKKALKIDGPVLIVTDSFYVAESVNKELPYWQSNGFFNNKKKPLKHVSKWKSIADCIQLKPDIIIIHEKGHQPTASTFHTEGNNLADKLATQGSYVVNAGKRTADGSEFEKRTADGSEFESPKKKAKVE

SEQ ID NO: 6610 - protein, 2082 aa, synthetic construct
MPAAKRVKLDGGDKKYSIGLDIGTNSVGWAVITDEYKVPSKKFKVLGNTDRHSIKKNLIGALLFDSGETAEATRLKRTARRRYTRRKNRICYLQEIFSNEMAKVDDSFFHRLEESFLVEEDKKHERHPIFGNIVDEVAYHEKYPTIYHLRKKLVDSTDKADLRLIYLALAHMIKFRGHFLIEGDLNPDNSDVDKLFIQLVQTYNQLFEENPINASGVDAKAILSARLSKSRRLENLIAQLPGEKKNGLFGNLIALSLGLTPNFKSNFDLAEDAKLQLSKDTYDDDLDNLLAQIGDQYADLFLAAKNLSDAILLSDILRVNTEITKAPLSASMIKRYDEHHQDLTLLKALVRQQLPEKYKEIFFDQSKNGYAGYIDGGASQEEFYKFIKPILEKMDGTEELLVKLNREDLLRKQRTFDNGSIPHQIHLGELHAILRRQEDFYPFLKDNREKIEKILTFRIPYYVGPLARGNSRFAWMTRKSEETITPWNFEEVVDKGASAQSFIERMTNFDKNLPNEKVLPKHSLLYEYFTVYNELTKVKYVTEGMRKPAFLSGEQKKAIVDLLFKTNRKVTVKQLKEDYFKKIECFDSVEISGVEDRFNASLGTYHDLLKIIKDKDFLDNEENEDILEDIVLTLTLFEDREMIEERLKTYAHLFDDKVMKQLKRRRYTGWGRLSRKLINGIRDKQSGKTILDFLKSDGFANRNFMQLIHDDSLTFKEDIQKAQVSGQGDSLHEHIANLAGSPAIKKGILQTVKVVDELVKVMGRHKPENIVIEMARENQTTQKGQKNSRERMKRIEEGIKELGSQILKEHPVENTQLQNEKLYLYYLQNGRDMYVDQELDINRLSDYDVDHIVPQSFLKDDSIDNKVLTRSDKARGKSDNVPSEEVVKKMKNYWRQLLNAKLITQRKFDNLTKAERGGLSELDKAGFIKRQLVETRQITKHVAQILDSRMNTKYDENDKLIREVKVITLKSKLVSDFRKDFQFYKVREINNYHHAHDAYLNAVVGTALIKKYPKLESEFVYGDYKVYDVRKMIAKSEQEIGKATAKYFFYSNIMNFFKTEITLANGEIRKRPLIETNGETGEIVWDKGRDFATVRKVLSMPQVNIVKKTEVQTGGFSKESILPKRNSDKLIARKKDWDPKKYGGFDSPTVAYSVLVVAKVEKGKSKKLKSVKELLGITIMERSSFEKNPIDFLEAKGYKEVKKDLIIKLPKYSLFELENGRKRMLASAGELQKGNELALPSKYVNFLYLASHYEKLKGSPEDNEQKQLFVEQHKHYLDEIIEQISEFSKRVILADANLDKVLSAYNKHRDKPIREQAENIIHLFTLTNLGAPAAFKYFDTTIDRKRYTSTKEVLDATLIHQSITGLYETRIDLSQLGGDGGGGSGSSGGIPWLMKKPLQLTTLVPLQEYEERLLKQTMLTGSYKEKLQSLFLKYDALWQHWENQVGHRRIKPHHIATGTVNPRPQKQYPINPKAKASIQTVINDLLKQGVLIQQNSIMNTPVYPVPKPDGKWRMVLDYREVNKTIPLIAAQNQHSAGILSSIFRGKYKTTLDLSNGFWAHSITPESYWLTAFTWLGQQYCWTRLPQGFLNSPALFNADVVDLLKEVPNVQVYVDDIYISHDDPREHLEQLEKVFSLLLNAGYVVSLKKSEIAQHEVEFLGFNITKEGRGLTETFKQKLLNITPPRDLKQLQSILGKLNFARNFIPNFSELVKPLYNIIATAPGKYITWTTDNSQQLQNIISMLNSAENLEERNPEVRLIMKVNTSPSAGYIRFYNEFAKRPIMYLNYVYTKAEVKFTNTEKLLTTIHKGLIKALDLGMGQEILVYSPIVSMTKIQKTPLPERKALPIRWITWMSYLEDPRIQFHYDKTLPELQQVPTVTDDIIAKIKHPSEFSMVFYTDGSAIKHPNVNKSHNAGMGIAQVQFKPEFTVINTWSIPLGDHTAQLAEVAAVEFACKKALKIDGPVLIVTDSFYVAESVNKELPYWQSNGFFNNKKKPLKHVSKWKSIADCIQLKPDIIIIHEKGHQPTASTFHTEGNNLADKLATQGSYVVNAGKRTADGSEFEKRTADGSEFESPKKKAKVE

SEQ ID NO: 6611 - protein, 2089 aa, synthetic construct
MPAAKRVKLDGGDKKYSIGLDIGTNSVGWAVITDEYKVPSKKFKVLGNTDRHSIKKNLIGALLFDSGETAEATRLKRTARRRYTRRKNRICYLQEIFSNEMAKVDDSFFHRLEESFLVEEDKKHERHPIFGNIVDEVAYHEKYPTIYHLRKKLVDSTDKADLRLIYLALAHMIKFRGHFLIEGDLNPDNSDVDKLFIQLVQTYNQLFEENPINASGVDAKAILSARLSKSRRLENLIAQLPGEKKNGLFGNLIALSLGLTPNFKSNFDLAEDAKLQLSKDTYDDDLDNLLAQIGDQYADLFLAAKNLSDAILLSDILRVNTEITKAPLSASMIKRYDEHHQDLTLLKALVRQQLPEKYKEIFFDQSKNGYAGYIDGGASQEEFYKFIKPILEKMDGTEELLVKLNREDLLRKQRTFDNGSIPHQIHLGELHAILRRQEDFYPFLKDNREKIEKILTFRIPYYVGPLARGNSRFAWMTRKSEETITPWNFEEVVDKGASAQSFIERMTNFDKNLPNEKVLPKHSLLYEYFTVYNELTKVKYVTEGMRKPAFLSGEQKKAIVDLLFKTNRKVTVKQLKEDYFKKIECFDSVEISGVEDRFNASLGTYHDLLKIIKDKDFLDNEENEDILEDIVLTLTLFEDREMIEERLKTYAHLFDDKVMKQLKRRRYTGWGRLSRKLINGIRDKQSGKTILDFLKSDGFANRNFMQLIHDDSLTFKEDIQKAQVSGQGDSLHEHIANLAGSPAIKKGILQTVKVVDELVKVMGRHKPENIVIEMARENQTTQKGQKNSRERMKRIEEGIKELGSQILKEHPVENTQLQNEKLYLYYLQNGRDMYVDQELDINRLSDYDVDHIVPQSFLKDDSIDNKVLTRSDKARGKSDNVPSEEVVKKMKNYWRQLLNAKLITQRKFDNLTKAERGGLSELDKAGFIKRQLVETRQITKHVAQILDSRMNTKYDENDKLIREVKVITLKSKLVSDFRKDFQFYKVREINNYHHAHDAYLNAVVGTALIKKYPKLESEFVYGDYKVYDVRKMIAKSEQEIGKATAKYFFYSNIMNFFKTEITLANGEIRKRPLIETNGETGEIVWDKGRDFATVRKVLSMPQVNIVKKTEVQTGGFSKESILPKRNSDKLIARKKDWDPKKYGGFDSPTVAYSVLVVAKVEKGKSKKLKSVKELLGITIMERSSFEKNPIDFLEAKGYKEVKKDLIIKLPKYSLFELENGRKRMLASAGELQKGNELALPSKYVNFLYLASHYEKLKGSPEDNEQKQLFVEQHKHYLDEIIEQISEFSKRVILADANLDKVLSAYNKHRDKPIREQAENIIHLFTLTNLGAPAAFKYFDTTIDRKRYTSTKEVLDATLIHQSITGLYETRIDLSQLGGDGGGGSGSSGGVLNLEEEYRLHEKPVPSSIDPSWLQLFPTVWAERAGMGLANQVPPVVVELRSGASPVAVRQYPMSKEAREGIRPHIQRFLDLGVLVPCQSPWNTPLLPVKKPGTNDYRPVQDLREINKRVQDIHPTVPNPYNLLSSLPPSHTWYSVLDLKDAFFCLKLHPNSQPLFAFEWRDPEKGNTGQLTWTRLPQGFKNSPTLFNEALHRDLAPFRALNPQVVLLQYVDDLLVAAPTYRDCKEGTQKLLQELSKLGYRVSAKKAQLCQKEVTYLGYLLKEGKRWLTPARKATVMKIPPPTTPRQVREFLGTAGFCRLWIPGFASLAAPLYPLTKPSIPFIWTEEHQKAFDRIKEALLSAPALALPDLTKPFTLYVDERAGVARGVLTQTLGPWRRPVAYLSKKLDPVASGWPTCLKAVAAVALLLKDADKLTLGQNVTVIASHSLESIVRQPPDRWMTNARMTHYQSLLLNERVSFAPPAVLNPATLLPVESEATPVHRCSEILAEETGTRRDLKDQPLPGVPAWYTDGSSFIAEGKRRAGAAIVDGKRTVWASSLPEGTSAQKAELVALTQALRLAEGKDINIYTDSRYAFATAHIHGAIYKQRGWLTSAGKDIKNKEEILALLEAIHLPKRVAIIHCPGHQKGNDPVATGNRRADEAAKQAALSTRVLAETTKPAGKRTADGSEFEKRTADGSEFESPKKKAKVE

SEQ ID NO: 6612 - protein, 2091 aa, synthetic construct
MPAAKRVKLDGGDKKYSIGLDIGTNSVGWAVITDEYKVPSKKFKVLGNTDRHSIKKNLIGALLFDSGETAEATRLKRTARRRYTRRKNRICYLQEIFSNEMAKVDDSFFHRLEESFLVEEDKKHERHPIFGNIVDEVAYHEKYPTIYHLRKKLVDSTDKADLRLIYLALAHMIKFRGHFLIEGDLNPDNSDVDKLFIQLVQTYNQLFEENPINASGVDAKAILSARLSKSRRLENLIAQLPGEKKNGLFGNLIALSLGLTPNFKSNFDLAEDAKLQLSKDTYDDDLDNLLAQIGDQYADLFLAAKNLSDAILLSDILRVNTEITKAPLSASMIKRYDEHHQDLTLLKALVRQQLPEKYKEIFFDQSKNGYAGYIDGGASQEEFYKFIKPILEKMDGTEELLVKLNREDLLRKQRTFDNGSIPHQIHLGELHAILRRQEDFYPFLKDNREKIEKILTFRIPYYVGPLARGNSRFAWMTRKSEETITPWNFEEVVDKGASAQSFIERMTNFDKNLPNEKVLPKHSLLYEYFTVYNELTKVKYVTEGMRKPAFLSGEQKKAIVDLLFKTNRKVTVKQLKEDYFKKIECFDSVEISGVEDRFNASLGTYHDLLKIIKDKDFLDNEENEDILEDIVLTLTLFEDREMIEERLKTYAHLFDDKVMKQLKRRRYTGWGRLSRKLINGIRDKQSGKTILDFLKSDGFANRNFMQLIHDDSLTFKEDIQKAQVSGQGDSLHEHIANLAGSPAIKKGILQTVKVVDELVKVMGRHKPENIVIEMARENQTTQKGQKNSRERMKRIEEGIKELGSQILKEHPVENTQLQNEKLYLYYLQNGRDMYVDQELDINRLSDYDVDHIVPQSFLKDDSIDNKVLTRSDKARGKSDNVPSEEVVKKMKNYWRQLLNAKLITQRKFDNLTKAERGGLSELDKAGFIKRQLVETRQITKHVAQILDSRMNTKYDENDKLIREVKVITLKSKLVSDFRKDFQFYKVREINNYHHAHDAYLNAVVGTALIKKYPKLESEFVYGDYKVYDVRKMIAKSEQEIGKATAKYFFYSNIMNFFKTEITLANGEIRKRPLIETNGETGEIVWDKGRDFATVRKVLSMPQVNIVKKTEVQTGGFSKESILPKRNSDKLIARKKDWDPKKYGGFDSPTVAYSVLVVAKVEKGKSKKLKSVKELLGITIMERSSFEKNPIDFLEAKGYKEVKKDLIIKLPKYSLFELENGRKRMLASAGELQKGNELALPSKYVNFLYLASHYEKLKGSPEDNEQKQLFVEQHKHYLDEIIEQISEFSKRVILADANLDKVLSAYNKHRDKPIREQAENIIHLFTLTNLGAPAAFKYFDTTIDRKRYTSTKEVLDATLIHQSITGLYETRIDLSQLGGDGGGGSGSSGGTLNIEDEYRLHETSKEPDVPLGSTWLSDFPQAWAETGGMGLAVRQAPLIIPLKATSTPVSIKQYPMSQEARLGIKPHIQRLLDQGILVPCQSPWNTPLLPVKKPGTNDYRPVQDLREVNKRVEDIHPTVPNPYNLLSGLPPSHQWYTVLDLKDAFFCLRLHPTSQPLFAFEWRDPEMGISGQLTWTRLPQGFKNSPTLFNEALHRDLADFRIQHPDLILLQYVDDLLLAATSEQDCQRGTRALLQTLGNLGYRASAKKAQICQKQVKYLGYLLKEGQRWLTEARKETVMGQPTPKTPRQLREFLGTAGFCRLWIPGFAEMAAPLYPLTKPGTLFNWGPDQQKAYQEIKQALLTAPALGLPDLTKPFELFVDEKQGYAKGVLTQKLGPWRRPVAYLSKKLDPVAAGWPPCLRMVAAIAVLTKDAGKLTMGQPLVILAPHAVEALVKQPPDRWLSNARMTHYQAMLLDTDRVQFGPVVALNPATLLPLPEKEAPHDCLEILAETHGTRPDLTDQPIPDADYTWYTDGSSFLQEGQRRAGAAVTTETEVIWARALPAGTSAQRAELIALTQALKMAEGKKLNVYTDSRYAFATAHVHGEIYRRRGWLTSEGREIKNKNEILALLKALFLPKRLSIIHCPGHQKGNSAEARGNRMADQAAREAAMKAVLETSTLLAGKRTADGSEFEKRTADGSEFESPKKKAKVE

SEQ ID NO: 6613 - protein, 2093 aa, synthetic construct
MPAAKRVKLDGGDKKYSIGLDIGTNSVGWAVITDEYKVPSKKFKVLGNTDRHSIKKNLIGALLFDSGETAEATRLKRTARRRYTRRKNRICYLQEIFSNEMAKVDDSFFHRLEESFLVEEDKKHERHPIFGNIVDEVAYHEKYPTIYHLRKKLVDSTDKADLRLIYLALAHMIKFRGHFLIEGDLNPDNSDVDKLFIQLVQTYNQLFEENPINASGVDAKAILSARLSKSRRLENLIAQLPGEKKNGLFGNLIALSLGLTPNFKSNFDLAEDAKLQLSKDTYDDDLDNLLAQIGDQYADLFLAAKNLSDAILLSDILRVNTEITKAPLSASMIKRYDEHHQDLTLLKALVRQQLPEKYKEIFFDQSKNGYAGYIDGGASQEEFYKFIKPILEKMDGTEELLVKLNREDLLRKQRTFDNGSIPHQIHLGELHAILRRQEDFYPFLKDNREKIEKILTFRIPYYVGPLARGNSRFAWMTRKSEETITPWNFEEVVDKGASAQSFIERMTNFDKNLPNEKVLPKHSLLYEYFTVYNELTKVKYVTEGMRKPAFLSGEQKKAIVDLLFKTNRKVTVKQLKEDYFKKIECFDSVEISGVEDRFNASLGTYHDLLKIIKDKDFLDNEENEDILEDIVLTLTLFEDREMIEERLKTYAHLFDDKVMKQLKRRRYTGWGRLSRKLINGIRDKQSGKTILDFLKSDGFANRNFMQLIHDDSLTFKEDIQKAQVSGQGDSLHEHIANLAGSPAIKKGILQTVKVVDELVKVMGRHKPENIVIEMARENQTTQKGQKNSRERMKRIEEGIKELGSQILKEHPVENTQLQNEKLYLYYLQNGRDMYVDQELDINRLSDYDVDHIVPQSFLKDDSIDNKVLTRSDKARGKSDNVPSEEVVKKMKNYWRQLLNAKLITQRKFDNLTKAERGGLSELDKAGFIKRQLVETRQITKHVAQILDSRMNTKYDENDKLIREVKVITLKSKLVSDFRKDFQFYKVREINNYHHAHDAYLNAVVGTALIKKYPKLESEFVYGDYKVYDVRKMIAKSEQEIGKATAKYFFYSNIMNFFKTEITLANGEIRKRPLIETNGETGEIVWDKGRDFATVRKVLSMPQVNIVKKTEVQTGGFSKESILPKRNSDKLIARKKDWDPKKYGGFDSPTVAYSVLVVAKVEKGKSKKLKSVKELLGITIMERSSFEKNPIDFLEAKGYKEVKKDLIIKLPKYSLFELENGRKRMLASAGELQKGNELALPSKYVNFLYLASHYEKLKGSPEDNEQKQLFVEQHKHYLDEIIEQISEFSKRVILADANLDKVLSAYNKHRDKPIREQAENIIHLFTLTNLGAPAAFKYFDTTIDRKRYTSTKEVLDATLIHQSITGLYETRIDLSQLGGDGGGSSGGSGGTAPLEEEYRLFLEAPIQNVTLLEQWKREIPKVWAEINPPGLASTQAPIHVQLLSTALPVRVRQYPITLEAKRSLRETIRKFRAAGILRPVHSPWNTPLLPVRKSGTSEYRMVQDLREVNKRVETIHPTVPNPYTLLSLLPPDRIWYSVLDLKDAFFCIPLAPESQLIFAFEWADAEEGESGQLTWTRLPQGFKNSPTLFDEALNRDLQGFRLDHPSVSLLQYVDDLLIAADTQAACLSATRDLLMTLAELGYRVSGKKAQLCQEEVTYLGFKIHKGSRSLSNSRTQAILQIPVPKTKRQVREFLGTIGYCRLWIPGFAELAQPLYAATRGGNDPLVWGEKEEEAFQSLKLALTQPPALALPSLDKPFQLFVEETSGAAKGVLTQALGPWKRPVAYLSKRLDPVAAGWPRCLRAIAAAALLTREASKLTFGQDIEITSSHNLESLLRSPPDKWLTNARITQYQVLLLDPPRVRFKQTAALNPATLLPETDDTLPIHHCLDTLDSLTSTRPDLTDQPLAQAEATLFTDGSSYIRDGKRYAGAAVVTLDSVIWAEPLPIGTSAQKAELIALTKALEWSKDKSVNIYTDSRYAFATLHVHGMIYRERGLLTAGGKAIKNAPEILALLTAVWLPKRVAVMHCKGHQKDDAPTSTGNRRADEVAREVAIRPLSTQATISAGKRTADGSEFEKRTADGSEFESPKKKAKVE

SEQ ID NO: 6614 - protein, 2097 aa, synthetic construct
MPAAKRVKLDGGDKKYSIGLDIGTNSVGWAVITDEYKVPSKKFKVLGNTDRHSIKKNLIGALLFDSGETAEATRLKRTARRRYTRRKNRICYLQEIFSNEMAKVDDSFFHRLEESFLVEEDKKHERHPIFGNIVDEVAYHEKYPTIYHLRKKLVDSTDKADLRLIYLALAHMIKFRGHFLIEGDLNPDNSDVDKLFIQLVQTYNQLFEENPINASGVDAKAILSARLSKSRRLENLIAQLPGEKKNGLFGNLIALSLGLTPNFKSNFDLAEDAKLQLSKDTYDDDLDNLLAQIGDQYADLFLAAKNLSDAILLSDILRVNTEITKAPLSASMIKRYDEHHQDLTLLKALVRQQLPEKYKEIFFDQSKNGYAGYIDGGASQEEFYKFIKPILEKMDGTEELLVKLNREDLLRKQRTFDNGSIPHQIHLGELHAILRRQEDFYPFLKDNREKIEKILTFRIPYYVGPLARGNSRFAWMTRKSEETITPWNFEEVVDKGASAQSFIERMTNFDKNLPNEKVLPKHSLLYEYFTVYNELTKVKYVTEGMRKPAFLSGEQKKAIVDLLFKTNRKVTVKQLKEDYFKKIECFDSVEISGVEDRFNASLGTYHDLLKIIKDKDFLDNEENEDILEDIVLTLTLFEDREMIEERLKTYAHLFDDKVMKQLKRRRYTGWGRLSRKLINGIRDKQSGKTILDFLKSDGFANRNFMQLIHDDSLTFKEDIQKAQVSGQGDSLHEHIANLAGSPAIKKGILQTVKVVDELVKVMGRHKPENIVIEMARENQTTQKGQKNSRERMKRIEEGIKELGSQILKEHPVENTQLQNEKLYLYYLQNGRDMYVDQELDINRLSDYDVDHIVPQSFLKDDSIDNKVLTRSDKARGKSDNVPSEEVVKKMKNYWRQLLNAKLITQRKFDNLTKAERGGLSELDKAGFIKRQLVETRQITKHVAQILDSRMNTKYDENDKLIREVKVITLKSKLVSDFRKDFQFYKVREINNYHHAHDAYLNAVVGTALIKKYPKLESEFVYGDYKVYDVRKMIAKSEQEIGKATAKYFFYSNIMNFFKTEITLANGEIRKRPLIETNGETGEIVWDKGRDFATVRKVLSMPQVNIVKKTEVQTGGFSKESILPKRNSDKLIARKKDWDPKKYGGFDSPTVAYSVLVVAKVEKGKSKKLKSVKELLGITIMERSSFEKNPIDFLEAKGYKEVKKDLIIKLPKYSLFELENGRKRMLASAGELQKGNELALPSKYVNFLYLASHYEKLKGSPEDNEQKQLFVEQHKHYLDEIIEQISEFSKRVILADANLDKVLSAYNKHRDKPIREQAENIIHLFTLTNLGAPAAFKYFDTTIDRKRYTSTKEVLDATLIHQSITGLYETRIDLSQLGGDGGGSSGGSGGTVSLQDEHRLFDIPVTTSLPDVWLQDFPQAWAETGGLGRAKCQAPIIIDLKPTAVPVSIKQYPMSLEAHMGIRQHIIKFLELGVLRPCRSPWNTPLLPVKKPGTQDYRPVQDLREINKRTVDIHPTVPNPYNLLSTLKPDYSWYTVLDLKDAFFCLPLAPQSQELFAFEWKDPERGISGQLTWTRLPQGFKNSPTLFNEALHRDLTDFRTQHPEVTLLQYVDDLLLAAPTKKACTQGTRHLLQELGEKGYRASAKKAQICQTKVTYLGYILSEGKRWLTPGRIETVARIPPPRNPREVREFLGTAGFCRLWIPGFAELAAPLYALTKPSTPFTWQTEHQLAFEALKKALLSAPALGLPDTSKPFTLFLDERQGIAKGVLTQKLGPWKRPVAYLSKKLDPVAAGWPPCLRIMAATAMLVKDSAKLTLGQPLTVITPHTLEAIVRQPPDRWITNARLTHYQALLLDTDRVQFGPPVTLNPATLLPVPENQPSPHDCRQVLAETHGTREDLKDQELPDADHTWYTDGSSYLDSGTRRAGAAVVDGHNTIWAQSLPPGTSAQKAELIALTKALELSKGKKANIYTDSRYAFATAHTHGSIYERRGWLTSEGKEIKNKAEIIALLKALFLPQEVAIIHCPGHQKGQDPVAVGNRQADRVARQAAMAEVLTLATEPDNTSHITAGKRTADGSEFEKRTADGSEFESPKKKAKVE

SEQ ID NO: 6615 - protein, 2090 aa, synthetic construct
MPAAKRVKLDGGDKKYSIGLDIGTNSVGWAVITDEYKVPSKKFKVLGNTDRHSIKKNLIGALLFDSGETAEATRLKRTARRRYTRRKNRICYLQEIFSNEMAKVDDSFFHRLEESFLVEEDKKHERHPIFGNIVDEVAYHEKYPTIYHLRKKLVDSTDKADLRLIYLALAHMIKFRGHFLIEGDLNPDNSDVDKLFIQLVQTYNQLFEENPINASGVDAKAILSARLSKSRRLENLIAQLPGEKKNGLFGNLIALSLGLTPNFKSNFDLAEDAKLQLSKDTYDDDLDNLLAQIGDQYADLFLAAKNLSDAILLSDILRVNTEITKAPLSASMIKRYDEHHQDLTLLKALVRQQLPEKYKEIFFDQSKNGYAGYIDGGASQEEFYKFIKPILEKMDGTEELLVKLNREDLLRKQRTFDNGSIPHQIHLGELHAILRRQEDFYPFLKDNREKIEKILTFRIPYYVGPLARGNSRFAWMTRKSEETITPWNFEEVVDKGASAQSFIERMTNFDKNLPNEKVLPKHSLLYEYFTVYNELTKVKYVTEGMRKPAFLSGEQKKAIVDLLFKTNRKVTVKQLKEDYFKKIECFDSVEISGVEDRFNASLGTYHDLLKIIKDKDFLDNEENEDILEDIVLTLTLFEDREMIEERLKTYAHLFDDKVMKQLKRRRYTGWGRLSRKLINGIRDKQSGKTILDFLKSDGFANRNFMQLIHDDSLTFKEDIQKAQVSGQGDSLHEHIANLAGSPAIKKGILQTVKVVDELVKVMGRHKPENIVIEMARENQTTQKGQKNSRERMKRIEEGIKELGSQILKEHPVENTQLQNEKLYLYYLQNGRDMYVDQELDINRLSDYDVDHIVPQSFLKDDSIDNKVLTRSDKARGKSDNVPSEEVVKKMKNYWRQLLNAKLITQRKFDNLTKAERGGLSELDKAGFIKRQLVETRQITKHVAQILDSRMNTKYDENDKLIREVKVITLKSKLVSDFRKDFQFYKVREINNYHHAHDAYLNAVVGTALIKKYPKLESEFVYGDYKVYDVRKMIAKSEQEIGKATAKYFFYSNIMNFFKTEITLANGEIRKRPLIETNGETGEIVWDKGRDFATVRKVLSMPQVNIVKKTEVQTGGFSKESILPKRNSDKLIARKKDWDPKKYGGFDSPTVAYSVLVVAKVEKGKSKKLKSVKELLGITIMERSSFEKNPIDFLEAKGYKEVKKDLIIKLPKYSLFELENGRKRMLASAGELQKGNELALPSKYVNFLYLASHYEKLKGSPEDNEQKQLFVEQHKHYLDEIIEQISEFSKRVILADANLDKVLSAYNKHRDKPIREQAENIIHLFTLTNLGAPAAFKYFDTTIDRKRYTSTKEVLDATLIHQSITGLYETRIDLSQLGGDGGGSSGGSGGTLQLEEEYRLFEPESTQKQEMDIWLKNFPQAWAETGGMGTAHCQAPVLIQLKATATPISIRQYPMPHEAYQGIKPHIRRMLDQGILKPCQSPWNTPLLPVKKPGTEDYRPVQDLREVNKRVEDIHPTVPNPYNLLSTLPPSHPWYTVLDLKDAFFCLRLHSESQLLFAFEWRDPEIGLSGQLTWTRLPQGFKNSPTLFNEALHSDLADFRVRYPALVLLQYVDDLLLAAATRTECLEGTKALLETLGNKGYRASAKKAQICLQEVTYLGYSLKDGQRWLTKARKEAILSIPVPKNSRQVREFLGKAGYCRLFIPGFAELAAPLYPLTRPGTLFQWGTEQQLAFEDIKKALLSSPALGLPDITKPFELFIDENSGFAKGVLVQKLGPWKRPVAYLSKKLDTVASGWPPCLRMVAAIAILVKDAGKLTLGQPLTILTSHPVEALVRQPPNKWLSNARMTHYQAMLLDAERVHFGPTVSLNPATLLPLPSGGNHHDCLQILAETHGTRPDLTDQPLPDADLTWYTDGSSFIRNGEREAGAAVTTESEVIWAAPLPPGTSAQRAELIALTQALKMAEGKKLTVYTDSRYAFATTHVHGEIYRRRGWLTSEGKEIKNKNEILALLEALFLPKRLSIIHCPGHQKGDSPQAKGNRLADDTAKKAATETHSSLTVLPAGKRTADGSEFEKRTADGSEFESPKKKAKVE

SEQ ID NO: 6616 - protein, 2213 aa, synthetic construct
MPAAKRVKLDGGDKKYSIGLDIGTNSVGWAVITDEYKVPSKKFKVLGNTDRHSIKKNLIGALLFDSGETAEATRLKRTARRRYTRRKNRICYLQEIFSNEMAKVDDSFFHRLEESFLVEEDKKHERHPIFGNIVDEVAYHEKYPTIYHLRKKLVDSTDKADLRLIYLALAHMIKFRGHFLIEGDLNPDNSDVDKLFIQLVQTYNQLFEENPINASGVDAKAILSARLSKSRRLENLIAQLPGEKKNGLFGNLIALSLGLTPNFKSNFDLAEDAKLQLSKDTYDDDLDNLLAQIGDQYADLFLAAKNLSDAILLSDILRVNTEITKAPLSASMIKRYDEHHQDLTLLKALVRQQLPEKYKEIFFDQSKNGYAGYIDGGASQEEFYKFIKPILEKMDGTEELLVKLNREDLLRKQRTFDNGSIPHQIHLGELHAILRRQEDFYPFLKDNREKIEKILTFRIPYYVGPLARGNSRFAWMTRKSEETITPWNFEEVVDKGASAQSFIERMTNFDKNLPNEKVLPKHSLLYEYFTVYNELTKVKYVTEGMRKPAFLSGEQKKAIVDLLFKTNRKVTVKQLKEDYFKKIECFDSVEISGVEDRFNASLGTYHDLLKIIKDKDFLDNEENEDILEDIVLTLTLFEDREMIEERLKTYAHLFDDKVMKQLKRRRYTGWGRLSRKLINGIRDKQSGKTILDFLKSDGFANRNFMQLIHDDSLTFKEDIQKAQVSGQGDSLHEHIANLAGSPAIKKGILQTVKVVDELVKVMGRHKPENIVIEMARENQTTQKGQKNSRERMKRIEEGIKELGSQILKEHPVENTQLQNEKLYLYYLQNGRDMYVDQELDINRLSDYDVDHIVPQSFLKDDSIDNKVLTRSDKARGKSDNVPSEEVVKKMKNYWRQLLNAKLITQRKFDNLTKAERGGLSELDKAGFIKRQLVETRQITKHVAQILDSRMNTKYDENDKLIREVKVITLKSKLVSDFRKDFQFYKVREINNYHHAHDAYLNAVVGTALIKKYPKLESEFVYGDYKVYDVRKMIAKSEQEIGKATAKYFFYSNIMNFFKTEITLANGEIRKRPLIETNGETGEIVWDKGRDFATVRKVLSMPQVNIVKKTEVQTGGFSKESILPKRNSDKLIARKKDWDPKKYGGFDSPTVAYSVLVVAKVEKGKSKKLKSVKELLGITIMERSSFEKNPIDFLEAKGYKEVKKDLIIKLPKYSLFELENGRKRMLASAGELQKGNELALPSKYVNFLYLASHYEKLKGSPEDNEQKQLFVEQHKHYLDEIIEQISEFSKRVILADANLDKVLSAYNKHRDKPIREQAENIIHLFTLTNLGAPAAFKYFDTTIDRKRYTSTKEVLDATLIHQSITGLYETRIDLSQLGGDGGGSSGGSGGTLGDQGSRGSDPLPEPRVTLTVEGIPTEFLVNTGAEHSVLTKPMGKMGSKRTVVAGATGSKVYPWTTKRLLKIGQKQVTHSFLVIPECPAPLLGRDLLTKLKAQIQFSTEGPQVTWEDRPAMCLVLNLEEEYRLHEKPVPPSIDPSWLQLFPMVWAEKAGMGLANQVPPVVVELKSDASPVAVRQYPMSKEAREGIRPHIQRFLDLGILVPCQSPWNTPLLPVKKPGTNDYRPVQDLREVNKRVQDIHPTVPNPYNLLSSLPPSHTWYSVLDLKDAFFCLKLHPNSQPLFAFEWRDPEKGNTGQLTWTRLPQGFKNSPTLFNEALHRDLASFRALNPQVVMLQYVDDLLVAAPTYRDCKEGTRRLLQELSKLGYRVSAKKAQLCREEVTYLGYLLKGGKRWLTPARKATVMKIPTPTTPRQVREFLGKAGFCRLFIPGFASLAAPLYPLTRPKVPFTWTEAHQEAFGRIKEALLSAPALALPDLTKPFALYVDEKEGVARGVLTQTLGPWRRPVAYLSKKLDPVASGWPTCLKAIAAVALLLKDADKLTLGQNVLVIAPHNLESIVRQPPDRWMTNARMTHYQSLLLNERVSFAPPAILNPATLLPVESDDTPIHICSEILAEETGTRPDLRDQPLPGVPAWYTDGSSFIMDGRRQAGAAIVDNKRTVWASNLPEGTSAQKAELIALTQALRLAEGKSINIYTDSRYAFATAHVHGAIYKQRGWLTSAGKDIKNKEEILALLEAIHLPKRVAIIHCPGHQRGTDPVATGNRKADEAAKQAAQSTRILTETTKNAGKRTADGSEFEKRTADGSEFESPKKKAKVE

SEQ ID NO: 6617 - protein, 2091 aa, synthetic construct
MPAAKRVKLDGGDKKYSIGLDIGTNSVGWAVITDEYKVPSKKFKVLGNTDRHSIKKNLIGALLFDSGETAEATRLKRTARRRYTRRKNRICYLQEIFSNEMAKVDDSFFHRLEESFLVEEDKKHERHPIFGNIVDEVAYHEKYPTIYHLRKKLVDSTDKADLRLIYLALAHMIKFRGHFLIEGDLNPDNSDVDKLFIQLVQTYNQLFEENPINASGVDAKAILSARLSKSRRLENLIAQLPGEKKNGLFGNLIALSLGLTPNFKSNFDLAEDAKLQLSKDTYDDDLDNLLAQIGDQYADLFLAAKNLSDAILLSDILRVNTEITKAPLSASMIKRYDEHHQDLTLLKALVRQQLPEKYKEIFFDQSKNGYAGYIDGGASQEEFYKFIKPILEKMDGTEELLVKLNREDLLRKQRTFDNGSIPHQIHLGELHAILRRQEDFYPFLKDNREKIEKILTFRIPYYVGPLARGNSRFAWMTRKSEETITPWNFEEVVDKGASAQSFIERMTNFDKNLPNEKVLPKHSLLYEYFTVYNELTKVKYVTEGMRKPAFLSGEQKKAIVDLLFKTNRKVTVKQLKEDYFKKIECFDSVEISGVEDRFNASLGTYHDLLKIIKDKDFLDNEENEDILEDIVLTLTLFEDREMIEERLKTYAHLFDDKVMKQLKRRRYTGWGRLSRKLINGIRDKQSGKTILDFLKSDGFANRNFMQLIHDDSLTFKEDIQKAQVSGQGDSLHEHIANLAGSPAIKKGILQTVKVVDELVKVMGRHKPENIVIEMARENQTTQKGQKNSRERMKRIEEGIKELGSQILKEHPVENTQLQNEKLYLYYLQNGRDMYVDQELDINRLSDYDVDHIVPQSFLKDDSIDNKVLTRSDKARGKSDNVPSEEVVKKMKNYWRQLLNAKLITQRKFDNLTKAERGGLSELDKAGFIKRQLVETRQITKHVAQILDSRMNTKYDENDKLIREVKVITLKSKLVSDFRKDFQFYKVREINNYHHAHDAYLNAVVGTALIKKYPKLESEFVYGDYKVYDVRKMIAKSEQEIGKATAKYFFYSNIMNFFKTEITLANGEIRKRPLIETNGETGEIVWDKGRDFATVRKVLSMPQVNIVKKTEVQTGGFSKESILPKRNSDKLIARKKDWDPKKYGGFDSPTVAYSVLVVAKVEKGKSKKLKSVKELLGITIMERSSFEKNPIDFLEAKGYKEVKKDLIIKLPKYSLFELENGRKRMLASAGELQKGNELALPSKYVNFLYLASHYEKLKGSPEDNEQKQLFVEQHKHYLDEIIEQISEFSKRVILADANLDKVLSAYNKHRDKPIREQAENIIHLFTLTNLGAPAAFKYFDTTIDRKRYTSTKEVLDATLIHQSITGLYETRIDLSQLGGDGGGSSGGSGGTLGIEDEYRLHETSTEPDVSLGSTWLSDFPQAWAETGGMGLAVRQAPLIIPLKATSTPVSIQQYPMSHEARLGIKPHIQRLLDQGILVPCQSPWNTPLLPVKKPGTNDYRPVQDLREVNKRVEDIHPTVPNPYNLLSGLPPSHQWYTVLDLKDAFFCLRLHPTSQPLFAFEWRDPGMGISGQLTWTRLPQGFKNSPTLFNEALHRDLADFRIQHPDLILLQYVDDILLAATSELDCQQGTRALLQTLGDLGYRASAKKAQICQKQVKYLGYLLREGQRWLTEARKETVMGQPVPKTPRQLREFLGTAGFCRLWIPGFAEMAAPLYPLTKPGTLFSWGPDQQKAYQEIKQALLTAPALGLPDLTKPFELFVDEKQGYAKGVLTQKLGPWRRPVAYLSKKLDPVAAGWPPCLRMVAAIAVLTKDAGKLTMGQPLVILAPHAVEALVKQPPDRWLSNARMTHYQAMLLDTDRVQFGPVVALNPATLLPLPEEGAPHDCLEILAETHGTRPDLTDQPIPDADHTWYTDGSSFLQEGQRKAGAAVTTETEVIWAGALPAGTSAQRAELIALTQALKMAEGKRLNVYTDSRYAFATAHIHGEIYRRRGWLTSEGREIKNKSEILALLKALFLPKRLSIIHCLGHQKGDSAEARGNRLADQAAREAAIKTPPDTSTLLAGKRTADGSEFEKRTADGSEFESPKKKAKVE

SEQ ID NO: 6618 - protein, 2091 aa, synthetic construct
MPAAKRVKLDGGDKKYSIGLDIGTNSVGWAVITDEYKVPSKKFKVLGNTDRHSIKKNLIGALLFDSGETAEATRLKRTARRRYTRRKNRICYLQEIFSNEMAKVDDSFFHRLEESFLVEEDKKHERHPIFGNIVDEVAYHEKYPTIYHLRKKLVDSTDKADLRLIYLALAHMIKFRGHFLIEGDLNPDNSDVDKLFIQLVQTYNQLFEENPINASGVDAKAILSARLSKSRRLENLIAQLPGEKKNGLFGNLIALSLGLTPNFKSNFDLAEDAKLQLSKDTYDDDLDNLLAQIGDQYADLFLAAKNLSDAILLSDILRVNTEITKAPLSASMIKRYDEHHQDLTLLKALVRQQLPEKYKEIFFDQSKNGYAGYIDGGASQEEFYKFIKPILEKMDGTEELLVKLNREDLLRKQRTFDNGSIPHQIHLGELHAILRRQEDFYPFLKDNREKIEKILTFRIPYYVGPLARGNSRFAWMTRKSEETITPWNFEEVVDKGASAQSFIERMTNFDKNLPNEKVLPKHSLLYEYFTVYNELTKVKYVTEGMRKPAFLSGEQKKAIVDLLFKTNRKVTVKQLKEDYFKKIECFDSVEISGVEDRFNASLGTYHDLLKIIKDKDFLDNEENEDILEDIVLTLTLFEDREMIEERLKTYAHLFDDKVMKQLKRRRYTGWGRLSRKLINGIRDKQSGKTILDFLKSDGFANRNFMQLIHDDSLTFKEDIQKAQVSGQGDSLHEHIANLAGSPAIKKGILQTVKVVDELVKVMGRHKPENIVIEMARENQTTQKGQKNSRERMKRIEEGIKELGSQILKEHPVENTQLQNEKLYLYYLQNGRDMYVDQELDINRLSDYDVDHIVPQSFLKDDSIDNKVLTRSDKARGKSDNVPSEEVVKKMKNYWRQLLNAKLITQRKFDNLTKAERGGLSELDKAGFIKRQLVETRQITKHVAQILDSRMNTKYDENDKLIREVKVITLKSKLVSDFRKDFQFYKVREINNYHHAHDAYLNAVVGTALIKKYPKLESEFVYGDYKVYDVRKMIAKSEQEIGKATAKYFFYSNIMNFFKTEITLANGEIRKRPLIETNGETGEIVWDKGRDFATVRKVLSMPQVNIVKKTEVQTGGFSKESILPKRNSDKLIARKKDWDPKKYGGFDSPTVAYSVLVVAKVEKGKSKKLKSVKELLGITIMERSSFEKNPIDFLEAKGYKEVKKDLIIKLPKYSLFELENGRKRMLASAGELQKGNELALPSKYVNFLYLASHYEKLKGSPEDNEQKQLFVEQHKHYLDEIIEQISEFSKRVILADANLDKVLSAYNKHRDKPIREQAENIIHLFTLTNLGAPAAFKYFDTTIDRKRYTSTKEVLDATLIHQSITGLYETRIDLSQLGGDGGGSSGGSGGTLNIEDEYRLHETSKEPDVSLGSTWLSDFPQAWAETGGMGLAVRQAPLIIPLKATSTPVSIKQYPMSQEARLGIKPHIQRLLDQGILVPCQSPWNTPLLPVKKPGTNDYRPVQDLREVNKRVEDIHPTVPNPYNLLSGLPPSHQWYTVLDLKDAFFCLRLHPTSQPLFAFEWRDPEMGISGQLTWTRLPQGFKNSPTLFNEALHRDLAGFRIQHPDLILLQYVDDLLLAATSELDCQQGTRALLQTLGDLGYRASAKKAQICQKQVKYLGYLLKEGQRWLTEARKETVMGQPIPKTPRQLREFLGTAGFCRLWIPGFAEMAAPLYPLTKPGTLFNWGPDQQKAFQEIKQALLTAPALGLPDLTKPFELFVDEKQGYAKGVLTQKLGPWRRPVAYLSKKLDPVAAGWPPCLRMVAAIAVLTKDAGKLTMGQPLVILAPHAVEALVKQPPDRWLSNARMTHYQALLLDTDRVQFGPVVALNPATLLPLPEEGLQHDCLDILAEAHGTRSDLMDQPLPDADHTWYTDGSSFLQEGQRKAGAAVTTETEVIWARALPAGTSAQRAELIALTQALKMAEGKKLNVYTDSRYAFATAHIHGEIYRRRGWLTSEGKEIKNKDEILALLKALFLPKRLSIIHCPGHQKGNSAEARGNRMADQAAREVATRETPETSTLLAGKRTADGSEFEKRTADGSEFESPKKKAKVE

SEQ ID NO: 6619 - protein, 2089 aa, synthetic construct
MPAAKRVKLDGGDKKYSIGLDIGTNSVGWAVITDEYKVPSKKFKVLGNTDRHSIKKNLIGALLFDSGETAEATRLKRTARRRYTRRKNRICYLQEIFSNEMAKVDDSFFHRLEESFLVEEDKKHERHPIFGNIVDEVAYHEKYPTIYHLRKKLVDSTDKADLRLIYLALAHMIKFRGHFLIEGDLNPDNSDVDKLFIQLVQTYNQLFEENPINASGVDAKAILSARLSKSRRLENLIAQLPGEKKNGLFGNLIALSLGLTPNFKSNFDLAEDAKLQLSKDTYDDDLDNLLAQIGDQYADLFLAAKNLSDAILLSDILRVNTEITKAPLSASMIKRYDEHHQDLTLLKALVRQQLPEKYKEIFFDQSKNGYAGYIDGGASQEEFYKFIKPILEKMDGTEELLVKLNREDLLRKQRTFDNGSIPHQIHLGELHAILRRQEDFYPFLKDNREKIEKILTFRIPYYVGPLARGNSRFAWMTRKSEETITPWNFEEVVDKGASAQSFIERMTNFDKNLPNEKVLPKHSLLYEYFTVYNELTKVKYVTEGMRKPAFLSGEQKKAIVDLLFKTNRKVTVKQLKEDYFKKIECFDSVEISGVEDRFNASLGTYHDLLKIIKDKDFLDNEENEDILEDIVLTLTLFEDREMIEERLKTYAHLFDDKVMKQLKRRRYTGWGRLSRKLINGIRDKQSGKTILDFLKSDGFANRNFMQLIHDDSLTFKEDIQKAQVSGQGDSLHEHIANLAGSPAIKKGILQTVKVVDELVKVMGRHKPENIVIEMARENQTTQKGQKNSRERMKRIEEGIKELGSQILKEHPVENTQLQNEKLYLYYLQNGRDMYVDQELDINRLSDYDVDHIVPQSFLKDDSIDNKVLTRSDKARGKSDNVPSEEVVKKMKNYWRQLLNAKLITQRKFDNLTKAERGGLSELDKAGFIKRQLVETRQITKHVAQILDSRMNTKYDENDKLIREVKVITLKSKLVSDFRKDFQFYKVREINNYHHAHDAYLNAVVGTALIKKYPKLESEFVYGDYKVYDVRKMIAKSEQEIGKATAKYFFYSNIMNFFKTEITLANGEIRKRPLIETNGETGEIVWDKGRDFATVRKVLSMPQVNIVKKTEVQTGGFSKESILPKRNSDKLIARKKDWDPKKYGGFDSPTVAYSVLVVAKVEKGKSKKLKSVKELLGITIMERSSFEKNPIDFLEAKGYKEVKKDLIIKLPKYSLFELENGRKRMLASAGELQKGNELALPSKYVNFLYLASHYEKLKGSPEDNEQKQLFVEQHKHYLDEIIEQISEFSKRVILADANLDKVLSAYNKHRDKPIREQAENIIHLFTLTNLGAPAAFKYFDTTIDRKRYTSTKEVLDATLIHQSITGLYETRIDLSQLGGDGGGSSGGSGGVLNLEEEYRLHEKPVPSSIDPSWLQLFPTVWAERAGMGLANQVPPVVVELRSGASPVAVRQYPMSKEAREGIRPHIQRFLDLGVLVPCQSPWNTPLLPVKKPGTNDYRPVQDLREINKRVQDIHPTVPNPYNLLSSLPPSHTWYSVLDLKDAFFCLKLHPNSQPLFAFEWRDPEKGNTGQLTWTRLPQGFKNSPTLFNEALHRDLAPFRALNPQVVLLQYVDDLLVAAPTYRDCKEGTQKLLQELSKLGYRVSAKKAQLCQKEVTYLGYLLKEGKRWLTPARKATVMKIPPPTTPRQVREFLGTAGFCRLWIPGFASLAAPLYPLTKPSIPFIWTEEHQKAFDRIKEALLSAPALALPDLTKPFTLYVDERAGVARGVLTQTLGPWRRPVAYLSKKLDPVASGWPTCLKAVAAVALLLKDADKLTLGQNVTVIASHSLESIVRQPPDRWMTNARMTHYQSLLLNERVSFAPPAVLNPATLLPVESEATPVHRCSEILAEETGTRRDLKDQPLPGVPAWYTDGSSFIAEGKRRAGAAIVDGKRTVWASSLPEGTSAQKAELVALTQALRLAEGKDINIYTDSRYAFATAHIHGAIYKQRGWLTSAGKDIKNKEEILALLEAIHLPKRVAIIHCPGHQKGNDPVATGNRRADEAAKQAALSTRVLAETTKPAGKRTADGSEFEKRTADGSEFESPKKKAKVE

SEQ ID NO: 6620 - protein, 2091 aa, synthetic construct
MPAAKRVKLDGGDKKYSIGLDIGTNSVGWAVITDEYKVPSKKFKVLGNTDRHSIKKNLIGALLFDSGETAEATRLKRTARRRYTRRKNRICYLQEIFSNEMAKVDDSFFHRLEESFLVEEDKKHERHPIFGNIVDEVAYHEKYPTIYHLRKKLVDSTDKADLRLIYLALAHMIKFRGHFLIEGDLNPDNSDVDKLFIQLVQTYNQLFEENPINASGVDAKAILSARLSKSRRLENLIAQLPGEKKNGLFGNLIALSLGLTPNFKSNFDLAEDAKLQLSKDTYDDDLDNLLAQIGDQYADLFLAAKNLSDAILLSDILRVNTEITKAPLSASMIKRYDEHHQDLTLLKALVRQQLPEKYKEIFFDQSKNGYAGYIDGGASQEEFYKFIKPILEKMDGTEELLVKLNREDLLRKQRTFDNGSIPHQIHLGELHAILRRQEDFYPFLKDNREKIEKILTFRIPYYVGPLARGNSRFAWMTRKSEETITPWNFEEVVDKGASAQSFIERMTNFDKNLPNEKVLPKHSLLYEYFTVYNELTKVKYVTEGMRKPAFLSGEQKKAIVDLLFKTNRKVTVKQLKEDYFKKIECFDSVEISGVEDRFNASLGTYHDLLKIIKDKDFLDNEENEDILEDIVLTLTLFEDREMIEERLKTYAHLFDDKVMKQLKRRRYTGWGRLSRKLINGIRDKQSGKTILDFLKSDGFANRNFMQLIHDDSLTFKEDIQKAQVSGQGDSLHEHIANLAGSPAIKKGILQTVKVVDELVKVMGRHKPENIVIEMARENQTTQKGQKNSRERMKRIEEGIKELGSQILKEHPVENTQLQNEKLYLYYLQNGRDMYVDQELDINRLSDYDVDHIVPQSFLKDDSIDNKVLTRSDKARGKSDNVPSEEVVKKMKNYWRQLLNAKLITQRKFDNLTKAERGGLSELDKAGFIKRQLVETRQITKHVAQILDSRMNTKYDENDKLIREVKVITLKSKLVSDFRKDFQFYKVREINNYHHAHDAYLNAVVGTALIKKYPKLESEFVYGDYKVYDVRKMIAKSEQEIGKATAKYFFYSNIMNFFKTEITLANGEIRKRPLIETNGETGEIVWDKGRDFATVRKVLSMPQVNIVKKTEVQTGGFSKESILPKRNSDKLIARKKDWDPKKYGGFDSPTVAYSVLVVAKVEKGKSKKLKSVKELLGITIMERSSFEKNPIDFLEAKGYKEVKKDLIIKLPKYSLFELENGRKRMLASAGELQKGNELALPSKYVNFLYLASHYEKLKGSPEDNEQKQLFVEQHKHYLDEIIEQISEFSKRVILADANLDKVLSAYNKHRDKPIREQAENIIHLFTLTNLGAPAAFKYFDTTIDRKRYTSTKEVLDATLIHQSITGLYETRIDLSQLGGDGGGSSGGSGGTLNIEDEYRLHETSKEPDVPLGSTWLSDFPQAWAETGGMGLAVRQAPLIIPLKATSTPVSIKQYPMSQEARLGIKPHIQRLLDQGILVPCQSPWNTPLLPVKKPGTNDYRPVQDLREVNKRVEDIHPTVPNPYNLLSGLPPSHQWYTVLDLKDAFFCLRLHPTSQPLFAFEWRDPEMGISGQLTWTRLPQGFKNSPTLFNEALHRDLADFRIQHPDLILLQYVDDLLLAATSEQDCQRGTRALLQTLGNLGYRASAKKAQICQKQVKYLGYLLKEGQRWLTEARKETVMGQPTPKTPRQLREFLGTAGFCRLWIPGFAEMAAPLYPLTKPGTLFNWGPDQQKAYQEIKQALLTAPALGLPDLTKPFELFVDEKQGYAKGVLTQKLGPWRRPVAYLSKKLDPVAAGWPPCLRMVAAIAVLTKDAGKLTMGQPLVILAPHAVEALVKQPPDRWLSNARMTHYQAMLLDTDRVQFGPVVALNPATLLPLPEKEAPHDCLEILAETHGTRPDLTDQPIPDADYTWYTDGSSFLQEGQRRAGAAVTTETEVIWARALPAGTSAQRAELIALTQALKMAEGKKLNVYTDSRYAFATAHVHGEIYRRRGWLTSEGREIKNKNEILALLKALFLPKRLSIIHCPGHQKGNSAEARGNRMADQAAREAAMKAVLETSTLLAGKRTADGSEFEKRTADGSEFESPKKKAKVE

SEQ ID NO: 6621 - protein, 2095 aa, synthetic construct
MPAAKRVKLDGGDKKYSIGLDIGTNSVGWAVITDEYKVPSKKFKVLGNTDRHSIKKNLIGALLFDSGETAEATRLKRTARRRYTRRKNRICYLQEIFSNEMAKVDDSFFHRLEESFLVEEDKKHERHPIFGNIVDEVAYHEKYPTIYHLRKKLVDSTDKADLRLIYLALAHMIKFRGHFLIEGDLNPDNSDVDKLFIQLVQTYNQLFEENPINASGVDAKAILSARLSKSRRLENLIAQLPGEKKNGLFGNLIALSLGLTPNFKSNFDLAEDAKLQLSKDTYDDDLDNLLAQIGDQYADLFLAAKNLSDAILLSDILRVNTEITKAPLSASMIKRYDEHHQDLTLLKALVRQQLPEKYKEIFFDQSKNGYAGYIDGGASQEEFYKFIKPILEKMDGTEELLVKLNREDLLRKQRTFDNGSIPHQIHLGELHAILRRQEDFYPFLKDNREKIEKILTFRIPYYVGPLARGNSRFAWMTRKSEETITPWNFEEVVDKGASAQSFIERMTNFDKNLPNEKVLPKHSLLYEYFTVYNELTKVKYVTEGMRKPAFLSGEQKKAIVDLLFKTNRKVTVKQLKEDYFKKIECFDSVEISGVEDRFNASLGTYHDLLKIIKDKDFLDNEENEDILEDIVLTLTLFEDREMIEERLKTYAHLFDDKVMKQLKRRRYTGWGRLSRKLINGIRDKQSGKTILDFLKSDGFANRNFMQLIHDDSLTFKEDIQKAQVSGQGDSLHEHIANLAGSPAIKKGILQTVKVVDELVKVMGRHKPENIVIEMARENQTTQKGQKNSRERMKRIEEGIKELGSQILKEHPVENTQLQNEKLYLYYLQNGRDMYVDQELDINRLSDYDVDHIVPQSFLKDDSIDNKVLTRSDKARGKSDNVPSEEVVKKMKNYWRQLLNAKLITQRKFDNLTKAERGGLSELDKAGFIKRQLVETRQITKHVAQILDSRMNTKYDENDKLIREVKVITLKSKLVSDFRKDFQFYKVREINNYHHAHDAYLNAVVGTALIKKYPKLESEFVYGDYKVYDVRKMIAKSEQEIGKATAKYFFYSNIMNFFKTEITLANGEIRKRPLIETNGETGEIVWDKGRDFATVRKVLSMPQVNIVKKTEVQTGGFSKESILPKRNSDKLIARKKDWDPKKYGGFDSPTVAYSVLVVAKVEKGKSKKLKSVKELLGITIMERSSFEKNPIDFLEAKGYKEVKKDLIIKLPKYSLFELENGRKRMLASAGELQKGNELALPSKYVNFLYLASHYEKLKGSPEDNEQKQLFVEQHKHYLDEIIEQISEFSKRVILADANLDKVLSAYNKHRDKPIREQAENIIHLFTLTNLGAPAAFKYFDTTIDRKRYTSTKEVLDATLIHQSITGLYETRIDLSQLGGDGGGGSEAAAKGGTAPLEEEYRLFLEAPIQNVTLLEQWKREIPKVWAEINPPGLASTQAPIHVQLLSTALPVRVRQYPITLEAKRSLRETIRKFRAAGILRPVHSPWNTPLLPVRKSGTSEYRMVQDLREVNKRVETIHPTVPNPYTLLSLLPPDRIWYSVLDLKDAFFCIPLAPESQLIFAFEWADAEEGESGQLTWTRLPQGFKNSPTLFNEALNRDLQGFRLDHPSVSLLQYVDDLLIAADTQAACLSATRDLLMTLAELGYRVSGKKAQLCQEEVTYLGFKIHKGSRSLSNSRTQAILQIPVPKTKRQVREFLGTIGYCRLWIPGFAELAQPLYAATRPGNDPLVWGEKEEEAFQSLKLALTQPPALALPSLDKPFQLFVEETSGAAKGVLTQALGPWKRPVAYLSKRLDPVAAGWPRCLRAIAAAALLTREASKLTFGQDIEITSSHNLESLLRSPPDKWLTNARITQYQVLLLDPPRVRFKQTAALNPATLLPETDDTLPIHHCLDTLDSLTSTRPDLTDQPLAQAEATLFTDGSSYIRDGKRYAGAAVVTLDSVIWAEPLPIGTSAQKAELIALTKALEWSKDKSVNIYTDSRYAFATLHVHGMIYRERGWLTAGGKAIKNAPEILALLTAVWLPKRVAVMHCKGHQKDDAPTSTGNRRADEVAREVAIRPLSTQATISAGKRTADGSEFEKRTADGSEFESPKKKAKVE

SEQ ID NO: 6622 - protein, 2095 aa, synthetic construct
MPAAKRVKLDGGDKKYSIGLDIGTNSVGWAVITDEYKVPSKKFKVLGNTDRHSIKKNLIGALLFDSGETAEATRLKRTARRRYTRRKNRICYLQEIFSNEMAKVDDSFFHRLEESFLVEEDKKHERHPIFGNIVDEVAYHEKYPTIYHLRKKLVDSTDKADLRLIYLALAHMIKFRGHFLIEGDLNPDNSDVDKLFIQLVQTYNQLFEENPINASGVDAKAILSARLSKSRRLENLIAQLPGEKKNGLFGNLIALSLGLTPNFKSNFDLAEDAKLQLSKDTYDDDLDNLLAQIGDQYADLFLAAKNLSDAILLSDILRVNTEITKAPLSASMIKRYDEHHQDLTLLKALVRQQLPEKYKEIFFDQSKNGYAGYIDGGASQEEFYKFIKPILEKMDGTEELLVKLNREDLLRKQRTFDNGSIPHQIHLGELHAILRRQEDFYPFLKDNREKIEKILTFRIPYYVGPLARGNSRFAWMTRKSEETITPWNFEEVVDKGASAQSFIERMTNFDKNLPNEKVLPKHSLLYEYFTVYNELTKVKYVTEGMRKPAFLSGEQKKAIVDLLFKTNRKVTVKQLKEDYFKKIECFDSVEISGVEDRFNASLGTYHDLLKIIKDKDFLDNEENEDILEDIVLTLTLFEDREMIEERLKTYAHLFDDKVMKQLKRRRYTGWGRLSRKLINGIRDKQSGKTILDFLKSDGFANRNFMQLIHDDSLTFKEDIQKAQVSGQGDSLHEHIANLAGSPAIKKGILQTVKVVDELVKVMGRHKPENIVIEMARENQTTQKGQKNSRERMKRIEEGIKELGSQILKEHPVENTQLQNEKLYLYYLQNGRDMYVDQELDINRLSDYDVDHIVPQSFLKDDSIDNKVLTRSDKARGKSDNVPSEEVVKKMKNYWRQLLNAKLITQRKFDNLTKAERGGLSELDKAGFIKRQLVETRQITKHVAQILDSRMNTKYDENDKLIREVKVITLKSKLVSDFRKDFQFYKVREINNYHHAHDAYLNAVVGTALIKKYPKLESEFVYGDYKVYDVRKMIAKSEQEIGKATAKYFFYSNIMNFFKTEITLANGEIRKRPLIETNGETGEIVWDKGRDFATVRKVLSMPQVNIVKKTEVQTGGFSKESILPKRNSDKLIARKKDWDPKKYGGFDSPTVAYSVLVVAKVEKGKSKKLKSVKELLGITIMERSSFEKNPIDFLEAKGYKEVKKDLIIKLPKYSLFELENGRKRMLASAGELQKGNELALPSKYVNFLYLASHYEKLKGSPEDNEQKQLFVEQHKHYLDEIIEQISEFSKRVILADANLDKVLSAYNKHRDKPIREQAENIIHLFTLTNLGAPAAFKYFDTTIDRKRYTSTKEVLDATLIHQSITGLYETRIDLSQLGGDGGGGSEAAAKGGTAPLEEEYRLFLEAPIQNVTLLEQWKREIPKVWAEINPPGLASTQAPIHVQLLSTALPVRVRQYPITLEAKRSLRETIRKFRAAGILRPVHSPWNTPLLPVRKSGTSEYRMVQDLREVNKRVETIHPTVPNPYTLLSLLPPDRIWYSVLDLKDAFFCIPLAPESQLIFAFEWADAEEGESGQLTWTRLPQGFKNSPTLFNEALNRDLQGFRLDHPSVSLLQYVDDLLIAADTQAACLSATRDLLMTLAELGYRVSGKKAQLCQEEVTYLGFKIHKGSRSLSNSRTQAILQIPVPKTKRQVREFLGKIGYCRLFIPGFAELAQPLYAATRPGNDPLVWGEKEEEAFQSLKLALTQPPALALPSLDKPFQLFVEETSGAAKGVLTQALGPWKRPVAYLSKRLDPVAAGWPRCLRAIAAAALLTREASKLTFGQDIEITSSHNLESLLRSPPDKWLTNARITQYQVLLLDPPRVRFKQTAALNPATLLPETDDTLPIHHCLDTLDSLTSTRPDLTDQPLAQAEATLFTDGSSYIRDGKRYAGAAVVTLDSVIWAEPLPIGTSAQKAELIALTKALEWSKDKSVNIYTDSRYAFATLHVHGMIYRERGWLTAGGKAIKNAPEILALLTAVWLPKRVAVMHCKGHQKDDAPTSTGNRRADEVAREVAIRPLSTQATISAGKRTADGSEFEKRTADGSEFESPKKKAKVE

SEQ ID NO: 6623 - protein, 2092 aa, synthetic construct
MPAAKRVKLDGGDKKYSIGLDIGTNSVGWAVITDEYKVPSKKFKVLGNTDRHSIKKNLIGALLFDSGETAEATRLKRTARRRYTRRKNRICYLQEIFSNEMAKVDDSFFHRLEESFLVEEDKKHERHPIFGNIVDEVAYHEKYPTIYHLRKKLVDSTDKADLRLIYLALAHMIKFRGHFLIEGDLNPDNSDVDKLFIQLVQTYNQLFEENPINASGVDAKAILSARLSKSRRLENLIAQLPGEKKNGLFGNLIALSLGLTPNFKSNFDLAEDAKLQLSKDTYDDDLDNLLAQIGDQYADLFLAAKNLSDAILLSDILRVNTEITKAPLSASMIKRYDEHHQDLTLLKALVRQQLPEKYKEIFFDQSKNGYAGYIDGGASQEEFYKFIKPILEKMDGTEELLVKLNREDLLRKQRTFDNGSIPHQIHLGELHAILRRQEDFYPFLKDNREKIEKILTFRIPYYVGPLARGNSRFAWMTRKSEETITPWNFEEVVDKGASAQSFIERMTNFDKNLPNEKVLPKHSLLYEYFTVYNELTKVKYVTEGMRKPAFLSGEQKKAIVDLLFKTNRKVTVKQLKEDYFKKIECFDSVEISGVEDRFNASLGTYHDLLKIIKDKDFLDNEENEDILEDIVLTLTLFEDREMIEERLKTYAHLFDDKVMKQLKRRRYTGWGRLSRKLINGIRDKQSGKTILDFLKSDGFANRNFMQLIHDDSLTFKEDIQKAQVSGQGDSLHEHIANLAGSPAIKKGILQTVKVVDELVKVMGRHKPENIVIEMARENQTTQKGQKNSRERMKRIEEGIKELGSQILKEHPVENTQLQNEKLYLYYLQNGRDMYVDQELDINRLSDYDVDHIVPQSFLKDDSIDNKVLTRSDKARGKSDNVPSEEVVKKMKNYWRQLLNAKLITQRKFDNLTKAERGGLSELDKAGFIKRQLVETRQITKHVAQILDSRMNTKYDENDKLIREVKVITLKSKLVSDFRKDFQFYKVREINNYHHAHDAYLNAVVGTALIKKYPKLESEFVYGDYKVYDVRKMIAKSEQEIGKATAKYFFYSNIMNFFKTEITLANGEIRKRPLIETNGETGEIVWDKGRDFATVRKVLSMPQVNIVKKTEVQTGGFSKESILPKRNSDKLIARKKDWDPKKYGGFDSPTVAYSVLVVAKVEKGKSKKLKSVKELLGITIMERSSFEKNPIDFLEAKGYKEVKKDLIIKLPKYSLFELENGRKRMLASAGELQKGNELALPSKYVNFLYLASHYEKLKGSPEDNEQKQLFVEQHKHYLDEIIEQISEFSKRVILADANLDKVLSAYNKHRDKPIREQAENIIHLFTLTNLGAPAAFKYFDTTIDRKRYTSTKEVLDATLIHQSITGLYETRIDLSQLGGDGGGGSEAAAKGGTLQLEEEYRLFEPESTQKQEMDIWLKNFPQAWAETGGMGTAHCQAPVLIQLKATATPISIRQYPMPHEAYQGIKPHIRRMLDQGILKPCQSPWNTPLLPVKKPGTEDYRPVQDLREVNKRVEDIHPTVPNPYNLLSTLPPSHPWYTVLDLKDAFFCLRLHSESQLLFAFEWRDPEIGLSGQLTWTRLPQGFKNSPTLFNEALHSDLADFRVRYPALVLLQYVDDLLLAAATRTECLEGTKALLETLGNKGYRASAKKAQICLQEVTYLGYSLKDGQRWLTKARKEAILSIPVPKNSRQVREFLGTAGYCRLWIPGFAELAAPLYPLTRPGTLFQWGTEQQLAFEDIKKALLSSPALGLPDITKPFELFIDENSGFAKGVLVQKLGPWKRPVAYLSKKLDTVASGWPPCLRMVAAIAILVKDAGKLTLGQPLTILTSHPVEALVRQPPNKWLSNARMTHYQAMLLDAERVHFGPTVSLNPATLLPLPSGGNHHDCLQILAETHGTRPDLTDQPLPDADLTWYTDGSSFIRNGEREAGAAVTTESEVIWAAPLPPGTSAQRAELIALTQALKMAEGKKLTVYTDSRYAFATTHVHGEIYRRRGWLTSEGKEIKNKNEILALLEALFLPKRLSIIHCPGHQKGDSPQAKGNRLADDTAKKAATETHSSLTVLPAGKRTADGSEFEKRTADGSEFESPKKKAKVE

SEQ ID NO: 6624 - protein, 2124 aa, synthetic construct
MPAAKRVKLDGGDKKYSIGLDIGTNSVGWAVITDEYKVPSKKFKVLGNTDRHSIKKNLIGALLFDSGETAEATRLKRTARRRYTRRKNRICYLQEIFSNEMAKVDDSFFHRLEESFLVEEDKKHERHPIFGNIVDEVAYHEKYPTIYHLRKKLVDSTDKADLRLIYLALAHMIKFRGHFLIEGDLNPDNSDVDKLFIQLVQTYNQLFEENPINASGVDAKAILSARLSKSRRLENLIAQLPGEKKNGLFGNLIALSLGLTPNFKSNFDLAEDAKLQLSKDTYDDDLDNLLAQIGDQYADLFLAAKNLSDAILLSDILRVNTEITKAPLSASMIKRYDEHHQDLTLLKALVRQQLPEKYKEIFFDQSKNGYAGYIDGGASQEEFYKFIKPILEKMDGTEELLVKLNREDLLRKQRTFDNGSIPHQIHLGELHAILRRQEDFYPFLKDNREKIEKILTFRIPYYVGPLARGNSRFAWMTRKSEETITPWNFEEVVDKGASAQSFIERMTNFDKNLPNEKVLPKHSLLYEYFTVYNELTKVKYVTEGMRKPAFLSGEQKKAIVDLLFKTNRKVTVKQLKEDYFKKIECFDSVEISGVEDRFNASLGTYHDLLKIIKDKDFLDNEENEDILEDIVLTLTLFEDREMIEERLKTYAHLFDDKVMKQLKRRRYTGWGRLSRKLINGIRDKQSGKTILDFLKSDGFANRNFMQLIHDDSLTFKEDIQKAQVSGQGDSLHEHIANLAGSPAIKKGILQTVKVVDELVKVMGRHKPENIVIEMARENQTTQKGQKNSRERMKRIEEGIKELGSQILKEHPVENTQLQNEKLYLYYLQNGRDMYVDQELDINRLSDYDVDHIVPQSFLKDDSIDNKVLTRSDKARGKSDNVPSEEVVKKMKNYWRQLLNAKLITQRKFDNLTKAERGGLSELDKAGFIKRQLVETRQITKHVAQILDSRMNTKYDENDKLIREVKVITLKSKLVSDFRKDFQFYKVREINNYHHAHDAYLNAVVGTALIKKYPKLESEFVYGDYKVYDVRKMIAKSEQEIGKATAKYFFYSNIMNFFKTEITLANGEIRKRPLIETNGETGEIVWDKGRDFATVRKVLSMPQVNIVKKTEVQTGGFSKESILPKRNSDKLIARKKDWDPKKYGGFDSPTVAYSVLVVAKVEKGKSKKLKSVKELLGITIMERSSFEKNPIDFLEAKGYKEVKKDLIIKLPKYSLFELENGRKRMLASAGELQKGNELALPSKYVNFLYLASHYEKLKGSPEDNEQKQLFVEQHKHYLDEIIEQISEFSKRVILADANLDKVLSAYNKHRDKPIREQAENIIHLFTLTNLGAPAAFKYFDTTIDRKRYTSTKEVLDATLIHQSITGLYETRIDLSQLGGDGGGGSEAAAKGGLLGRDLLTKLKAQIQFSTEGPQVTWEDRPAMCLVLNLEEEYRLHEKPVPPSIDPSWLQLFPMVWAEKAGMGLANQVPPVVVELKSDASPVAVRQYPMSKEAREGIRPHIQRFLDLGILVPCQSPWNTPLLPVKKPGTNDYRPVQDLREVNKRVQDIHPTVPNPYNLLSSLPPSHTWYSVLDLKDAFFCLKLHPNSQPLFAFEWRDPEKGNTGQLTWTRLPQGFKNSPTLFNEALHRDLASFRALNPQVVMLQYVDDLLVAAPTYRDCKEGTRRLLQELSKLGYRVSAKKAQLCREEVTYLGYLLKGGKRWLTPARKATVMKIPTPTTPRQVREFLGTAGFCRLWIPGFASLAAPLYPLTRPKVPFTWTEAHQEAFGRIKEALLSAPALALPDLTKPFALYVDEKEGVARGVLTQTLGPWRRPVAYLSKKLDPVASGWPTCLKAIAAVALLLKDADKLTLGQNVLVIAPHNLESIVRQPPDRWMTNARMTHYQSLLLNERVSFAPPAILNPATLLPVESDDTPIHICSEILAEETGTRPDLRDQPLPGVPAWYTDGSSFIMDGRRQAGAAIVDNKRTVWASNLPEGTSAQKAELIALTQALRLAEGKSINIYTDSRYAFATAHVHGAIYKQRGWLTSAGKDIKNKEEILALLEAIHLPKRVAIIHCPGHQRGTDPVATGNRKADEAAKQAAQSTRILTETTKNAGKRTADGSEFEKRTADGSEFESPKKKAKVE

SEQ ID NO: 6625 - protein, 2215 aa, synthetic construct
MPAAKRVKLDGGDKKYSIGLDIGTNSVGWAVITDEYKVPSKKFKVLGNTDRHSIKKNLIGALLFDSGETAEATRLKRTARRRYTRRKNRICYLQEIFSNEMAKVDDSFFHRLEESFLVEEDKKHERHPIFGNIVDEVAYHEKYPTIYHLRKKLVDSTDKADLRLIYLALAHMIKFRGHFLIEGDLNPDNSDVDKLFIQLVQTYNQLFEENPINASGVDAKAILSARLSKSRRLENLIAQLPGEKKNGLFGNLIALSLGLTPNFKSNFDLAEDAKLQLSKDTYDDDLDNLLAQIGDQYADLFLAAKNLSDAILLSDILRVNTEITKAPLSASMIKRYDEHHQDLTLLKALVRQQLPEKYKEIFFDQSKNGYAGYIDGGASQEEFYKFIKPILEKMDGTEELLVKLNREDLLRKQRTFDNGSIPHQIHLGELHAILRRQEDFYPFLKDNREKIEKILTFRIPYYVGPLARGNSRFAWMTRKSEETITPWNFEEVVDKGASAQSFIERMTNFDKNLPNEKVLPKHSLLYEYFTVYNELTKVKYVTEGMRKPAFLSGEQKKAIVDLLFKTNRKVTVKQLKEDYFKKIECFDSVEISGVEDRFNASLGTYHDLLKIIKDKDFLDNEENEDILEDIVLTLTLFEDREMIEERLKTYAHLFDDKVMKQLKRRRYTGWGRLSRKLINGIRDKQSGKTILDFLKSDGFANRNFMQLIHDDSLTFKEDIQKAQVSGQGDSLHEHIANLAGSPAIKKGILQTVKVVDELVKVMGRHKPENIVIEMARENQTTQKGQKNSRERMKRIEEGIKELGSQILKEHPVENTQLQNEKLYLYYLQNGRDMYVDQELDINRLSDYDVDHIVPQSFLKDDSIDNKVLTRSDKARGKSDNVPSEEVVKKMKNYWRQLLNAKLITQRKFDNLTKAERGGLSELDKAGFIKRQLVETRQITKHVAQILDSRMNTKYDENDKLIREVKVITLKSKLVSDFRKDFQFYKVREINNYHHAHDAYLNAVVGTALIKKYPKLESEFVYGDYKVYDVRKMIAKSEQEIGKATAKYFFYSNIMNFFKTEITLANGEIRKRPLIETNGETGEIVWDKGRDFATVRKVLSMPQVNIVKKTEVQTGGFSKESILPKRNSDKLIARKKDWDPKKYGGFDSPTVAYSVLVVAKVEKGKSKKLKSVKELLGITIMERSSFEKNPIDFLEAKGYKEVKKDLIIKLPKYSLFELENGRKRMLASAGELQKGNELALPSKYVNFLYLASHYEKLKGSPEDNEQKQLFVEQHKHYLDEIIEQISEFSKRVILADANLDKVLSAYNKHRDKPIREQAENIIHLFTLTNLGAPAAFKYFDTTIDRKRYTSTKEVLDATLIHQSITGLYETRIDLSQLGGDGGGGSEAAAKGGTLGDQGSRGSDPLPEPRVTLTVEGIPTEFLVNTGAEHSVLTKPMGKMGSKRTVVAGATGSKVYPWTTKRLLKIGQKQVTHSFLVIPECPAPLLGRDLLTKLKAQIQFSTEGPQVTWEDRPAMCLVLNLEEEYRLHEKPVPPSIDPSWLQLFPMVWAEKAGMGLANQVPPVVVELKSDASPVAVRQYPMSKEAREGIRPHIQRFLDLGILVPCQSPWNTPLLPVKKPGTNDYRPVQDLREVNKRVQDIHPTVPNPYNLLSSLPPSHTWYSVLDLKDAFFCLKLHPNSQPLFAFEWRDPEKGNTGQLTWTRLPQGFKNSPTLFNEALHRDLASFRALNPQVVMLQYVDDLLVAAPTYRDCKEGTRRLLQELSKLGYRVSAKKAQLCREEVTYLGYLLKGGKRWLTPARKATVMKIPTPTTPRQVREFLGTAGFCRLWIPGFASLAAPLYPLTRPKVPFTWTEAHQEAFGRIKEALLSAPALALPDLTKPFALYVDEKEGVARGVLTQTLGPWRRPVAYLSKKLDPVASGWPTCLKAIAAVALLLKDADKLTLGQNVLVIAPHNLESIVRQPPDRWMTNARMTHYQSLLLNERVSFAPPAILNPATLLPVESDDTPIHICSEILAEETGTRPDLRDQPLPGVPAWYTDGSSFIMDGRRQAGAAIVDNKRTVWASNLPEGTSAQKAELIALTQALRLAEGKSINIYTDSRYAFATAHVHGAIYKQRGWLTSAGKDIKNKEEILALLEAIHLPKRVAIIHCPGHQRGTDPVATGNRKADEAAKQAAQSTRILTETTKNAGKRTADGSEFEKRTADGSEFESPKKKAKVE

SEQ ID NO: 6626 - protein, 2093 aa, synthetic construct
MPAAKRVKLDGGDKKYSIGLDIGTNSVGWAVITDEYKVPSKKFKVLGNTDRHSIKKNLIGALLFDSGETAEATRLKRTARRRYTRRKNRICYLQEIFSNEMAKVDDSFFHRLEESFLVEEDKKHERHPIFGNIVDEVAYHEKYPTIYHLRKKLVDSTDKADLRLIYLALAHMIKFRGHFLIEGDLNPDNSDVDKLFIQLVQTYNQLFEENPINASGVDAKAILSARLSKSRRLENLIAQLPGEKKNGLFGNLIALSLGLTPNFKSNFDLAEDAKLQLSKDTYDDDLDNLLAQIGDQYADLFLAAKNLSDAILLSDILRVNTEITKAPLSASMIKRYDEHHQDLTLLKALVRQQLPEKYKEIFFDQSKNGYAGYIDGGASQEEFYKFIKPILEKMDGTEELLVKLNREDLLRKQRTFDNGSIPHQIHLGELHAILRRQEDFYPFLKDNREKIEKILTFRIPYYVGPLARGNSRFAWMTRKSEETITPWNFEEVVDKGASAQSFIERMTNFDKNLPNEKVLPKHSLLYEYFTVYNELTKVKYVTEGMRKPAFLSGEQKKAIVDLLFKTNRKVTVKQLKEDYFKKIECFDSVEISGVEDRFNASLGTYHDLLKIIKDKDFLDNEENEDILEDIVLTLTLFEDREMIEERLKTYAHLFDDKVMKQLKRRRYTGWGRLSRKLINGIRDKQSGKTILDFLKSDGFANRNFMQLIHDDSLTFKEDIQKAQVSGQGDSLHEHIANLAGSPAIKKGILQTVKVVDELVKVMGRHKPENIVIEMARENQTTQKGQKNSRERMKRIEEGIKELGSQILKEHPVENTQLQNEKLYLYYLQNGRDMYVDQELDINRLSDYDVDHIVPQSFLKDDSIDNKVLTRSDKARGKSDNVPSEEVVKKMKNYWRQLLNAKLITQRKFDNLTKAERGGLSELDKAGFIKRQLVETRQITKHVAQILDSRMNTKYDENDKLIREVKVITLKSKLVSDFRKDFQFYKVREINNYHHAHDAYLNAVVGTALIKKYPKLESEFVYGDYKVYDVRKMIAKSEQEIGKATAKYFFYSNIMNFFKTEITLANGEIRKRPLIETNGETGEIVWDKGRDFATVRKVLSMPQVNIVKKTEVQTGGFSKESILPKRNSDKLIARKKDWDPKKYGGFDSPTVAYSVLVVAKVEKGKSKKLKSVKELLGITIMERSSFEKNPIDFLEAKGYKEVKKDLIIKLPKYSLFELENGRKRMLASAGELQKGNELALPSKYVNFLYLASHYEKLKGSPEDNEQKQLFVEQHKHYLDEIIEQISEFSKRVILADANLDKVLSAYNKHRDKPIREQAENIIHLFTLTNLGAPAAFKYFDTTIDRKRYTSTKEVLDATLIHQSITGLYETRIDLSQLGGDGGGGSEAAAKGGTLNIEDEYRLHETSKEPDVSLGSTWLSDFPQAWAETGGMGLAVRQAPLIIPLKATSTPVSIKQYPMSQEARLGIKPHIQRLLDQGILVPCQSPWNTPLLPVKKPGTNDYRPVQDLREVNKRVEDIHPTVPNPYNLLSGLPPSHQWYTVLDLKDAFFCLRLHPTSQPLFAFEWRDPEMGISGQLTWTRLPQGFKNSPTLFNEALHRDLAGFRIQHPDLILLQYVDDLLLAATSELDCQQGTRALLQTLGDLGYRASAKKAQICQKQVKYLGYLLKEGQRWLTEARKETVMGQPIPKTPRQLREFLGTAGFCRLWIPGFAEMAAPLYPLTKPGTLFNWGPDQQKAFQEIKQALLTAPALGLPDLTKPFELFVDEKQGYAKGVLTQKLGPWRRPVAYLSKKLDPVAAGWPPCLRMVAAIAVLTKDAGKLTMGQPLVILAPHAVEALVKQPPDRWLSNARMTHYQALLLDTDRVQFGPVVALNPATLLPLPEEGLQHDCLDILAEAHGTRSDLMDQPLPDADHTWYTDGSSFLQEGQRKAGAAVTTETEVIWARALPAGTSAQRAELIALTQALKMAEGKKLNVYTDSRYAFATAHIHGEIYRRRGWLTSEGKEIKNKDEILALLKALFLPKRLSIIHCPGHQKGNSAEARGNRMADQAAREVATRETPETSTLLAGKRTADGSEFEKRTADGSEFESPKKKAKVE

SEQ ID NO: 6627 - protein, 2093 aa, synthetic construct
MPAAKRVKLDGGDKKYSIGLDIGTNSVGWAVITDEYKVPSKKFKVLGNTDRHSIKKNLIGALLFDSGETAEATRLKRTARRRYTRRKNRICYLQEIFSNEMAKVDDSFFHRLEESFLVEEDKKHERHPIFGNIVDEVAYHEKYPTIYHLRKKLVDSTDKADLRLIYLALAHMIKFRGHFLIEGDLNPDNSDVDKLFIQLVQTYNQLFEENPINASGVDAKAILSARLSKSRRLENLIAQLPGEKKNGLFGNLIALSLGLTPNFKSNFDLAEDAKLQLSKDTYDDDLDNLLAQIGDQYADLFLAAKNLSDAILLSDILRVNTEITKAPLSASMIKRYDEHHQDLTLLKALVRQQLPEKYKEIFFDQSKNGYAGYIDGGASQEEFYKFIKPILEKMDGTEELLVKLNREDLLRKQRTFDNGSIPHQIHLGELHAILRRQEDFYPFLKDNREKIEKILTFRIPYYVGPLARGNSRFAWMTRKSEETITPWNFEEVVDKGASAQSFIERMTNFDKNLPNEKVLPKHSLLYEYFTVYNELTKVKYVTEGMRKPAFLSGEQKKAIVDLLFKTNRKVTVKQLKEDYFKKIECFDSVEISGVEDRFNASLGTYHDLLKIIKDKDFLDNEENEDILEDIVLTLTLFEDREMIEERLKTYAHLFDDKVMKQLKRRRYTGWGRLSRKLINGIRDKQSGKTILDFLKSDGFANRNFMQLIHDDSLTFKEDIQKAQVSGQGDSLHEHIANLAGSPAIKKGILQTVKVVDELVKVMGRHKPENIVIEMARENQTTQKGQKNSRERMKRIEEGIKELGSQILKEHPVENTQLQNEKLYLYYLQNGRDMYVDQELDINRLSDYDVDHIVPQSFLKDDSIDNKVLTRSDKARGKSDNVPSEEVVKKMKNYWRQLLNAKLITQRKFDNLTKAERGGLSELDKAGFIKRQLVETRQITKHVAQILDSRMNTKYDENDKLIREVKVITLKSKLVSDFRKDFQFYKVREINNYHHAHDAYLNAVVGTALIKKYPKLESEFVYGDYKVYDVRKMIAKSEQEIGKATAKYFFYSNIMNFFKTEITLANGEIRKRPLIETNGETGEIVWDKGRDFATVRKVLSMPQVNIVKKTEVQTGGFSKESILPKRNSDKLIARKKDWDPKKYGGFDSPTVAYSVLVVAKVEKGKSKKLKSVKELLGITIMERSSFEKNPIDFLEAKGYKEVKKDLIIKLPKYSLFELENGRKRMLASAGELQKGNELALPSKYVNFLYLASHYEKLKGSPEDNEQKQLFVEQHKHYLDEIIEQISEFSKRVILADANLDKVLSAYNKHRDKPIREQAENIIHLFTLTNLGAPAAFKYFDTTIDRKRYTSTKEVLDATLIHQSITGLYETRIDLSQLGGDGGGGSEAAAKGGTLNIEDEYRLHETSKGPDVPLGSTWLSDFPQAWAETGGMGLAVRQAPLIIPLKATSTPVSIKQYPMSQEARLGIKPHIQRLLDQGILVPCQSPWNTPLLPVKKPGTNDYRPVQDLREVNKRVEDIHPTVPNPYNLLSGLPPSHQWYTVLDLKDAFFCLRLHPTSQSLFAFEWRDPEMGISGQLTWTRLPQGFKNSPTLFNEALHRDLADFRIQHPDLILLQYVDDLLLAATSELDCQQGTRALLQTLGDLGYRASAKKAQICQKQVKYLGYLLKEGQRWLTEARKETVMGQPTPKTPRQLREFLGTAGFCRLWIPGFAEMAAPLYPLTKPGTLFEWGPDQQKAYQEIKQALLTAPALGLPDLTKPFELFVDEKQGYAKGVLTQKLGPWRRPVAYLSKKLDPVAAGWPPCLRMVAAIAVLTKDAGKLTMGQPLVILAPHAVEALVKQPPDRWLSNARMTHYQALLLDTDRVQFGPIVALNPATLLPLPEEGLQHDCLDILAEAHGTRPDLTDQPLPDADHTWYTDGSSFLQEGQRKAGAAVTTETEVVWAKALPAGTSAQRAELIALTQALKMAEGKKLNVYTDSRYAFATAHIHGEIYRRRGWLTSEGKEIKNKDEILALLKALFLPKRLSIIHCPGHQKGNRAEARGNRMADQAAREVATRETPETSTLLAGKRTADGSEFEKRTADGSEFESPKKKAKVE

SEQ ID NO: 6628 - protein, 2084 aa, synthetic construct
MPAAKRVKLDGGDKKYSIGLDIGTNSVGWAVITDEYKVPSKKFKVLGNTDRHSIKKNLIGALLFDSGETAEATRLKRTARRRYTRRKNRICYLQEIFSNEMAKVDDSFFHRLEESFLVEEDKKHERHPIFGNIVDEVAYHEKYPTIYHLRKKLVDSTDKADLRLIYLALAHMIKFRGHFLIEGDLNPDNSDVDKLFIQLVQTYNQLFEENPINASGVDAKAILSARLSKSRRLENLIAQLPGEKKNGLFGNLIALSLGLTPNFKSNFDLAEDAKLQLSKDTYDDDLDNLLAQIGDQYADLFLAAKNLSDAILLSDILRVNTEITKAPLSASMIKRYDEHHQDLTLLKALVRQQLPEKYKEIFFDQSKNGYAGYIDGGASQEEFYKFIKPILEKMDGTEELLVKLNREDLLRKQRTFDNGSIPHQIHLGELHAILRRQEDFYPFLKDNREKIEKILTFRIPYYVGPLARGNSRFAWMTRKSEETITPWNFEEVVDKGASAQSFIERMTNFDKNLPNEKVLPKHSLLYEYFTVYNELTKVKYVTEGMRKPAFLSGEQKKAIVDLLFKTNRKVTVKQLKEDYFKKIECFDSVEISGVEDRFNASLGTYHDLLKIIKDKDFLDNEENEDILEDIVLTLTLFEDREMIEERLKTYAHLFDDKVMKQLKRRRYTGWGRLSRKLINGIRDKQSGKTILDFLKSDGFANRNFMQLIHDDSLTFKEDIQKAQVSGQGDSLHEHIANLAGSPAIKKGILQTVKVVDELVKVMGRHKPENIVIEMARENQTTQKGQKNSRERMKRIEEGIKELGSQILKEHPVENTQLQNEKLYLYYLQNGRDMYVDQELDINRLSDYDVDHIVPQSFLKDDSIDNKVLTRSDKARGKSDNVPSEEVVKKMKNYWRQLLNAKLITQRKFDNLTKAERGGLSELDKAGFIKRQLVETRQITKHVAQILDSRMNTKYDENDKLIREVKVITLKSKLVSDFRKDFQFYKVREINNYHHAHDAYLNAVVGTALIKKYPKLESEFVYGDYKVYDVRKMIAKSEQEIGKATAKYFFYSNIMNFFKTEITLANGEIRKRPLIETNGETGEIVWDKGRDFATVRKVLSMPQVNIVKKTEVQTGGFSKESILPKRNSDKLIARKKDWDPKKYGGFDSPTVAYSVLVVAKVEKGKSKKLKSVKELLGITIMERSSFEKNPIDFLEAKGYKEVKKDLIIKLPKYSLFELENGRKRMLASAGELQKGNELALPSKYVNFLYLASHYEKLKGSPEDNEQKQLFVEQHKHYLDEIIEQISEFSKRVILADANLDKVLSAYNKHRDKPIREQAENIIHLFTLTNLGAPAAFKYFDTTIDRKRYTSTKEVLDATLIHQSITGLYETRIDLSQLGGDGGGGSEAAAKGGIPWLMKKPLQLTTLVPLQEYEERLLKQTMLTGSYKEKLQSLFLKYDALWQHWENQVGHRRIKPHHIATGTVNPRPQKQYPINPKAKASIQTVINDLLKQGVLIQQNSIMNTPVYPVPKPDGKWRMVLDYREVNKTIPLIAAQNQHSAGILSSIFRGKYKTTLDLSNGFWAHSITPESYWLTAFTWLGQQYCWTRLPQGFLNSPALFNADVVDLLKEVPNVQVYVDDIYISHDDPREHLEQLEKVFSLLLNAGYVVSLKKSEIAQHEVEFLGFNITKEGRGLTETFKQKLLNITPPRDLKQLQSILGLLNFARNFIPNFSELVKPLYNIIATAPGKYITWTTDNSQQLQNIISMLNSAENLEERNPEVRLIMKVNTSPSAGYIRFYNEFAKRPIMYLNYVYTKAEVKFTNTEKLLTTIHKGLIKALDLGMGQEILVYSPIVSMTKIQKTPLPERKALPIRWITWMSYLEDPRIQFHYDKTLPELQQVPTVTDDIIAKIKHPSEFSMVFYTDGSAIKHPNVNKSHNAGMGIAQVQFKPEFTVINTWSIPLGDHTAQLAEVAAVEFACKKALKIDGPVLIVTDSFYVAESVNKELPYWQSNGFFNNKKKPLKHVSKWKSIADCIQLKPDIIIIHEKGHQPTASTFHTEGNNLADKLATQGSYVVNAGKRTADGSEFEKRTADGSEFESPKKKAKVE

SEQ ID NO: 6629 - protein, 2091 aa, synthetic construct
MPAAKRVKLDGGDKKYSIGLDIGTNSVGWAVITDEYKVPSKKFKVLGNTDRHSIKKNLIGALLFDSGETAEATRLKRTARRRYTRRKNRICYLQEIFSNEMAKVDDSFFHRLEESFLVEEDKKHERHPIFGNIVDEVAYHEKYPTIYHLRKKLVDSTDKADLRLIYLALAHMIKFRGHFLIEGDLNPDNSDVDKLFIQLVQTYNQLFEENPINASGVDAKAILSARLSKSRRLENLIAQLPGEKKNGLFGNLIALSLGLTPNFKSNFDLAEDAKLQLSKDTYDDDLDNLLAQIGDQYADLFLAAKNLSDAILLSDILRVNTEITKAPLSASMIKRYDEHHQDLTLLKALVRQQLPEKYKEIFFDQSKNGYAGYIDGGASQEEFYKFIKPILEKMDGTEELLVKLNREDLLRKQRTFDNGSIPHQIHLGELHAILRRQEDFYPFLKDNREKIEKILTFRIPYYVGPLARGNSRFAWMTRKSEETITPWNFEEVVDKGASAQSFIERMTNFDKNLPNEKVLPKHSLLYEYFTVYNELTKVKYVTEGMRKPAFLSGEQKKAIVDLLFKTNRKVTVKQLKEDYFKKIECFDSVEISGVEDRFNASLGTYHDLLKIIKDKDFLDNEENEDILEDIVLTLTLFEDREMIEERLKTYAHLFDDKVMKQLKRRRYTGWGRLSRKLINGIRDKQSGKTILDFLKSDGFANRNFMQLIHDDSLTFKEDIQKAQVSGQGDSLHEHIANLAGSPAIKKGILQTVKVVDELVKVMGRHKPENIVIEMARENQTTQKGQKNSRERMKRIEEGIKELGSQILKEHPVENTQLQNEKLYLYYLQNGRDMYVDQELDINRLSDYDVDHIVPQSFLKDDSIDNKVLTRSDKARGKSDNVPSEEVVKKMKNYWRQLLNAKLITQRKFDNLTKAERGGLSELDKAGFIKRQLVETRQITKHVAQILDSRMNTKYDENDKLIREVKVITLKSKLVSDFRKDFQFYKVREINNYHHAHDAYLNAVVGTALIKKYPKLESEFVYGDYKVYDVRKMIAKSEQEIGKATAKYFFYSNIMNFFKTEITLANGEIRKRPLIETNGETGEIVWDKGRDFATVRKVLSMPQVNIVKKTEVQTGGFSKESILPKRNSDKLIARKKDWDPKKYGGFDSPTVAYSVLVVAKVEKGKSKKLKSVKELLGITIMERSSFEKNPIDFLEAKGYKEVKKDLIIKLPKYSLFELENGRKRMLASAGELQKGNELALPSKYVNFLYLASHYEKLKGSPEDNEQKQLFVEQHKHYLDEIIEQISEFSKRVILADANLDKVLSAYNKHRDKPIREQAENIIHLFTLTNLGAPAAFKYFDTTIDRKRYTSTKEVLDATLIHQSITGLYETRIDLSQLGGDGGGGSEAAAKGGVLNLEEEYRLHEKPVPSSIDPSWLQLFPTVWAERAGMGLANQVPPVVVELRSGASPVAVRQYPMSKEAREGIRPHIQRFLDLGVLVPCQSPWNTPLLPVKKPGTNDYRPVQDLREINKRVQDIHPTVPNPYNLLSSLPPSHTWYSVLDLKDAFFCLKLHPNSQPLFAFEWRDPEKGNTGQLTWTRLPQGFKNSPTLFNEALHRDLAPFRALNPQVVLLQYVDDLLVAAPTYRDCKEGTQKLLQELSKLGYRVSAKKAQLCQKEVTYLGYLLKEGKRWLTPARKATVMKIPPPTTPRQVREFLGKAGFCRLFIPGFASLAAPLYPLTKPSIPFIWTEEHQKAFDRIKEALLSAPALALPDLTKPFTLYVDERAGVARGVLTQTLGPWRRPVAYLSKKLDPVASGWPTCLKAVAAVALLLKDADKLTLGQNVTVIASHSLESIVRQPPDRWMTNARMTHYQSLLLNERVSFAPPAVLNPATLLPVESEATPVHRCSEILAEETGTRRDLKDQPLPGVPAWYTDGSSFIAEGKRRAGAAIVDGKRTVWASSLPEGTSAQKAELVALTQALRLAEGKDINIYTDSRYAFATAHIHGAIYKQRGWLTSAGKDIKNKEEILALLEAIHLPKRVAIIHCPGHQKGNDPVATGNRRADEAAKQAALSTRVLAETTKPAGKRTADGSEFEKRTADGSEFESPKKKAKVE

SEQ ID NO: 6630 - protein, 2092 aa, synthetic construct
MPAAKRVKLDGGDKKYSIGLDIGTNSVGWAVITDEYKVPSKKFKVLGNTDRHSIKKNLIGALLFDSGETAEATRLKRTARRRYTRRKNRICYLQEIFSNEMAKVDDSFFHRLEESFLVEEDKKHERHPIFGNIVDEVAYHEKYPTIYHLRKKLVDSTDKADLRLIYLALAHMIKFRGHFLIEGDLNPDNSDVDKLFIQLVQTYNQLFEENPINASGVDAKAILSARLSKSRRLENLIAQLPGEKKNGLFGNLIALSLGLTPNFKSNFDLAEDAKLQLSKDTYDDDLDNLLAQIGDQYADLFLAAKNLSDAILLSDILRVNTEITKAPLSASMIKRYDEHHQDLTLLKALVRQQLPEKYKEIFFDQSKNGYAGYIDGGASQEEFYKFIKPILEKMDGTEELLVKLNREDLLRKQRTFDNGSIPHQIHLGELHAILRRQEDFYPFLKDNREKIEKILTFRIPYYVGPLARGNSRFAWMTRKSEETITPWNFEEVVDKGASAQSFIERMTNFDKNLPNEKVLPKHSLLYEYFTVYNELTKVKYVTEGMRKPAFLSGEQKKAIVDLLFKTNRKVTVKQLKEDYFKKIECFDSVEISGVEDRFNASLGTYHDLLKIIKDKDFLDNEENEDILEDIVLTLTLFEDREMIEERLKTYAHLFDDKVMKQLKRRRYTGWGRLSRKLINGIRDKQSGKTILDFLKSDGFANRNFMQLIHDDSLTFKEDIQKAQVSGQGDSLHEHIANLAGSPAIKKGILQTVKVVDELVKVMGRHKPENIVIEMARENQTTQKGQKNSRERMKRIEEGIKELGSQILKEHPVENTQLQNEKLYLYYLQNGRDMYVDQELDINRLSDYDVDHIVPQSFLKDDSIDNKVLTRSDKARGKSDNVPSEEVVKKMKNYWRQLLNAKLITQRKFDNLTKAERGGLSELDKAGFIKRQLVETRQITKHVAQILDSRMNTKYDENDKLIREVKVITLKSKLVSDFRKDFQFYKVREINNYHHAHDAYLNAVVGTALIKKYPKLESEFVYGDYKVYDVRKMIAKSEQEIGKATAKYFFYSNIMNFFKTEITLANGEIRKRPLIETNGETGEIVWDKGRDFATVRKVLSMPQVNIVKKTEVQTGGFSKESILPKRNSDKLIARKKDWDPKKYGGFDSPTVAYSVLVVAKVEKGKSKKLKSVKELLGITIMERSSFEKNPIDFLEAKGYKEVKKDLIIKLPKYSLFELENGRKRMLASAGELQKGNELALPSKYVNFLYLASHYEKLKGSPEDNEQKQLFVEQHKHYLDEIIEQISEFSKRVILADANLDKVLSAYNKHRDKPIREQAENIIHLFTLTNLGAPAAFKYFDTTIDRKRYTSTKEVLDATLIHQSITGLYETRIDLSQLGGDGGEAAAKGGSGGTLQLEEEYRLFEPESTQKQEMDIWLKNFPQAWAETGGMGTAHCQAPVLIQLKATATPISIRQYPMPHEAYQGIKPHIRRMLDQGILKPCQSPWNTPLLPVKKPGTEDYRPVQDLREVNKRVEDIHPTVPNPYNLLSTLPPSHPWYTVLDLKDAFFCLRLHSESQLLFAFEWRDPEIGLSGQLTWTRLPQGFKNSPTLFNEALHSDLADFRVRYPALVLLQYVDDLLLAAATRTECLEGTKALLETLGNKGYRASAKKAQICLQEVTYLGYSLKDGQRWLTKARKEAILSIPVPKNSRQVREFLGKAGYCRLFIPGFAELAAPLYPLTRPGTLFQWGTEQQLAFEDIKKALLSSPALGLPDITKPFELFIDENSGFAKGVLVQKLGPWKRPVAYLSKKLDTVASGWPPCLRMVAAIAILVKDAGKLTLGQPLTILTSHPVEALVRQPPNKWLSNARMTHYQAMLLDAERVHFGPTVSLNPATLLPLPSGGNHHDCLQILAETHGTRPDLTDQPLPDADLTWYTDGSSFIRNGEREAGAAVTTESEVIWAAPLPPGTSAQRAELIALTQALKMAEGKKLTVYTDSRYAFATTHVHGEIYRRRGWLTSEGKEIKNKNEILALLEALFLPKRLSIIHCPGHQKGDSPQAKGNRLADDTAKKAATETHSSLTVLPAGKRTADGSEFEKRTADGSEFESPKKKAKVE

SEQ ID NO: 6631 - protein, 2091 aa, synthetic construct
MPAAKRVKLDGGDKKYSIGLDIGTNSVGWAVITDEYKVPSKKFKVLGNTDRHSIKKNLIGALLFDSGETAEATRLKRTARRRYTRRKNRICYLQEIFSNEMAKVDDSFFHRLEESFLVEEDKKHERHPIFGNIVDEVAYHEKYPTIYHLRKKLVDSTDKADLRLIYLALAHMIKFRGHFLIEGDLNPDNSDVDKLFIQLVQTYNQLFEENPINASGVDAKAILSARLSKSRRLENLIAQLPGEKKNGLFGNLIALSLGLTPNFKSNFDLAEDAKLQLSKDTYDDDLDNLLAQIGDQYADLFLAAKNLSDAILLSDILRVNTEITKAPLSASMIKRYDEHHQDLTLLKALVRQQLPEKYKEIFFDQSKNGYAGYIDGGASQEEFYKFIKPILEKMDGTEELLVKLNREDLLRKQRTFDNGSIPHQIHLGELHAILRRQEDFYPFLKDNREKIEKILTFRIPYYVGPLARGNSRFAWMTRKSEETITPWNFEEVVDKGASAQSFIERMTNFDKNLPNEKVLPKHSLLYEYFTVYNELTKVKYVTEGMRKPAFLSGEQKKAIVDLLFKTNRKVTVKQLKEDYFKKIECFDSVEISGVEDRFNASLGTYHDLLKIIKDKDFLDNEENEDILEDIVLTLTLFEDREMIEERLKTYAHLFDDKVMKQLKRRRYTGWGRLSRKLINGIRDKQSGKTILDFLKSDGFANRNFMQLIHDDSLTFKEDIQKAQVSGQGDSLHEHIANLAGSPAIKKGILQTVKVVDELVKVMGRHKPENIVIEMARENQTTQKGQKNSRERMKRIEEGIKELGSQILKEHPVENTQLQNEKLYLYYLQNGRDMYVDQELDINRLSDYDVDHIVPQSFLKDDSIDNKVLTRSDKARGKSDNVPSEEVVKKMKNYWRQLLNAKLITQRKFDNLTKAERGGLSELDKAGFIKRQLVETRQITKHVAQILDSRMNTKYDENDKLIREVKVITLKSKLVSDFRKDFQFYKVREINNYHHAHDAYLNAVVGTALIKKYPKLESEFVYGDYKVYDVRKMIAKSEQEIGKATAKYFFYSNIMNFFKTEITLANGEIRKRPLIETNGETGEIVWDKGRDFATVRKVLSMPQVNIVKKTEVQTGGFSKESILPKRNSDKLIARKKDWDPKKYGGFDSPTVAYSVLVVAKVEKGKSKKLKSVKELLGITIMERSSFEKNPIDFLEAKGYKEVKKDLIIKLPKYSLFELENGRKRMLASAGELQKGNELALPSKYVNFLYLASHYEKLKGSPEDNEQKQLFVEQHKHYLDEIIEQISEFSKRVILADANLDKVLSAYNKHRDKPIREQAENIIHLFTLTNLGAPAAFKYFDTTIDRKRYTSTKEVLDATLIHQSITGLYETRIDLSQLGGDGGEAAAKGGSGGVLNLEEEYRLHEKPVPSSIDPSWLQLFPTVWAERAGMGLANQVPPVVVELRSGASPVAVRQYPMSKEAREGIRPHIQKFLDLGVLVPCRSPWNTPLLPVKKPGTNDYRPVQDLREINKRVQDIHPTVPNPYNLLSSLPPSYTWYSVLDLKDAFFCLRLHPNSQPLFAFEWKDPEKGNTGQLTWTRLPQGFKNSPTLFNEALHRDLAPFRALNPQVVLLQYVDDLLVAAPTYEDCKKGTQKLLQELSKLGYRVSAKKAQLCQREVTYLGYLLKEGKRWLTPARKATVMKIPVPTTPRQVREFLGKAGFCRLFIPGFASLAAPLYPLTKPSIPFIWTEEHQQAFDHIKKALLSAPALALPDLTKPFTLYIDERAGVARGVLTQTLGPWRRPVAYLSKKLDPVASGWPTCLKAVAAVALLLKDADKLTLGQNVTVIASHSLESIVRQPPDRWMTNARMTHYQSLLLNERVSFAPPAVLNPATLLPVESEATPVHRCSEILAEETGTRRDLEDQPLPGVPTWYTDGSSFITEGKRRAGAPIVDGKRTVWASSLPEGTSAQKAELVALTQALRLAEGKNINIYTDSRYAFATAHIHGAIYKQRGWLTSAGKDIKNKEEILALLEAIHLPRRVAIIHCPGHQRGSNPVATGNRRADEAAKQAALSTRVLAGTTKPAGKRTADGSEFEKRTADGSEFESPKKKAKVE

SEQ ID NO: 6632 - protein, 2093 aa, synthetic construct
MPAAKRVKLDGGDKKYSIGLDIGTNSVGWAVITDEYKVPSKKFKVLGNTDRHSIKKNLIGALLFDSGETAEATRLKRTARRRYTRRKNRICYLQEIFSNEMAKVDDSFFHRLEESFLVEEDKKHERHPIFGNIVDEVAYHEKYPTIYHLRKKLVDSTDKADLRLIYLALAHMIKFRGHFLIEGDLNPDNSDVDKLFIQLVQTYNQLFEENPINASGVDAKAILSARLSKSRRLENLIAQLPGEKKNGLFGNLIALSLGLTPNFKSNFDLAEDAKLQLSKDTYDDDLDNLLAQIGDQYADLFLAAKNLSDAILLSDILRVNTEITKAPLSASMIKRYDEHHQDLTLLKALVRQQLPEKYKEIFFDQSKNGYAGYIDGGASQEEFYKFIKPILEKMDGTEELLVKLNREDLLRKQRTFDNGSIPHQIHLGELHAILRRQEDFYPFLKDNREKIEKILTFRIPYYVGPLARGNSRFAWMTRKSEETITPWNFEEVVDKGASAQSFIERMTNFDKNLPNEKVLPKHSLLYEYFTVYNELTKVKYVTEGMRKPAFLSGEQKKAIVDLLFKTNRKVTVKQLKEDYFKKIECFDSVEISGVEDRFNASLGTYHDLLKIIKDKDFLDNEENEDILEDIVLTLTLFEDREMIEERLKTYAHLFDDKVMKQLKRRRYTGWGRLSRKLINGIRDKQSGKTILDFLKSDGFANRNFMQLIHDDSLTFKEDIQKAQVSGQGDSLHEHIANLAGSPAIKKGILQTVKVVDELVKVMGRHKPENIVIEMARENQTTQKGQKNSRERMKRIEEGIKELGSQILKEHPVENTQLQNEKLYLYYLQNGRDMYVDQELDINRLSDYDVDHIVPQSFLKDDSIDNKVLTRSDKARGKSDNVPSEEVVKKMKNYWRQLLNAKLITQRKFDNLTKAERGGLSELDKAGFIKRQLVETRQITKHVAQILDSRMNTKYDENDKLIREVKVITLKSKLVSDFRKDFQFYKVREINNYHHAHDAYLNAVVGTALIKKYPKLESEFVYGDYKVYDVRKMIAKSEQEIGKATAKYFFYSNIMNFFKTEITLANGEIRKRPLIETNGETGEIVWDKGRDFATVRKVLSMPQVNIVKKTEVQTGGFSKESILPKRNSDKLIARKKDWDPKKYGGFDSPTVAYSVLVVAKVEKGKSKKLKSVKELLGITIMERSSFEKNPIDFLEAKGYKEVKKDLIIKLPKYSLFELENGRKRMLASAGELQKGNELALPSKYVNFLYLASHYEKLKGSPEDNEQKQLFVEQHKHYLDEIIEQISEFSKRVILADANLDKVLSAYNKHRDKPIREQAENIIHLFTLTNLGAPAAFKYFDTTIDRKRYTSTKEVLDATLIHQSITGLYETRIDLSQLGGDGGEAAAKGGSGGTLGIEDEYRLHETSTEPDVSLGSTWLSDFPQAWAETGGMGLAVRQAPLIIPLKATSTPVSIQQYPMSHEARLGIKPHIQRLLDQGILVPCQSPWNTPLLPVKKPGTNDYRPVQDLREVNKRVEDIHPTVPNPYNLLSGLPPSHQWYTVLDLKDAFFCLRLHPTSQPLFAFEWRDPGMGISGQLTWTRLPQGFKNSPTLFNEALHRDLADFRIQHPDLILLQYVDDILLAATSELDCQQGTRALLQTLGDLGYRASAKKAQICQKQVKYLGYLLREGQRWLTEARKETVMGQPVPKTPRQLREFLGTAGFCRLWIPGFAEMAAPLYPLTKPGTLFSWGPDQQKAYQEIKQALLTAPALGLPDLTKPFELFVDEKQGYAKGVLTQKLGPWRRPVAYLSKKLDPVAAGWPPCLRMVAAIAVLTKDAGKLTMGQPLVILAPHAVEALVKQPPDRWLSNARMTHYQAMLLDTDRVQFGPVVALNPATLLPLPEEGAPHDCLEILAETHGTRPDLTDQPIPDADHTWYTDGSSFLQEGQRKAGAAVTTETEVIWAGALPAGTSAQRAELIALTQALKMAEGKRLNVYTDSRYAFATAHIHGEIYRRRGWLTSEGREIKNKSEILALLKALFLPKRLSIIHCLGHQKGDSAEARGNRLADQAAREAAIKTPPDTSTLLAGKRTADGSEFEKRTADGSEFESPKKKAKVE

SEQ ID NO: 6633 - protein, 2093 aa, synthetic construct
MPAAKRVKLDGGDKKYSIGLDIGTNSVGWAVITDEYKVPSKKFKVLGNTDRHSIKKNLIGALLFDSGETAEATRLKRTARRRYTRRKNRICYLQEIFSNEMAKVDDSFFHRLEESFLVEEDKKHERHPIFGNIVDEVAYHEKYPTIYHLRKKLVDSTDKADLRLIYLALAHMIKFRGHFLIEGDLNPDNSDVDKLFIQLVQTYNQLFEENPINASGVDAKAILSARLSKSRRLENLIAQLPGEKKNGLFGNLIALSLGLTPNFKSNFDLAEDAKLQLSKDTYDDDLDNLLAQIGDQYADLFLAAKNLSDAILLSDILRVNTEITKAPLSASMIKRYDEHHQDLTLLKALVRQQLPEKYKEIFFDQSKNGYAGYIDGGASQEEFYKFIKPILEKMDGTEELLVKLNREDLLRKQRTFDNGSIPHQIHLGELHAILRRQEDFYPFLKDNREKIEKILTFRIPYYVGPLARGNSRFAWMTRKSEETITPWNFEEVVDKGASAQSFIERMTNFDKNLPNEKVLPKHSLLYEYFTVYNELTKVKYVTEGMRKPAFLSGEQKKAIVDLLFKTNRKVTVKQLKEDYFKKIECFDSVEISGVEDRFNASLGTYHDLLKIIKDKDFLDNEENEDILEDIVLTLTLFEDREMIEERLKTYAHLFDDKVMKQLKRRRYTGWGRLSRKLINGIRDKQSGKTILDFLKSDGFANRNFMQLIHDDSLTFKEDIQKAQVSGQGDSLHEHIANLAGSPAIKKGILQTVKVVDELVKVMGRHKPENIVIEMARENQTTQKGQKNSRERMKRIEEGIKELGSQILKEHPVENTQLQNEKLYLYYLQNGRDMYVDQELDINRLSDYDVDHIVPQSFLKDDSIDNKVLTRSDKARGKSDNVPSEEVVKKMKNYWRQLLNAKLITQRKFDNLTKAERGGLSELDKAGFIKRQLVETRQITKHVAQILDSRMNTKYDENDKLIREVKVITLKSKLVSDFRKDFQFYKVREINNYHHAHDAYLNAVVGTALIKKYPKLESEFVYGDYKVYDVRKMIAKSEQEIGKATAKYFFYSNIMNFFKTEITLANGEIRKRPLIETNGETGEIVWDKGRDFATVRKVLSMPQVNIVKKTEVQTGGFSKESILPKRNSDKLIARKKDWDPKKYGGFDSPTVAYSVLVVAKVEKGKSKKLKSVKELLGITIMERSSFEKNPIDFLEAKGYKEVKKDLIIKLPKYSLFELENGRKRMLASAGELQKGNELALPSKYVNFLYLASHYEKLKGSPEDNEQKQLFVEQHKHYLDEIIEQISEFSKRVILADANLDKVLSAYNKHRDKPIREQAENIIHLFTLTNLGAPAAFKYFDTTIDRKRYTSTKEVLDATLIHQSITGLYETRIDLSQLGGDGGEAAAKGGSGGTLGIEDEYRLHETSTEPDVSLGSTWLSDFPQAWAETGGMGLAVRQAPLIIPLKATSTPVSIQQYPMSHEARLGIKPHIQRLLDQGILVPCQSPWNTPLLPVKKPGTNDYRPVQDLREVNKRVEDIHPTVPNPYNLLSGLPPSHQWYTVLDLKDAFFCLRLHPTSQPLFAFEWRDPGMGISGQLTWTRLPQGFKNSPTLFDEALHRDLADFRIQHPDLILLQYVDDILLAATSELDCQQGTRALLQTLGDLGYRASAKKAQICQKQVKYLGYLLREGQRWLTEARKETVMGQPVPKTPRQLREFLGTAGFCRLWIPGFAEMAAPLYPLTKTGTLFSWGPDQQKAYQEIKQALLTAPALGLPDLTKPFELFVDEKQGYAKGVLTQKLGPWRRPVAYLSKKLDPVAAGWPPCLRMVAAIAVLTKDAGKLTMGQPLVILAPHAVEALVKQPPDRWLSNARMTHYQAMLLDTDRVQFGPVVALNPATLLPLPEEGAPHDCLEILAETHGTRPDLTDQPIPDADHTWYTDGSSFLQEGQRKAGAAVTTETEVIWAGALPAGTSAQRAELIALTQALKMAEGKRLNVYTDSRYAFATAHIHGEIYRRRGLLTSEGREIKNKSEILALLKALFLPKRLSIIHCLGHQKGDSAEARGNRLADQAAREAAIKTPPDTSTLLAGKRTADGSEFEKRTADGSEFESPKKKAKVE

SEQ ID NO: 6634 - protein, 2093 aa, synthetic construct; identical to SEQ ID NO: 6632

SEQ ID NO: 6635 - protein, 2087 aa, synthetic construct
MPAAKRVKLDGGDKKYSIGLDIGTNSVGWAVITDEYKVPSKKFKVLGNTDRHSIKKNLIGALLFDSGETAEATRLKRTARRRYTRRKNRICYLQEIFSNEMAKVDDSFFHRLEESFLVEEDKKHERHPIFGNIVDEVAYHEKYPTIYHLRKKLVDSTDKADLRLIYLALAHMIKFRGHFLIEGDLNPDNSDVDKLFIQLVQTYNQLFEENPINASGVDAKAILSARLSKSRRLENLIAQLPGEKKNGLFGNLIALSLGLTPNFKSNFDLAEDAKLQLSKDTYDDDLDNLLAQIGDQYADLFLAAKNLSDAILLSDILRVNTEITKAPLSASMIKRYDEHHQDLTLLKALVRQQLPEKYKEIFFDQSKNGYAGYIDGGASQEEFYKFIKPILEKMDGTEELLVKLNREDLLRKQRTFDNGSIPHQIHLGELHAILRRQEDFYPFLKDNREKIEKILTFRIPYYVGPLARGNSRFAWMTRKSEETITPWNFEEVVDKGASAQSFIERMTNFDKNLPNEKVLPKHSLLYEYFTVYNELTKVKYVTEGMRKPAFLSGEQKKAIVDLLFKTNRKVTVKQLKEDYFKKIECFDSVEISGVEDRFNASLGTYHDLLKIIKDKDFLDNEENEDILEDIVLTLTLFEDREMIEERLKTYAHLFDDKVMKQLKRRRYTGWGRLSRKLINGIRDKQSGKTILDFLKSDGFANRNFMQLIHDDSLTFKEDIQKAQVSGQGDSLHEHIANLAGSPAIKKGILQTVKVVDELVKVMGRHKPENIVIEMARENQTTQKGQKNSRERMKRIEEGIKELGSQILKEHPVENTQLQNEKLYLYYLQNGRDMYVDQELDINRLSDYDVDHIVPQSFLKDDSIDNKVLTRSDKARGKSDNVPSEEVVKKMKNYWRQLLNAKLITQRKFDNLTKAERGGLSELDKAGFIKRQLVETRQITKHVAQILDSRMNTKYDENDKLIREVKVITLKSKLVSDFRKDFQFYKVREINNYHHAHDAYLNAVVGTALIKKYPKLESEFVYGDYKVYDVRKMIAKSEQEIGKATAKYFFYSNIMNFFKTEITLANGEIRKRPLIETNGETGEIVWDKGRDFATVRKVLSMPQVNIVKKTEVQTGGFSKESILPKRNSDKLIARKKDWDPKKYGGFDSPTVAYSVLVVAKVEKGKSKKLKSVKELLGITIMERSSFEKNPIDFLEAKGYKEVKKDLIIKLPKYSLFELENGRKRMLASAGELQKGNELALPSKYVNFLYLASHYEKLKGSPEDNEQKQLFVEQHKHYLDEIIEQISEFSKRVILADANLDKVLSAYNKHRDKPIREQAENIIHLFTLTNLGAPAAFKYFDTTIDRKRYTSTKEVLDATLIHQSITGLYETRIDLSQLGGDGGEAAAKGGSGGTLQLDDEYRLYSPLVKPDQNIQFWLEQFPQAWAETAGMGLAKQVPPQVIQLKASATPVSVRQYPLSKEAQEGIRPHVQRLIQQGILVPVQSPWNTPLLPVRKPGTNDYRPVQDLREVNKRVQDIHPTVPNPYNLLCALPPQRSWYTVLDLKDAFFCLRLHPTSQPLFAFEWRDPGTGRTGQLTWTRLPQGFKNSPTIFDEALHRDLANFRIQHPQVTLLQYVDDLLLAGATKQDCLEGTKALLLELSDLGYRASAKKAQICRREVTYLGYSLRDGQRWLTEARKKTVVQIPAPTTAKQVREFLGTAGFCRLWIPGFATLAAPLYPLTKEKGEFSWAPEHQKAFDAIKKALLSAPALALPDVTKPFTLYVDERKGVARGVLTQTLGPWRRPVAYLSKKLDPVASGWPVCLKAIAAVAILVKDADKLTLGQNITVIAPHALENIVRQPPDRWMTNARMTHYQSLLLTERVTFAPPAALNPATLLPEETDEPVTHDCHQLLIEETGVRKDLTDIPLTGEVLTWFTDGSSYVVEGKRMAGAAVVDGTRTIWASSLPEGTSAQKAELMALTQALRLAEGKSINIYTDSRYAFATAHVHGAIYKQRGLLTSAGREIKNKEEILSLLEALHLPKRLAIIHCPGHQKAKDPISRGNQMADRVAKQAAQGVNLLAGKRTADGSEFEKRTADGSEFESPKKKAKVE

SEQ ID NO: 6636 - protein, 2087 aa, synthetic construct; identical to SEQ ID NO: 6635

SEQ ID NO: 6637 - protein, 2084 aa, synthetic construct
MPAAKRVKLDGGDKKYSIGLDIGTNSVGWAVITDEYKVPSKKFKVLGNTDRHSIKKNLIGALLFDSGETAEATRLKRTARRRYTRRKNRICYLQEIFSNEMAKVDDSFFHRLEESFLVEEDKKHERHPIFGNIVDEVAYHEKYPTIYHLRKKLVDSTDKADLRLIYLALAHMIKFRGHFLIEGDLNPDNSDVDKLFIQLVQTYNQLFEENPINASGVDAKAILSARLSKSRRLENLIAQLPGEKKNGLFGNLIALSLGLTPNFKSNFDLAEDAKLQLSKDTYDDDLDNLLAQIGDQYADLFLAAKNLSDAILLSDILRVNTEITKAPLSASMIKRYDEHHQDLTLLKALVRQQLPEKYKEIFFDQSKNGYAGYIDGGASQEEFYKFIKPILEKMDGTEELLVKLNREDLLRKQRTFDNGSIPHQIHLGELHAILRRQEDFYPFLKDNREKIEKILTFRIPYYVGPLARGNSRFAWMTRKSEETITPWNFEEVVDKGASAQSFIERMTNFDKNLPNEKVLPKHSLLYEYFTVYNELTKVKYVTEGMRKPAFLSGEQKKAIVDLLFKTNRKVTVKQLKEDYFKKIECFDSVEISGVEDRFNASLGTYHDLLKIIKDKDFLDNEENEDILEDIVLTLTLFEDREMIEERLKTYAHLFDDKVMKQLKRRRYTGWGRLSRKLINGIRDKQSGKTILDFLKSDGFANRNFMQLIHDDSLTFKEDIQKAQVSGQGDSLHEHIANLAGSPAIKKGILQTVKVVDELVKVMGRHKPENIVIEMARENQTTQKGQKNSRERMKRIEEGIKELGSQILKEHPVENTQLQNEKLYLYYLQNGRDMYVDQELDINRLSDYDVDHIVPQSFLKDDSIDNKVLTRSDKARGKSDNVPSEEVVKKMKNYWRQLLNAKLITQRKFDNLTKAERGGLSELDKAGFIKRQLVETRQITKHVAQILDSRMNTKYDENDKLIREVKVITLKSKLVSDFRKDFQFYKVREINNYHHAHDAYLNAVVGTALIKKYPKLESEFVYGDYKVYDVRKMIAKSEQEIGKATAKYFFYSNIMNFFKTEITLANGEIRKRPLIETNGETGEIVWDKGRDFATVRKVLSMPQVNIVKKTEVQTGGFSKESILPKRNSDKLIARKKDWDPKKYGGFDSPTVAYSVLVVAKVEKGKSKKLKSVKELLGITIMERSSFEKNPIDFLEAKGYKEVKKDLIIKLPKYSLFELENGRKRMLASAGELQKGNELALPSKYVNFLYLASHYEKLKGSPEDNEQKQLFVEQHKHYLDEIIEQISEFSKRVILADANLDKVLSAYNKHRDKPIREQAENIIHLFTLTNLGAPAAFKYFDTTIDRKRYTSTKEVLDATLIHQSITGLYETRIDLSQLGGDGGEAAAKGGSGGIPWLMKKPLQLTTLVPLQEYEERLLKQTMLTGSYKEKLQSLFLKYDALWQHWENQVGHRRIKPHHIATGTVNPRPQKQYPINPKAKASIQTVINDLLKQGVLIQQNSIMNTPVYPVPKPDGKWRMVLDYREVNKTIPLIAAQNQHSAGILSSIFRGKYKTTLDLSNGFWAHSITPESYWLTAFTWLGQQYCWTRLPQGFLNSPALFNADVVDLLKEVPNVQVYVDDIYISHDDPREHLEQLEKVFSLLLNAGYVVSLKKSEIAQHEVEFLGFNITKEGRGLTETFKQKLLNITPPRDLKQLQSILGLLNFARNFIPNFSELVKPLYNIIATAPGKYITWTTDNSQQLQNIISMLNSAENLEERNPEVRLIMKVNTSPSAGYIRFYNEFAKRPIMYLNYVYTKAEVKFTNTEKLLTTIHKGLIKALDLGMGQEILVYSPIVSMTKIQKTPLPERKALPIRWITWMSYLEDPRIQFHYDKTLPELQQVPTVTDDIIAKIKHPSEFSMVFYTDGSAIKHPNVNKSHNAGMGIAQVQFKPEFTVINTWSIPLGDHTAQLAEVAAVEFACKKALKIDGPVLIVTDSFYVAESVNKELPYWQSNGFFNNKKKPLKHVSKWKSIADCIQLKPDIIIIHEKGHQPTASTFHTEGNNLADKLATQGSYVVNAGKRTADGSEFEKRTADGSEFESPKKKAKVE

SEQ ID NO: 6638 - protein, 2084 aa, synthetic construct
MPAAKRVKLDGGDKKYSIGLDIGTNSVGWAVITDEYKVPSKKFKVLGNTDRHSIKKNLIGALLFDSGETAEATRLKRTARRRYTRRKNRICYLQEIFSNEMAKVDDSFFHRLEESFLVEEDKKHERHPIFGNIVDEVAYHEKYPTIYHLRKKLVDSTDKADLRLIYLALAHMIKFRGHFLIEGDLNPDNSDVDKLFIQLVQTYNQLFEENPINASGVDAKAILSARLSKSRRLENLIAQLPGEKKNGLFGNLIALSLGLTPNFKSNFDLAEDAKLQLSKDTYDDDLDNLLAQIGDQYADLFLAAKNLSDAILLSDILRVNTEITKAPLSASMIKRYDEHHQDLTLLKALVRQQLPEKYKEIFFDQSKNGYAGYIDGGASQEEFYKFIKPILEKMDGTEELLVKLNREDLLRKQRTFDNGSIPHQIHLGELHAILRRQEDFYPFLKDNREKIEKILTFRIPYYVGPLARGNSRFAWMTRKSEETITPWNFEEVVDKGASAQSFIERMTNFDKNLPNEKVLPKHSLLYEYFTVYNELTKVKYVTEGMRKPAFLSGEQKKAIVDLLFKTNRKVTVKQLKEDYFKKIECFDSVEISGVEDRFNASLGTYHDLLKIIKDKDFLDNEENEDILEDIVLTLTLFEDREMIEERLKTYAHLFDDKVMKQLKRRRYTGWGRLSRKLINGIRDKQSGKTILDFLKSDGFANRNFMQLIHDDSLTFKEDIQKAQVSGQGDSLHEHIANLAGSPAIKKGILQTVKVVDELVKVMGRHKPENIVIEMARENQTTQKGQKNSRERMKRIEEGIKELGSQILKEHPVENTQLQNEKLYLYYLQNGRDMYVDQELDINRLSDYDVDHIVPQSFLKDDSIDNKVLTRSDKARGKSDNVPSEEVVKKMKNYWRQLLNAKLITQRKFDNLTKAERGGLSELDKAGFIKRQLVETRQITKHVAQILDSRMNTKYDENDKLIREVKVITLKSKLVSDFRKDFQFYKVREINNYHHAHDAYLNAVVGTALIKKYPKLESEFVYGDYKVYDVRKMIAKSEQEIGKATAKYFFYSNIMNFFKTEITLANGEIRKRPLIETNGETGEIVWDKGRDFATVRKVLSMPQVNIVKKTEVQTGGFSKESILPKRNSDKLIARKKDWDPKKYGGFDSPTVAYSVLVVAKVEKGKSKKLKSVKELLGITIMERSSFEKNPIDFLEAKGYKEVKKDLIIKLPKYSLFELENGRKRMLASAGELQKGNELALPSKYVNFLYLASHYEKLKGSPEDNEQKQLFVEQHKHYLDEIIEQISEFSKRVILADANLDKVLSAYNKHRDKPIREQAENIIHLFTLTNLGAPAAFKYFDTTIDRKRYTSTKEVLDATLIHQSITGLYETRIDLSQLGGDGGEAAAKGGSGGIPWLMKKPLQLTTLVPLQEYEERLLKQTMLTGSYKEKLQSLFLKYDALWQHWENQVGHRRIKPHHIATGTVNPRPQKQYPINPKAKASIQTVINDLLKQGVLIQQNSIMNTPVYPVPKPDGKWRMVLDYREVNKTIPLIAAQNQHSAGILSSIFRGKYKTTLDLSNGFWAHSITPESYWLTAFTWLGQQYCWTRLPQGFLNSPALFNADVVDLLKEVPNVQVYVDDIYISHDDPREHLEQLEKVFSLLLNAGYVVSLKKSEIAQHEVEFLGFNITKEGRGLTETFKQKLLNITPPRDLKQLQSILGKLNFARNFIPNFSELVKPLYNIIATAPGKYITWTTDNSQQLQNIISMLNSAENLEERNPEVRLIMKVNTSPSAGYIRFYNEFAKRPIMYLNYVYTKAEVKFTNTEKLLTTIHKGLIKALDLGMGQEILVYSPIVSMTKIQKTPLPERKALPIRWITWMSYLEDPRIQFHYDKTLPELQQVPTVTDDIIAKIKHPSEFSMVFYTDGSAIKHPNVNKSHNAGMGIAQVQFKPEFTVINTWSIPLGDHTAQLAEVAAVEFACKKALKIDGPVLIVTDSFYVAESVNKELPYWQSNGFFNNKKKPLKHVSKWKSIADCIQLKPDIIIIHEKGHQPTASTFHTEGNNLADKLATQGSYVVNAGKRTADGSEFEKRTADGSEFESPKKKAKVE

SEQ ID NO: 6639 - protein, 2093 aa, synthetic construct
MPAAKRVKLDGGDKKYSIGLDIGTNSVGWAVITDEYKVPSKKFKVLGNTDRHSIKKNLIGALLFDSGETAEATRLKRTARRRYTRRKNRICYLQEIFSNEMAKVDDSFFHRLEESFLVEEDKKHERHPIFGNIVDEVAYHEKYPTIYHLRKKLVDSTDKADLRLIYLALAHMIKFRGHFLIEGDLNPDNSDVDKLFIQLVQTYNQLFEENPINASGVDAKAILSARLSKSRRLENLIAQLPGEKKNGLFGNLIALSLGLTPNFKSNFDLAEDAKLQLSKDTYDDDLDNLLAQIGDQYADLFLAAKNLSDAILLSDILRVNTEITKAPLSASMIKRYDEHHQDLTLLKALVRQQLPEKYKEIFFDQSKNGYAGYIDGGASQEEFYKFIKPILEKMDGTEELLVKLNREDLLRKQRTFDNGSIPHQIHLGELHAILRRQEDFYPFLKDNREKIEKILTFRIPYYVGPLARGNSRFAWMTRKSEETITPWNFEEVVDKGASAQSFIERMTNFDKNLPNEKVLPKHSLLYEYFTVYNELTKVKYVTEGMRKPAFLSGEQKKAIVDLLFKTNRKVTVKQLKEDYFKKIECFDSVEISGVEDRFNASLGTYHDLLKIIKDKDFLDNEENEDILEDIVLTLTLFEDREMIEERLKTYAHLFDDKVMKQLKRRRYTGWGRLSRKLINGIRDKQSGKTILDFLKSDGFANRNFMQLIHDDSLTFKEDIQKAQVSGQGDSLHEHIANLAGSPAIKKGILQTVKVVDELVKVMGRHKPENIVIEMARENQTTQKGQKNSRERMKRIEEGIKELGSQILKEHPVENTQLQNEKLYLYYLQNGRDMYVDQELDINRLSDYDVDHIVPQSFLKDDSIDNKVLTRSDKARGKSDNVPSEEVVKKMKNYWRQLLNAKLITQRKFDNLTKAERGGLSELDKAGFIKRQLVETRQITKHVAQILDSRMNTKYDENDKLIREVKVITLKSKLVSDFRKDFQFYKVREINNYHHAHDAYLNAVVGTALIKKYPKLESEFVYGDYKVYDVRKMIAKSEQEIGKATAKYFFYSNIMNFFKTEITLANGEIRKRPLIETNGETGEIVWDKGRDFATVRKVLSMPQVNIVKKTEVQTGGFSKESILPKRNSDKLIARKKDWDPKKYGGFDSPTVAYSVLVVAKVEKGKSKKLKSVKELLGITIMERSSFEKNPIDFLEAKGYKEVKKDLIIKLPKYSLFELENGRKRMLASAGELQKGNELALPSKYVNFLYLASHYEKLKGSPEDNEQKQLFVEQHKHYLDEIIEQISEFSKRVILADANLDKVLSAYNKHRDKPIREQAENIIHLFTLTNLGAPAAFKYFDTTIDRKRYTSTKEVLDATLIHQSITGLYETRIDLSQLGGDGGEAAAKGGSGGTLNIEDEYRLHETSKEPDVPLGSTWLSDFPQAWAETGGMGLAVRQAPLIIPLKATSTPVSIKQYPMSQEARLGIKPHIQRLLDQGILVPCQSPWNTPLLPVKKPGTNDYRPVQDLREVNKRVEDIHPTVPNPYNLLSGLPPSHQWYTVLDLKDAFFCLRLHPTSQPLFAFEWRDPEMGISGQLTWTRLPQGFKNSPTLFNEALHRDLADFRIQHPDLILLQYVDDLLLAATSEQDCQRGTRALLQTLGNLGYRASAKKAQICQKQVKYLGYLLKEGQRWLTEARKETVMGQPTPKTPRQLREFLGTAGFCRLWIPGFAEMAAPLYPLTKPGTLFNWGPDQQKAYQEIKQALLTAPALGLPDLTKPFELFVDEKQGYAKGVLTQKLGPWRRPVAYLSKKLDPVAAGWPPCLRMVAAIAVLTKDAGKLTMGQPLVILAPHAVEALVKQPPDRWLSNARMTHYQAMLLDTDRVQFGPVVALNPATLLPLPEKEAPHDCLEILAETHGTRPDLTDQPIPDADYTWYTDGSSFLQEGQRRAGAAVTTETEVIWARALPAGTSAQRAELIALTQALKMAEGKKLNVYTDSRYAFATAHVHGEIYRRRGWLTSEGREIKNKNEILALLKALFLPKRLSIIHCPGHQKGNSAEARGNRMADQAAREAAMKAVLETSTLLAGKRTADGSEFEKRTADGSEFESPKKKAKVE

SEQ ID NO: 6640 - protein, 2097 aa, synthetic construct
MPAAKRVKLDGGDKKYSIGLDIGTNSVGWAVITDEYKVPSKKFKVLGNTDRHSIKKNLIGALLFDSGETAEATRLKRTARRRYTRRKNRICYLQEIFSNEMAKVDDSFFHRLEESFLVEEDKKHERHPIFGNIVDEVAYHEKYPTIYHLRKKLVDSTDKADLRLIYLALAHMIKFRGHFLIEGDLNPDNSDVDKLFIQLVQTYNQLFEENPINASGVDAKAILSARLSKSRRLENLIAQLPGEKKNGLFGNLIALSLGLTPNFKSNFDLAEDAKLQLSKDTYDDDLDNLLAQIGDQYADLFLAAKNLSDAILLSDILRVNTEITKAPLSASMIKRYDEHHQDLTLLKALVRQQLPEKYKEIFFDQSKNGYAGYIDGGASQEEFYKFIKPILEKMDGTEELLVKLNREDLLRKQRTFDNGSIPHQIHLGELHAILRRQEDFYPFLKDNREKIEKILTFRIPYYVGPLARGNSRFAWMTRKSEETITPWNFEEVVDKGASAQSFIERMTNFDKNLPNEKVLPKHSLLYEYFTVYNELTKVKYVTEGMRKPAFLSGEQKKAIVDLLFKTNRKVTVKQLKEDYFKKIECFDSVEISGVEDRFNASLGTYHDLLKIIKDKDFLDNEENEDILEDIVLTLTLFEDREMIEERLKTYAHLFDDKVMKQLKRRRYTGWGRLSRKLINGIRDKQSGKTILDFLKSDGFANRNFMQLIHDDSLTFKEDIQKAQVSGQGDSLHEHIANLAGSPAIKKGILQTVKVVDELVKVMGRHKPENIVIEMARENQTTQKGQKNSRERMKRIEEGIKELGSQILKEHPVENTQLQNEKLYLYYLQNGRDMYVDQELDINRLSDYDVDHIVPQSFLKDDSIDNKVLTRSDKARGKSDNVPSEEVVKKMKNYWRQLLNAKLITQRKFDNLTKAERGGLSELDKAGFIKRQLVETRQITKHVAQILDSRMNTKYDENDKLIREVKVITLKSKLVSDFRKDFQFYKVREINNYHHAHDAYLNAVVGTALIKKYPKLESEFVYGDYKVYDVRKMIAKSEQEIGKATAKYFFYSNIMNFFKTEITLANGEIRKRPLIETNGETGEIVWDKGRDFATVRKVLSMPQVNIVKKTEVQTGGFSKESILPKRNSDKLIARKKDWDPKKYGGFDSPTVAYSVLVVAKVEKGKSKKLKSVKELLGITIMERSSFEKNPIDFLEAKGYKEVKKDLIIKLPKYSLFELENGRKRMLASAGELQKGNELALPSKYVNFLYLASHYEKLKGSPEDNEQKQLFVEQHKHYLDEIIEQISEFSKRVILADANLDKVLSAYNKHRDKPIREQAENIIHLFTLTNLGAPAAFKYFDTTIDRKRYTSTKEVLDATLIHQSITGLYETRIDLSQLGGDGGGGSPAPGGTVSLQDEHRLFDIPVTTSLPDVWLQDFPQAWAETGGLGRAKCQAPIIIDLKPTAVPVSIKQYPMSLEAHMGIRQHIIKFLELGVLRPCRSPWNTPLLPVKKPGTQDYRPVQDLREINKRTVDIHPTVPNPYNLLSTLKPDYSWYTVLDLKDAFFCLPLAPQSQELFAFEWKDPERGISGQLTWTRLPQGFKNSPTLFNEALHRDLTDFRTQHPEVTLLQYVDDLLLAAPTKKACTQGTRHLLQELGEKGYRASAKKAQICQTKVTYLGYILSEGKRWLTPGRIETVARIPPPRNPREVREFLGTAGFCRLWIPGFAELAAPLYALTKPSTPFTWQTEHQLAFEALKKALLSAPALGLPDTSKPFTLFLDERQGIAKGVLTQKLGPWKRPVAYLSKKLDPVAAGWPPCLRIMAATAMLVKDSAKLTLGQPLTVITPHTLEAIVRQPPDRWITNARLTHYQALLLDTDRVQFGPPVTLNPATLLPVPENQPSPHDCRQVLAETHGTREDLKDQELPDADHTWYTDGSSYLDSGTRRAGAAVVDGHNTIWAQSLPPGTSAQKAELIALTKALELSKGKKANIYTDSRYAFATAHTHGSIYERRGWLTSEGKEIKNKAEIIALLKALFLPQEVAIIHCPGHQKGQDPVAVGNRQADRVARQAAMAEVLTLATEPDNTSHITAGKRTADGSEFEKRTADGSEFESPKKKAKVE

SEQ ID NO: 6641 - protein, 2168 aa, synthetic construct
MPAAKRVKLDGGDKKYSIGLDIGTNSVGWAVITDEYKVPSKKFKVLGNTDRHSIKKNLIGALLFDSGETAEATRLKRTARRRYTRRKNRICYLQEIFSNEMAKVDDSFFHRLEESFLVEEDKKHERHPIFGNIVDEVAYHEKYPTIYHLRKKLVDSTDKADLRLIYLALAHMIKFRGHFLIEGDLNPDNSDVDKLFIQLVQTYNQLFEENPINASGVDAKAILSARLSKSRRLENLIAQLPGEKKNGLFGNLIALSLGLTPNFKSNFDLAEDAKLQLSKDTYDDDLDNLLAQIGDQYADLFLAAKNLSDAILLSDILRVNTEITKAPLSASMIKRYDEHHQDLTLLKALVRQQLPEKYKEIFFDQSKNGYAGYIDGGASQEEFYKFIKPILEKMDGTEELLVKLNREDLLRKQRTFDNGSIPHQIHLGELHAILRRQEDFYPFLKDNREKIEKILTFRIPYYVGPLARGNSRFAWMTRKSEETITPWNFEEVVDKGASAQSFIERMTNFDKNLPNEKVLPKHSLLYEYFTVYNELTKVKYVTEGMRKPAFLSGEQKKAIVDLLFKTNRKVTVKQLKEDYFKKIECFDSVEISGVEDRFNASLGTYHDLLKIIKDKDFLDNEENEDILEDIVLTLTLFEDREMIEERLKTYAHLFDDKVMKQLKRRRYTGWGRLSRKLINGIRDKQSGKTILDFLKSDGFANRNFMQLIHDDSLTFKEDIQKAQVSGQGDSLHEHIANLAGSPAIKKGILQTVKVVDELVKVMGRHKPENIVIEMARENQTTQKGQKNSRERMKRIEEGIKELGSQILKEHPVENTQLQNEKLYLYYLQNGRDMYVDQELDINRLSDYDVDHIVPQSFLKDDSIDNKVLTRSDKARGKSDNVPSEEVVKKMKNYWRQLLNAKLITQRKFDNLTKAERGGLSELDKAGFIKRQLVETRQITKHVAQILDSRMNTKYDENDKLIREVKVITLKSKLVSDFRKDFQFYKVREINNYHHAHDAYLNAVVGTALIKKYPKLESEFVYGDYKVYDVRKMIAKSEQEIGKATAKYFFYSNIMNFFKTEITLANGEIRKRPLIETNGETGEIVWDKGRDFATVRKVLSMPQVNIVKKTEVQTGGFSKESILPKRNSDKLIARKKDWDPKKYGGFDSPTVAYSVLVVAKVEKGKSKKLKSVKELLGITIMERSSFEKNPIDFLEAKGYKEVKKDLIIKLPKYSLFELENGRKRMLASAGELQKGNELALPSKYVNFLYLASHYEKLKGSPEDNEQKQLFVEQHKHYLDEIIEQISEFSKRVILADANLDKVLSAYNKHRDKPIREQAENIIHLFTLTNLGAPAAFKYFDTTIDRKRYTSTKEVLDATLIHQSITGLYETRIDLSQLGGDGGGGSPAPGGMDLLKPLTVERKGVKIKGYWNSQADITCVPKDLLQGEEPVRQQNVTTIHGTQEGDVYYVNLKIDGRRINTEVIGTTLDYAIITPGDVPWILKKPLELTIKLDLEEQQGTLLNNSILSKKGKEELKQLFEKYSALWQSWENQVGHRRIRPHKIATGTVKPTPQKQYHINPKAKPDIQIVINDLLKQGVLIQKESTMNTPVYPVPKPNGRWRMVLDYRAVNKVTPLIAVQNQHSYGILGSLFKGRYKTTIDLSNGFWAHPIVPEDYWITAFTWQGKQYCWTVLPQGFLNSPGLFNGDVVDLLQGIPNVEVYVDDVYISHDSEKEHLEYLDILFNRLKEAGYIISLKKSNIANSIVDFLGFQITNEGRGLTDTFKEKLENITAPTTLKQLQSILGLLNFARNFIPDFTELIAPLYALIPKSPKNYVPWQIEHSTTLETLITKLNGAEYLQGRKGDKTLIMKVNASYTTGYIRYYNEGEKKPISYVSIVFSKTELKFTELEKLLTTVHKGLLKALDLSMGQNIHVYSPIVSMQNIQKTPQTAKKALASRWLSWLSYLEDPRIRFFYDPQMPALKDLPAVDTGKDNKKHPSNFQHIFYTDGSAITSPTKEGHLNAGMGIVYFINKDGNLQKQQEWSISLGNHTAQFAEIAAFEFALKKCLPLGGNILVVTDSNYVAKAYNEELDVWASNGFVNNRKKPLKHISKWKSVADLKRLRPDVVVTHEPGHQKLDSSPHAYGNNLADQLATQASFKVHAGKRTADGSEFEKRTADGSEFESPKKKAKVE

SEQ ID NO: 6642 - protein, 2090 aa, synthetic construct
MPAAKRVKLDGGDKKYSIGLDIGTNSVGWAVITDEYKVPSKKFKVLGNTDRHSIKKNLIGALLFDSGETAEATRLKRTARRRYTRRKNRICYLQEIFSNEMAKVDDSFFHRLEESFLVEEDKKHERHPIFGNIVDEVAYHEKYPTIYHLRKKLVDSTDKADLRLIYLALAHMIKFRGHFLIEGDLNPDNSDVDKLFIQLVQTYNQLFEENPINASGVDAKAILSARLSKSRRLENLIAQLPGEKKNGLFGNLIALSLGLTPNFKSNFDLAEDAKLQLSKDTYDDDLDNLLAQIGDQYADLFLAAKNLSDAILLSDILRVNTEITKAPLSASMIKRYDEHHQDLTLLKALVRQQLPEKYKEIFFDQSKNGYAGYIDGGASQEEFYKFIKPILEKMDGTEELLVKLNREDLLRKQRTFDNGSIPHQIHLGELHAILRRQEDFYPFLKDNREKIEKILTFRIPYYVGPLARGNSRFAWMTRKSEETITPWNFEEVVDKGASAQSFIERMTNFDKNLPNEKVLPKHSLLYEYFTVYNELTKVKYVTEGMRKPAFLSGEQKKAIVDLLFKTNRKVTVKQLKEDYFKKIECFDSVEISGVEDRFNASLGTYHDLLKIIKDKDFLDNEENEDILEDIVLTLTLFEDREMIEERLKTYAHLFDDKVMKQLKRRRYTGWGRLSRKLINGIRDKQSGKTILDFLKSDGFANRNFMQLIHDDSLTFKEDIQKAQVSGQGDSLHEHIANLAGSPAIKKGILQTVKVVDELVKVMGRHKPENIVIEMARENQTTQKGQKNSRERMKRIEEGIKELGSQILKEHPVENTQLQNEKLYLYYLQNGRDMYVDQELDINRLSDYDVDHIVPQSFLKDDSIDNKVLTRSDKARGKSDNVPSEEVVKKMKNYWRQLLNAKLITQRKFDNLTKAERGGLSELDKAGFIKRQLVETRQITKHVAQILDSRMNTKYDENDKLIREVKVITLKSKLVSDFRKDFQFYKVREINNYHHAHDAYLNAVVGTALIKKYPKLESEFVYGDYKVYDVRKMIAKSEQEIGKATAKYFFYSNIMNFFKTEITLANGEIRKRPLIETNGETGEIVWDKGRDFATVRKVLSMPQVNIVKKTEVQTGGFSKESILPKRNSDKLIARKKDWDPKKYGGFDSPTVAYSVLVVAKVEKGKSKKLKSVKELLGITIMERSSFEKNPIDFLEAKGYKEVKKDLIIKLPKYSLFELENGRKRMLASAGELQKGNELALPSKYVNFLYLASHYEKLKGSPEDNEQKQLFVEQHKHYLDEIIEQISEFSKRVILADANLDKVLSAYNKHRDKPIREQAENIIHLFTLTNLGAPAAFKYFDTTIDRKRYTSTKEVLDATLIHQSITGLYETRIDLSQLGGDGGGGSPAPGGTLQLEEEYRLFEPESTQKQEMDIWLKNFPQAWAETGGMGTAHCQAPVLIQLKATATPISIRQYPMPHEAYQGIKPHIRRMLDQGILKPCQSPWNTPLLPVKKPGTEDYRPVQDLREVNKRVEDIHPTVPNPYNLLSTLPPSHPWYTVLDLKDAFFCLRLHSESQLLFAFEWRDPEIGLSGQLTWTRLPQGFKNSPTLFNEALHSDLADFRVRYPALVLLQYVDDLLLAAATRTECLEGTKALLETLGNKGYRASAKKAQICLQEVTYLGYSLKDGQRWLTKARKEAILSIPVPKNSRQVREFLGKAGYCRLFIPGFAELAAPLYPLTRPGTLFQWGTEQQLAFEDIKKALLSSPALGLPDITKPFELFIDENSGFAKGVLVQKLGPWKRPVAYLSKKLDTVASGWPPCLRMVAAIAILVKDAGKLTLGQPLTILTSHPVEALVRQPPNKWLSNARMTHYQAMLLDAERVHFGPTVSLNPATLLPLPSGGNHHDCLQILAETHGTRPDLTDQPLPDADLTWYTDGSSFIRNGEREAGAAVTTESEVIWAAPLPPGTSAQRAELIALTQALKMAEGKKLTVYTDSRYAFATTHVHGEIYRRRGWLTSEGKEIKNKNEILALLEALFLPKRLSIIHCPGHQKGDSPQAKGNRLADDTAKKAATETHSSLTVLPAGKRTADGSEFEKRTADGSEFESPKKKAKVE

SEQ ID NO: 6643 - protein, 2171 aa, synthetic construct
MPAAKRVKLDGGDKKYSIGLDIGTNSVGWAVITDEYKVPSKKFKVLGNTDRHSIKKNLIGALLFDSGETAEATRLKRTARRRYTRRKNRICYLQEIFSNEMAKVDDSFFHRLEESFLVEEDKKHERHPIFGNIVDEVAYHEKYPTIYHLRKKLVDSTDKADLRLIYLALAHMIKFRGHFLIEGDLNPDNSDVDKLFIQLVQTYNQLFEENPINASGVDAKAILSARLSKSRRLENLIAQLPGEKKNGLFGNLIALSLGLTPNFKSNFDLAEDAKLQLSKDTYDDDLDNLLAQIGDQYADLFLAAKNLSDAILLSDILRVNTEITKAPLSASMIKRYDEHHQDLTLLKALVRQQLPEKYKEIFFDQSKNGYAGYIDGGASQEEFYKFIKPILEKMDGTEELLVKLNREDLLRKQRTFDNGSIPHQIHLGELHAILRRQEDFYPFLKDNREKIEKILTFRIPYYVGPLARGNSRFAWMTRKSEETITPWNFEEVVDKGASAQSFIERMTNFDKNLPNEKVLPKHSLLYEYFTVYNELTKVKYVTEGMRKPAFLSGEQKKAIVDLLFKTNRKVTVKQLKEDYFKKIECFDSVEISGVEDRFNASLGTYHDLLKIIKDKDFLDNEENEDILEDIVLTLTLFEDREMIEERLKTYAHLFDDKVMKQLKRRRYTGWGRLSRKLINGIRDKQSGKTILDFLKSDGFANRNFMQLIHDDSLTFKEDIQKAQVSGQGDSLHEHIANLAGSPAIKKGILQTVKVVDELVKVMGRHKPENIVIEMARENQTTQKGQKNSRERMKRIEEGIKELGSQILKEHPVENTQLQNEKLYLYYLQNGRDMYVDQELDINRLSDYDVDHIVPQSFLKDDSIDNKVLTRSDKARGKSDNVPSEEVVKKMKNYWRQLLNAKLITQRKFDNLTKAERGGLSELDKAGFIKRQLVETRQITKHVAQILDSRMNTKYDENDKLIREVKVITLKSKLVSDFRKDFQFYKVREINNYHHAHDAYLNAVVGTALIKKYPKLESEFVYGDYKVYDVRKMIAKSEQEIGKATAKYFFYSNIMNFFKTEITLANGEIRKRPLIETNGETGEIVWDKGRDFATVRKVLSMPQVNIVKKTEVQTGGFSKESILPKRNSDKLIARKKDWDPKKYGGFDSPTVAYSVLVVAKVEKGKSKKLKSVKELLGITIMERSSFEKNPIDFLEAKGYKEVKKDLIIKLPKYSLFELENGRKRMLASAGELQKGNELALPSKYVNFLYLASHYEKLKGSPEDNEQKQLFVEQHKHYLDEIIEQISEFSKRVILADANLDKVLSAYNKHRDKPIREQAENIIHLFTLTNLGAPAAFKYFDTTIDRKRYTSTKEVLDATLIHQSITGLYETRIDLSQLGGDGGGGSPAPGGMNPLQLLQPLPAEIKGTKLLAHWNSGATITCIPESFLEDEQPIKKTLIKTIHGEKQQNVYYVTFKVKGRKVEAEVIASPYEYILLSPTDVPWLTQQPLQLTILVPLQEYQEKILSKTALPEDQKQQLKTLFVKYDNLWQHWENQVGHRKIRPHNIATGDYPPRPQKQYPINPKAKPSIQIVIDDLLKQGVLTPQNSTMNTPVYPVPKPDGRWRMVLDYREVNKTIPLTAAQNQHSAGILATIVRQKYKTTLDLANGFWAHPITPESYWLTAFTWQGKQYCWTRLPQGFLNSPALFNADVVDLLKEIPNVQVYVDDIYLSHDDPKEHVQQLEKVFQILLQAGYVVSLKKSEIGQKTVEFLGFNITKEGRGLTDTFKTKLLNITPPKDLKQLQSILGKLNFARNFIPNFAELVQPLYNLIAPAKGKYIEWSEENTKQLNMVIEALNTASNLEERLPEQRLVIKVNTSPSAGYVRYYNETGKKPIMYLNYVFSKAELKFSMLEKLLTTMHKALIKAMDLAMGQEILVYSPIVSMTKIQKTPLPERKALPIRWITWMTYLEDPRIQFHYDKTLPELKHIPDVYTSSQSPVKHPSQYEGVFYTDGSAIKSPDPTKSNNAGMGIVHATYKPEYQVLNQWSIPLGNHTAQMAEIAAVEFACKKALKIPGPVLVITDSFYVAESANKELPYWKSNGFVNNKKKPLKHISKWKSIAECLSMKPDITIQHEKGISLQIPVFILKGNALADKLATQGSYVVNAGKRTADGSEFEKRTADGSEFESPKKKAKVE

SEQ ID NO: 6644 - protein, 2089 aa, synthetic construct
MPAAKRVKLDGGDKKYSIGLDIGTNSVGWAVITDEYKVPSKKFKVLGNTDRHSIKKNLIGALLFDSGETAEATRLKRTARRRYTRRKNRICYLQEIFSNEMAKVDDSFFHRLEESFLVEEDKKHERHPIFGNIVDEVAYHEKYPTIYHLRKKLVDSTDKADLRLIYLALAHMIKFRGHFLIEGDLNPDNSDVDKLFIQLVQTYNQLFEENPINASGVDAKAILSARLSKSRRLENLIAQLPGEKKNGLFGNLIALSLGLTPNFKSNFDLAEDAKLQLSKDTYDDDLDNLLAQIGDQYADLFLAAKNLSDAILLSDILRVNTEITKAPLSASMIKRYDEHHQDLTLLKALVRQQLPEKYKEIFFDQSKNGYAGYIDGGASQEEFYKFIKPILEKMDGTEELLVKLNREDLLRKQRTFDNGSIPHQIHLGELHAILRRQEDFYPFLKDNREKIEKILTFRIPYYVGPLARGNSRFAWMTRKSEETITPWNFEEVVDKGASAQSFIERMTNFDKNLPNEKVLPKHSLLYEYFTVYNELTKVKYVTEGMRKPAFLSGEQKKAIVDLLFKTNRKVTVKQLKEDYFKKIECFDSVEISGVEDRFNASLGTYHDLLKIIKDKDFLDNEENEDILEDIVLTLTLFEDREMIEERLKTYAHLFDDKVMKQLKRRRYTGWGRLSRKLINGIRDKQSGKTILDFLKSDGFANRNFMQLIHDDSLTFKEDIQKAQVSGQGDSLHEHIANLAGSPAIKKGILQTVKVVDELVKVMGRHKPENIVIEMARENQTTQKGQKNSRERMKRIEEGIKELGSQILKEHPVENTQLQNEKLYLYYLQNGRDMYVDQELDINRLSDYDVDHIVPQSFLKDDSIDNKVLTRSDKARGKSDNVPSEEVVKKMKNYWRQLLNAKLITQRKFDNLTKAERGGLSELDKAGFIKRQLVETRQITKHVAQILDSRMNTKYDENDKLIREVKVITLKSKLVSDFRKDFQFYKVREINNYHHAHDAYLNAVVGTALIKKYPKLESEFVYGDYKVYDVRKMIAKSEQEIGKATAKYFFYSNIMNFFKTEITLANGEIRKRPLIETNGETGEIVWDKGRDFATVRKVLSMPQVNIVKKTEVQTGGFSKESILPKRNSDKLIARKKDWDPKKYGGFDSPTVAYSVLVVAKVEKGKSKKLKSVKELLGITIMERSSFEKNPIDFLEAKGYKEVKKDLIIKLPKYSLFELENGRKRMLASAGELQKGNELALPSKYVNFLYLASHYEKLKGSPEDNEQKQLFVEQHKHYLDEIIEQISEFSKRVILADANLDKVLSAYNKHRDKPIREQAENIIHLFTLTNLGAPAAFKYFDTTIDRKRYTSTKEVLDATLIHQSITGLYETRIDLSQLGGDGGGGSPAPGGVLNLEEEYRLHEKPVPSSIDPSWLQLFPTVWAERAGMGLANQVPPVVVELRSGASPVAVRQYPMSKEAREGIRPHIQKFLDLGVLVPCRSPWNTPLLPVKKPGTNDYRPVQDLREINKRVQDIHPTVPNPYNLLSSLPPSYTWYSVLDLKDAFFCLRLHPNSQPLFAFEWKDPEKGNTGQLTWTRLPQGFKNSPTLFNEALHRDLAPFRALNPQVVLLQYVDDLLVAAPTYEDCKKGTQKLLQELSKLGYRVSAKKAQLCQREVTYLGYLLKEGKRWLTPARKATVMKIPVPTTPRQVREFLGTAGFCRLWIPGFASLAAPLYPLTKPSIPFIWTEEHQQAFDHIKKALLSAPALALPDLTKPFTLYIDERAGVARGVLTQTLGPWRRPVAYLSKKLDPVASGWPTCLKAVAAVALLLKDADKLTLGQNVTVIASHSLESIVRQPPDRWMTNARMTHYQSLLLNERVSFAPPAVLNPATLLPVESEATPVHRCSEILAEETGTRRDLEDQPLPGVPTWYTDGSSFITEGKRRAGAPIVDGKRTVWASSLPEGTSAQKAELVALTQALRLAEGKNINIYTDSRYAFATAHIHGAIYKQRGWLTSAGKDIKNKEEILALLEAIHLPRRVAIIHCPGHQRGSNPVATGNRRADEAAKQAALSTRVLAGTTKPAGKRTADGSEFEKRTADGSEFESPKKKAKVE

SEQ ID NO: 6645 - protein, 2213 aa, synthetic construct
MPAAKRVKLDGGDKKYSIGLDIGTNSVGWAVITDEYKVPSKKFKVLGNTDRHSIKKNLIGALLFDSGETAEATRLKRTARRRYTRRKNRICYLQEIFSNEMAKVDDSFFHRLEESFLVEEDKKHERHPIFGNIVDEVAYHEKYPTIYHLRKKLVDSTDKADLRLIYLALAHMIKFRGHFLIEGDLNPDNSDVDKLFIQLVQTYNQLFEENPINASGVDAKAILSARLSKSRRLENLIAQLPGEKKNGLFGNLIALSLGLTPNFKSNFDLAEDAKLQLSKDTYDDDLDNLLAQIGDQYADLFLAAKNLSDAILLSDILRVNTEITKAPLSASMIKRYDEHHQDLTLLKALVRQQLPEKYKEIFFDQSKNGYAGYIDGGASQEEFYKFIKPILEKMDGTEELLVKLNREDLLRKQRTFDNGSIPHQIHLGELHAILRRQEDFYPFLKDNREKIEKILTFRIPYYVGPLARGNSRFAWMTRKSEETITPWNFEEVVDKGASAQSFIERMTNFDKNLPNEKVLPKHSLLYEYFTVYNELTKVKYVTEGMRKPAFLSGEQKKAIVDLLFKTNRKVTVKQLKEDYFKKIECFDSVEISGVEDRFNASLGTYHDLLKIIKDKDFLDNEENEDILEDIVLTLTLFEDREMIEERLKTYAHLFDDKVMKQLKRRRYTGWGRLSRKLINGIRDKQSGKTILDFLKSDGFANRNFMQLIHDDSLTFKEDIQKAQVSGQGDSLHEHIANLAGSPAIKKGILQTVKVVDELVKVMGRHKPENIVIEMARENQTTQKGQKNSRERMKRIEEGIKELGSQILKEHPVENTQLQNEKLYLYYLQNGRDMYVDQELDINRLSDYDVDHIVPQSFLKDDSIDNKVLTRSDKARGKSDNVPSEEVVKKMKNYWRQLLNAKLITQRKFDNLTKAERGGLSELDKAGFIKRQLVETRQITKHVAQILDSRMNTKYDENDKLIREVKVITLKSKLVSDFRKDFQFYKVREINNYHHAHDAYLNAVVGTALIKKYPKLESEFVYGDYKVYDVRKMIAKSEQEIGKATAKYFFYSNIMNFFKTEITLANGEIRKRPLIETNGETGEIVWDKGRDFATVRKVLSMPQVNIVKKTEVQTGGFSKESILPKRNSDKLIARKKDWDPKKYGGFDSPTVAYSVLVVAKVEKGKSKKLKSVKELLGITIMERSSFEKNPIDFLEAKGYKEVKKDLIIKLPKYSLFELENGRKRMLASAGELQKGNELALPSKYVNFLYLASHYEKLKGSPEDNEQKQLFVEQHKHYLDEIIEQISEFSKRVILADANLDKVLSAYNKHRDKPIREQAENIIHLFTLTNLGAPAAFKYFDTTIDRKRYTSTKEVLDATLIHQSITGLYETRIDLSQLGGDGGGGSPAPGGTLGDQGSRGSDPLPEPRVTLTVEGIPTEFLVNTGAEHSVLTKPMGKMGSKRTVVAGATGSKVYPWTTKRLLKIGQKQVTHSFLVIPECPAPLLGRDLLTKLKAQIQFSTEGPQVTWEDRPAMCLVLNLEEEYRLHEKPVPPSIDPSWLQLFPMVWAEKAGMGLANQVPPVVVELKSDASPVAVRQYPMSKEAREGIRPHIQRFLDLGILVPCQSPWNTPLLPVKKPGTNDYRPVQDLREVNKRVQDIHPTVPNPYNLLSSLPPSHTWYSVLDLKDAFFCLKLHPNSQPLFAFEWRDPEKGNTGQLTWTRLPQGFKNSPTLFNEALHRDLASFRALNPQVVMLQYVDDLLVAAPTYRDCKEGTRRLLQELSKLGYRVSAKKAQLCREEVTYLGYLLKGGKRWLTPARKATVMKIPTPTTPRQVREFLGTAGFCRLWIPGFASLAAPLYPLTRPKVPFTWTEAHQEAFGRIKEALLSAPALALPDLTKPFALYVDEKEGVARGVLTQTLGPWRRPVAYLSKKLDPVASGWPTCLKAIAAVALLLKDADKLTLGQNVLVIAPHNLESIVRQPPDRWMTNARMTHYQSLLLNERVSFAPPAILNPATLLPVESDDTPIHICSEILAEETGTRPDLRDQPLPGVPAWYTDGSSFIMDGRRQAGAAIVDNKRTVWASNLPEGTSAQKAELIALTQALRLAEGKSINIYTDSRYAFATAHVHGAIYKQRGWLTSAGKDIKNKEEILALLEAIHLPKRVAIIHCPGHQRGTDPVATGNRKADEAAKQAAQSTRILTETTKNAGKRTADGSEFEKRTADGSEFESPKKKAKVE

SEQ ID NO: 6646 - protein, 2213 aa, synthetic construct
MPAAKRVKLDGGDKKYSIGLDIGTNSVGWAVITDEYKVPSKKFKVLGNTDRHSIKKNLIGALLFDSGETAEATRLKRTARRRYTRRKNRICYLQEIFSNEMAKVDDSFFHRLEESFLVEEDKKHERHPIFGNIVDEVAYHEKYPTIYHLRKKLVDSTDKADLRLIYLALAHMIKFRGHFLIEGDLNPDNSDVDKLFIQLVQTYNQLFEENPINASGVDAKAILSARLSKSRRLENLIAQLPGEKKNGLFGNLIALSLGLTPNFKSNFDLAEDAKLQLSKDTYDDDLDNLLAQIGDQYADLFLAAKNLSDAILLSDILRVNTEITKAPLSASMIKRYDEHHQDLTLLKALVRQQLPEKYKEIFFDQSKNGYAGYIDGGASQEEFYKFIKPILEKMDGTEELLVKLNREDLLRKQRTFDNGSIPHQIHLGELHAILRRQEDFYPFLKDNREKIEKILTFRIPYYVGPLARGNSRFAWMTRKSEETITPWNFEEVVDKGASAQSFIERMTNFDKNLPNEKVLPKHSLLYEYFTVYNELTKVKYVTEGMRKPAFLSGEQKKAIVDLLFKTNRKVTVKQLKEDYFKKIECFDSVEISGVEDRFNASLGTYHDLLKIIKDKDFLDNEENEDILEDIVLTLTLFEDREMIEERLKTYAHLFDDKVMKQLKRRRYTGWGRLSRKLINGIRDKQSGKTILDFLKSDGFANRNFMQLIHDDSLTFKEDIQKAQVSGQGDSLHEHIANLAGSPAIKKGILQTVKVVDELVKVMGRHKPENIVIEMARENQTTQKGQKNSRERMKRIEEGIKELGSQILKEHPVENTQLQNEKLYLYYLQNGRDMYVDQELDINRLSDYDVDHIVPQSFLKDDSIDNKVLTRSDKARGKSDNVPSEEVVKKMKNYWRQLLNAKLITQRKFDNLTKAERGGLSELDKAGFIKRQLVETRQITKHVAQILDSRMNTKYDENDKLIREVKVITLKSKLVSDFRKDFQFYKVREINNYHHAHDAYLNAVVGTALIKKYPKLESEFVYGDYKVYDVRKMIAKSEQEIGKATAKYFFYSNIMNFFKTEITLANGEIRKRPLIETNGETGEIVWDKGRDFATVRKVLSMPQVNIVKKTEVQTGGFSKESILPKRNSDKLIARKKDWDPKKYGGFDSPTVAYSVLVVAKVEKGKSKKLKSVKELLGITIMERSSFEKNPIDFLEAKGYKEVKKDLIIKLPKYSLFELENGRKRMLASAGELQKGNELALPSKYVNFLYLASHYEKLKGSPEDNEQKQLFVEQHKHYLDEIIEQISEFSKRVILADANLDKVLSAYNKHRDKPIREQAENIIHLFTLTNLGAPAAFKYFDTTIDRKRYTSTKEVLDATLIHQSITGLYETRIDLSQLGGDGGGGSPAPGGTLGDQGSRGSDPLPEPRVTLTVEGIPTEFLVNTGAEHSVLTKPMGKMGSKRTVVAGATGSKVYPWTTKRLLKIGQKQVTHSFLVIPECPAPLLGRDLLTKLKAQIQFSTEGPQVTWEDRPAMCLVLNLEEEYRLHEKPVPPSIDPSWLQLFPMVWAEKAGMGLANQVPPVVVELKSDASPVAVRQYPMSKEAREGIRPHIQRFLDLGILVPCQSPWNTPLLPVKKPGTNDYRPVQDLREVNKRVQDIHPTVPNPYNLLSSLPPSHTWYSVLDLKDAFFCLKLHPNSQPLFAFEWRDPEKGNTGQLTWTRLPQGFKNSPTLFNEALHRDLASFRALNPQVVMLQYVDDLLVAAPTYRDCKEGTRRLLQELSKLGYRVSAKKAQLCREEVTYLGYLLKGGKRWLTPARKATVMKIPTPTTPRQVREFLGKAGFCRLFIPGFASLAAPLYPLTRPKVPFTWTEAHQEAFGRIKEALLSAPALALPDLTKPFALYVDEKEGVARGVLTQTLGPWRRPVAYLSKKLDPVASGWPTCLKAIAAVALLLKDADKLTLGQNVLVIAPHNLESIVRQPPDRWMTNARMTHYQSLLLNERVSFAPPAILNPATLLPVESDDTPIHICSEILAEETGTRPDLRDQPLPGVPAWYTDGSSFIMDGRRQAGAAIVDNKRTVWASNLPEGTSAQKAELIALTQALRLAEGKSINIYTDSRYAFATAHVHGAIYKQRGWLTSAGKDIKNKEEILALLEAIHLPKRVAIIHCPGHQRGTDPVATGNRKADEAAKQAAQSTRILTETTKNAGKRTADGSEFEKRTADGSEFESPKKKAKVE

SEQ ID NO: 6647 - protein, 2091 aa, synthetic construct
MPAAKRVKLDGGDKKYSIGLDIGTNSVGWAVITDEYKVPSKKFKVLGNTDRHSIKKNLIGALLFDSGETAEATRLKRTARRRYTRRKNRICYLQEIFSNEMAKVDDSFFHRLEESFLVEEDKKHERHPIFGNIVDEVAYHEKYPTIYHLRKKLVDSTDKADLRLIYLALAHMIKFRGHFLIEGDLNPDNSDVDKLFIQLVQTYNQLFEENPINASGVDAKAILSARLSKSRRLENLIAQLPGEKKNGLFGNLIALSLGLTPNFKSNFDLAEDAKLQLSKDTYDDDLDNLLAQIGDQYADLFLAAKNLSDAILLSDILRVNTEITKAPLSASMIKRYDEHHQDLTLLKALVRQQLPEKYKEIFFDQSKNGYAGYIDGGASQEEFYKFIKPILEKMDGTEELLVKLNREDLLRKQRTFDNGSIPHQIHLGELHAILRRQEDFYPFLKDNREKIEKILTFRIPYYVGPLARGNSRFAWMTRKSEETITPWNFEEVVDKGASAQSFIERMTNFDKNLPNEKVLPKHSLLYEYFTVYNELTKVKYVTEGMRKPAFLSGEQKKAIVDLLFKTNRKVTVKQLKEDYFKKIECFDSVEISGVEDRFNASLGTYHDLLKIIKDKDFLDNEENEDILEDIVLTLTLFEDREMIEERLKTYAHLFDDKVMKQLKRRRYTGWGRLSRKLINGIRDKQSGKTILDFLKSDGFANRNFMQLIHDDSLTFKEDIQKAQVSGQGDSLHEHIANLAGSPAIKKGILQTVKVVDELVKVMGRHKPENIVIEMARENQTTQKGQKNSRERMKRIEEGIKELGSQILKEHPVENTQLQNEKLYLYYLQNGRDMYVDQELDINRLSDYDVDHIVPQSFLKDDSIDNKVLTRSDKARGKSDNVPSEEVVKKMKNYWRQLLNAKLITQRKFDNLTKAERGGLSELDKAGFIKRQLVETRQITKHVAQILDSRMNTKYDENDKLIREVKVITLKSKLVSDFRKDFQFYKVREINNYHHAHDAYLNAVVGTALIKKYPKLESEFVYGDYKVYDVRKMIAKSEQEIGKATAKYFFYSNIMNFFKTEITLANGEIRKRPLIETNGETGEIVWDKGRDFATVRKVLSMPQVNIVKKTEVQTGGFSKESILPKRNSDKLIARKKDWDPKKYGGFDSPTVAYSVLVVAKVEKGKSKKLKSVKELLGITIMERSSFEKNPIDFLEAKGYKEVKKDLIIKLPKYSLFELENGRKRMLASAGELQKGNELALPSKYVNFLYLASHYEKLKGSPEDNEQKQLFVEQHKHYLDEIIEQISEFSKRVILADANLDKVLSAYNKHRDKPIREQAENIIHLFTLTNLGAPAAFKYFDTTIDRKRYTSTKEVLDATLIHQSITGLYETRIDLSQLGGDGGGGSPAPGGTLNIEDEYRLHETSKEPDVSLGSTWLSDFPQAWAETGGMGLAVRQAPLIIPLKATSTPVSIKQYPMSQEARLGIKPHIQRLLDQGILVPCQSPWNTPLLPVKKPGTNDYRPVQDLREVNKRVEDIHPTVPNPYNLLSGLPPSHQWYTVLDLKDAFFCLRLHPTSQPLFAFEWRDPEMGISGQLTWTRLPQGFKNSPTLFNEALHRDLAGFRIQHPDLILLQYVDDLLLAATSELDCQQGTRALLQTLGDLGYRASAKKAQICQKQVKYLGYLLKEGQRWLTEARKETVMGQPIPKTPRQLREFLGTAGFCRLWIPGFAEMAAPLYPLTKPGTLFNWGPDQQKAFQEIKQALLTAPALGLPDLTKPFELFVDEKQGYAKGVLTQKLGPWRRPVAYLSKKLDPVAAGWPPCLRMVAAIAVLTKDAGKLTMGQPLVILAPHAVEALVKQPPDRWLSNARMTHYQALLLDTDRVQFGPVVALNPATLLPLPEEGLQHDCLDILAEAHGTRSDLMDQPLPDADHTWYTDGSSFLQEGQRKAGAAVTTETEVIWARALPAGTSAQRAELIALTQALKMAEGKKLNVYTDSRYAFATAHIHGEIYRRRGWLTSEGKEIKNKDEILALLKALFLPKRLSIIHCPGHQKGNSAEARGNRMADQAAREVATRETPETSTLLAGKRTADGSEFEKRTADGSEFESPKKKAKVE

SEQ ID NO: 6648 - protein, 2091 aa, synthetic construct
MPAAKRVKLDGGDKKYSIGLDIGTNSVGWAVITDEYKVPSKKFKVLGNTDRHSIKKNLIGALLFDSGETAEATRLKRTARRRYTRRKNRICYLQEIFSNEMAKVDDSFFHRLEESFLVEEDKKHERHPIFGNIVDEVAYHEKYPTIYHLRKKLVDSTDKADLRLIYLALAHMIKFRGHFLIEGDLNPDNSDVDKLFIQLVQTYNQLFEENPINASGVDAKAILSARLSKSRRLENLIAQLPGEKKNGLFGNLIALSLGLTPNFKSNFDLAEDAKLQLSKDTYDDDLDNLLAQIGDQYADLFLAAKNLSDAILLSDILRVNTEITKAPLSASMIKRYDEHHQDLTLLKALVRQQLPEKYKEIFFDQSKNGYAGYIDGGASQEEFYKFIKPILEKMDGTEELLVKLNREDLLRKQRTFDNGSIPHQIHLGELHAILRRQEDFYPFLKDNREKIEKILTFRIPYYVGPLARGNSRFAWMTRKSEETITPWNFEEVVDKGASAQSFIERMTNFDKNLPNEKVLPKHSLLYEYFTVYNELTKVKYVTEGMRKPAFLSGEQKKAIVDLLFKTNRKVTVKQLKEDYFKKIECFDSVEISGVEDRFNASLGTYHDLLKIIKDKDFLDNEENEDILEDIVLTLTLFEDREMIEERLKTYAHLFDDKVMKQLKRRRYTGWGRLSRKLINGIRDKQSGKTILDFLKSDGFANRNFMQLIHDDSLTFKEDIQKAQVSGQGDSLHEHIANLAGSPAIKKGILQTVKVVDELVKVMGRHKPENIVIEMARENQTTQKGQKNSRERMKRIEEGIKELGSQILKEHPVENTQLQNEKLYLYYLQNGRDMYVDQELDINRLSDYDVDHIVPQSFLKDDSIDNKVLTRSDKARGKSDNVPSEEVVKKMKNYWRQLLNAKLITQRKFDNLTKAERGGLSELDKAGFIKRQLVETRQITKHVAQILDSRMNTKYDENDKLIREVKVITLKSKLVSDFRKDFQFYKVREINNYHHAHDAYLNAVVGTALIKKYPKLESEFVYGDYKVYDVRKMIAKSEQEIGKATAKYFFYSNIMNFFKTEITLANGEIRKRPLIETNGETGEIVWDKGRDFATVRKVLSMPQVNIVKKTEVQTGGFSKESILPKRNSDKLIARKKDWDPKKYGGFDSPTVAYSVLVVAKVEKGKSKKLKSVKELLGITIMERSSFEKNPIDFLEAKGYKEVKKDLIIKLPKYSLFELENGRKRMLASAGELQKGNELALPSKYVNFLYLASHYEKLKGSPEDNEQKQLFVEQHKHYLDEIIEQISEFSKRVILADANLDKVLSAYNKHRDKPIREQAENIIHLFTLTNLGAPAAFKYFDTTIDRKRYTSTKEVLDATLIHQSITGLYETRIDLSQLGGDGGGGSPAPGGTLNIEDEYRLHETSKGPDVPLGSTWLSDFPQAWAETGGMGLAVRQAPLIIPLKATSTPVSIKQYPMSQEARLGIKPHIQRLLDQGILVPCQSPWNTPLLPVKKPGTNDYRPVQDLREVNKRVEDIHPTVPNPYNLLSGLPPSHQWYTVLDLKDAFFCLRLHPTSQSLFAFEWRDPEMGISGQLTWTRLPQGFKNSPTLFNEALHRDLADFRIQHPDLILLQYVDDLLLAATSELDCQQGTRALLQTLGDLGYRASAKKAQICQKQVKYLGYLLKEGQRWLTEARKETVMGQPTPKTPRQLREFLGKAGFCRLFIPGFAEMAAPLYPLTKPGTLFEWGPDQQKAYQEIKQALLTAPALGLPDLTKPFELFVDEKQGYAKGVLTQKLGPWRRPVAYLSKKLDPVAAGWPPCLRMVAAIAVLTKDAGKLTMGQPLVILAPHAVEALVKQPPDRWLSNARMTHYQALLLDTDRVQFGPIVALNPATLLPLPEEGLQHDCLDILAEAHGTRPDLTDQPLPDADHTWYTDGSSFLQEGQRKAGAAVTTETEVVWAKALPAGTSAQRAELIALTQALKMAEGKKLNVYTDSRYAFATAHIHGEIYRRRGWLTSEGKEIKNKDEILALLKALFLPKRLSIIHCPGHQKGNRAEARGNRMADQAAREVATRETPETSTLLAGKRTADGSEFEKRTADGSEFESPKKKAKVE

SEQ ID NO: 6649 - protein, 2082 aa, synthetic construct
MPAAKRVKLDGGDKKYSIGLDIGTNSVGWAVITDEYKVPSKKFKVLGNTDRHSIKKNLIGALLFDSGETAEATRLKRTARRRYTRRKNRICYLQEIFSNEMAKVDDSFFHRLEESFLVEEDKKHERHPIFGNIVDEVAYHEKYPTIYHLRKKLVDSTDKADLRLIYLALAHMIKFRGHFLIEGDLNPDNSDVDKLFIQLVQTYNQLFEENPINASGVDAKAILSARLSKSRRLENLIAQLPGEKKNGLFGNLIALSLGLTPNFKSNFDLAEDAKLQLSKDTYDDDLDNLLAQIGDQYADLFLAAKNLSDAILLSDILRVNTEITKAPLSASMIKRYDEHHQDLTLLKALVRQQLPEKYKEIFFDQSKNGYAGYIDGGASQEEFYKFIKPILEKMDGTEELLVKLNREDLLRKQRTFDNGSIPHQIHLGELHAILRRQEDFYPFLKDNREKIEKILTFRIPYYVGPLARGNSRFAWMTRKSEETITPWNFEEVVDKGASAQSFIERMTNFDKNLPNEKVLPKHSLLYEYFTVYNELTKVKYVTEGMRKPAFLSGEQKKAIVDLLFKTNRKVTVKQLKEDYFKKIECFDSVEISGVEDRFNASLGTYHDLLKIIKDKDFLDNEENEDILEDIVLTLTLFEDREMIEERLKTYAHLFDDKVMKQLKRRRYTGWGRLSRKLINGIRDKQSGKTILDFLKSDGFANRNFMQLIHDDSLTFKEDIQKAQVSGQGDSLHEHIANLAGSPAIKKGILQTVKVVDELVKVMGRHKPENIVIEMARENQTTQKGQKNSRERMKRIEEGIKELGSQILKEHPVENTQLQNEKLYLYYLQNGRDMYVDQELDINRLSDYDVDHIVPQSFLKDDSIDNKVLTRSDKARGKSDNVPSEEVVKKMKNYWRQLLNAKLITQRKFDNLTKAERGGLSELDKAGFIKRQLVETRQITKHVAQILDSRMNTKYDENDKLIREVKVITLKSKLVSDFRKDFQFYKVREINNYHHAHDAYLNAVVGTALIKKYPKLESEFVYGDYKVYDVRKMIAKSEQEIGKATAKYFFYSNIMNFFKTEITLANGEIRKRPLIETNGETGEIVWDKGRDFATVRKVLSMPQVNIVKKTEVQTGGFSKESILPKRNSDKLIARKKDWDPKKYGGFDSPTVAYSVLVVAKVEKGKSKKLKSVKELLGITIMERSSFEKNPIDFLEAKGYKEVKKDLIIKLPKYSLFELENGRKRMLASAGELQKGNELALPSKYVNFLYLASHYEKLKGSPEDNEQKQLFVEQHKHYLDEIIEQISEFSKRVILADANLDKVLSAYNKHRDKPIREQAENIIHLFTLTNLGAPAAFKYFDTTIDRKRYTSTKEVLDATLIHQSITGLYETRIDLSQLGGDGGGGSPAPGGIPWLMKKPLQLTTLVPLQEYEERLLKQTMLTGSYKEKLQSLFLKYDALWQHWENQVGHRRIKPHHIATGTVNPRPQKQYPINPKAKASIQTVINDLLKQGVLIQQNSIMNTPVYPVPKPDGKWRMVLDYREVNKTIPLIAAQNQHSAGILSSIFRGKYKTTLDLSNGFWAHSITPESYWLTAFTWLGQQYCWTRLPQGFLNSPALFNADVVDLLKEVPNVQVYVDDIYISHDDPREHLEQLEKVFSLLLNAGYVVSLKKSEIAQHEVEFLGFNITKEGRGLTETFKQKLLNITPPRDLKQLQSILGKLNFARNFIPNFSELVKPLYNIIATAPGKYITWTTDNSQQLQNIISMLNSAENLEERNPEVRLIMKVNTSPSAGYIRFYNEFAKRPIMYLNYVYTKAEVKFTNTEKLLTTIHKGLIKALDLGMGQEILVYSPIVSMTKIQKTPLPERKALPIRWITWMSYLEDPRIQFHYDKTLPELQQVPTVTDDIIAKIKHPSEFSMVFYTDGSAIKHPNVNKSHNAGMGIAQVQFKPEFTVINTWSIPLGDHTAQLAEVAAVEFACKKALKIDGPVLIVTDSFYVAESVNKELPYWQSNGFFNNKKKPLKHVSKWKSIADCIQLKPDIIIIHEKGHQPTASTFHTEGNNLADKLATQGSYVVNAGKRTADGSEFEKRTADGSEFESPKKKAKVE

SEQ ID NO: 6650 - protein, 2089 aa, synthetic construct
MPAAKRVKLDGGDKKYSIGLDIGTNSVGWAVITDEYKVPSKKFKVLGNTDRHSIKKNLIGALLFDSGETAEATRLKRTARRRYTRRKNRICYLQEIFSNEMAKVDDSFFHRLEESFLVEEDKKHERHPIFGNIVDEVAYHEKYPTIYHLRKKLVDSTDKADLRLIYLALAHMIKFRGHFLIEGDLNPDNSDVDKLFIQLVQTYNQLFEENPINASGVDAKAILSARLSKSRRLENLIAQLPGEKKNGLFGNLIALSLGLTPNFKSNFDLAEDAKLQLSKDTYDDDLDNLLAQIGDQYADLFLAAKNLSDAILLSDILRVNTEITKAPLSASMIKRYDEHHQDLTLLKALVRQQLPEKYKEIFFDQSKNGYAGYIDGGASQEEFYKFIKPILEKMDGTEELLVKLNREDLLRKQRTFDNGSIPHQIHLGELHAILRRQEDFYPFLKDNREKIEKILTFRIPYYVGPLARGNSRFAWMTRKSEETITPWNFEEVVDKGASAQSFIERMTNFDKNLPNEKVLPKHSLLYEYFTVYNELTKVKYVTEGMRKPAFLSGEQKKAIVDLLFKTNRKVTVKQLKEDYFKKIECFDSVEISGVEDRFNASLGTYHDLLKIIKDKDFLDNEENEDILEDIVLTLTLFEDREMIEERLKTYAHLFDDKVMKQLKRRRYTGWGRLSRKLINGIRDKQSGKTILDFLKSDGFANRNFMQLIHDDSLTFKEDIQKAQVSGQGDSLHEHIANLAGSPAIKKGILQTVKVVDELVKVMGRHKPENIVIEMARENQTTQKGQKNSRERMKRIEEGIKELGSQILKEHPVENTQLQNEKLYLYYLQNGRDMYVDQELDINRLSDYDVDHIVPQSFLKDDSIDNKVLTRSDKARGKSDNVPSEEVVKKMKNYWRQLLNAKLITQRKFDNLTKAERGGLSELDKAGFIKRQLVETRQITKHVAQILDSRMNTKYDENDKLIREVKVITLKSKLVSDFRKDFQFYKVREINNYHHAHDAYLNAVVGTALIKKYPKLESEFVYGDYKVYDVRKMIAKSEQEIGKATAKYFFYSNIMNFFKTEITLANGEIRKRPLIETNGETGEIVWDKGRDFATVRKVLSMPQVNIVKKTEVQTGGFSKESILPKRNSDKLIARKKDWDPKKYGGFDSPTVAYSVLVVAKVEKGKSKKLKSVKELLGITIMERSSFEKNPIDFLEAKGYKEVKKDLIIKLPKYSLFELENGRKRMLASAGELQKGNELALPSKYVNFLYLASHYEKLKGSPEDNEQKQLFVEQHKHYLDEIIEQISEFSKRVILADANLDKVLSAYNKHRDKPIREQAENIIHLFTLTNLGAPAAFKYFDTTIDRKRYTSTKEVLDATLIHQSITGLYETRIDLSQLGGDGGGGSPAPGGVLNLEEEYRLHEKPVPSSIDPSWLQLFPTVWAERAGMGLANQVPPVVVELRSGASPVAVRQYPMSKEAREGIRPHIQRFLDLGVLVPCQSPWNTPLLPVKKPGTNDYRPVQDLREINKRVQDIHPTVPNPYNLLSSLPPSHTWYSVLDLKDAFFCLKLHPNSQPLFAFEWRDPEKGNTGQLTWTRLPQGFKNSPTLFNEALHRDLAPFRALNPQVVLLQYVDDLLVAAPTYRDCKEGTQKLLQELSKLGYRVSAKKAQLCQKEVTYLGYLLKEGKRWLTPARKATVMKIPPPTTPRQVREFLGKAGFCRLFIPGFASLAAPLYPLTKPSIPFIWTEEHQKAFDRIKEALLSAPALALPDLTKPFTLYVDERAGVARGVLTQTLGPWRRPVAYLSKKLDPVASGWPTCLKAVAAVALLLKDADKLTLGQNVTVIASHSLESIVRQPPDRWMTNARMTHYQSLLLNERVSFAPPAVLNPATLLPVESEATPVHRCSEILAEETGTRRDLKDQPLPGVPAWYTDGSSFIAEGKRRAGAAIVDGKRTVWASSLPEGTSAQKAELVALTQALRLAEGKDINIYTDSRYAFATAHIHGAIYKQRGWLTSAGKDIKNKEEILALLEAIHLPKRVAIIHCPGHQKGNDPVATGNRRADEAAKQAALSTRVLAETTKPAGKRTADGSEFEKRTADGSEFESPKKKAKVE

SEQ ID NO: 6651 - protein, 2093 aa, synthetic construct
MPAAKRVKLDGGDKKYSIGLDIGTNSVGWAVITDEYKVPSKKFKVLGNTDRHSIKKNLIGALLFDSGETAEATRLKRTARRRYTRRKNRICYLQEIFSNEMAKVDDSFFHRLEESFLVEEDKKHERHPIFGNIVDEVAYHEKYPTIYHLRKKLVDSTDKADLRLIYLALAHMIKFRGHFLIEGDLNPDNSDVDKLFIQLVQTYNQLFEENPINASGVDAKAILSARLSKSRRLENLIAQLPGEKKNGLFGNLIALSLGLTPNFKSNFDLAEDAKLQLSKDTYDDDLDNLLAQIGDQYADLFLAAKNLSDAILLSDILRVNTEITKAPLSASMIKRYDEHHQDLTLLKALVRQQLPEKYKEIFFDQSKNGYAGYIDGGASQEEFYKFIKPILEKMDGTEELLVKLNREDLLRKQRTFDNGSIPHQIHLGELHAILRRQEDFYPFLKDNREKIEKILTFRIPYYVGPLARGNSRFAWMTRKSEETITPWNFEEVVDKGASAQSFIERMTNFDKNLPNEKVLPKHSLLYEYFTVYNELTKVKYVTEGMRKPAFLSGEQKKAIVDLLFKTNRKVTVKQLKEDYFKKIECFDSVEISGVEDRFNASLGTYHDLLKIIKDKDFLDNEENEDILEDIVLTLTLFEDREMIEERLKTYAHLFDDKVMKQLKRRRYTGWGRLSRKLINGIRDKQSGKTILDFLKSDGFANRNFMQLIHDDSLTFKEDIQKAQVSGQGDSLHEHIANLAGSPAIKKGILQTVKVVDELVKVMGRHKPENIVIEMARENQTTQKGQKNSRERMKRIEEGIKELGSQILKEHPVENTQLQNEKLYLYYLQNGRDMYVDQELDINRLSDYDVDHIVPQSFLKDDSIDNKVLTRSDKARGKSDNVPSEEVVKKMKNYWRQLLNAKLITQRKFDNLTKAERGGLSELDKAGFIKRQLVETRQITKHVAQILDSRMNTKYDENDKLIREVKVITLKSKLVSDFRKDFQFYKVREINNYHHAHDAYLNAVVGTALIKKYPKLESEFVYGDYKVYDVRKMIAKSEQEIGKATAKYFFYSNIMNFFKTEITLANGEIRKRPLIETNGETGEIVWDKGRDFATVRKVLSMPQVNIVKKTEVQTGGFSKESILPKRNSDKLIARKKDWDPKKYGGFDSPTVAYSVLVVAKVEKGKSKKLKSVKELLGITIMERSSFEKNPIDFLEAKGYKEVKKDLIIKLPKYSLFELENGRKRMLASAGELQKGNELALPSKYVNFLYLASHYEKLKGSPEDNEQKQLFVEQHKHYLDEIIEQISEFSKRVILADANLDKVLSAYNKHRDKPIREQAENIIHLFTLTNLGAPAAFKYFDTTIDRKRYTSTKEVLDATLIHQSITGLYETRIDLSQLGGDGGPAPGGSGGTAPLEEEYRLFLEAPIQNVTLLEQWKREIPKVWAEINPPGLASTQAPIHVQLLSTALPVRVRQYPITLEAKRSLRETIRKFRAAGILRPVHSPWNTPLLPVRKSGTSEYRMVQDLREVNKRVETIHPTVPNPYTLLSLLPPDRIWYSVLDLKDAFFCIPLAPESQLIFAFEWADAEEGESGQLTWTRLPQGFKNSPTLFNEALNRDLQGFRLDHPSVSLLQYVDDLLIAADTQAACLSATRDLLMTLAELGYRVSGKKAQLCQEEVTYLGFKIHKGSRSLSNSRTQAILQIPVPKTKRQVREFLGTIGYCRLWIPGFAELAQPLYAATRPGNDPLVWGEKEEEAFQSLKLALTQPPALALPSLDKPFQLFVEETSGAAKGVLTQALGPWKRPVAYLSKRLDPVAAGWPRCLRAIAAAALLTREASKLTFGQDIEITSSHNLESLLRSPPDKWLTNARITQYQVLLLDPPRVRFKQTAALNPATLLPETDDTLPIHHCLDTLDSLTSTRPDLTDQPLAQAEATLFTDGSSYIRDGKRYAGAAVVTLDSVIWAEPLPIGTSAQKAELIALTKALEWSKDKSVNIYTDSRYAFATLHVHGMIYRERGWLTAGGKAIKNAPEILALLTAVWLPKRVAVMHCKGHQKDDAPTSTGNRRADEVAREVAIRPLSTQATISAGKRTADGSEFEKRTADGSEFESPKKKAKVE

SEQ ID NO: 6652 - protein, 2093 aa, synthetic construct
MPAAKRVKLDGGDKKYSIGLDIGTNSVGWAVITDEYKVPSKKFKVLGNTDRHSIKKNLIGALLFDSGETAEATRLKRTARRRYTRRKNRICYLQEIFSNEMAKVDDSFFHRLEESFLVEEDKKHERHPIFGNIVDEVAYHEKYPTIYHLRKKLVDSTDKADLRLIYLALAHMIKFRGHFLIEGDLNPDNSDVDKLFIQLVQTYNQLFEENPINASGVDAKAILSARLSKSRRLENLIAQLPGEKKNGLFGNLIALSLGLTPNFKSNFDLAEDAKLQLSKDTYDDDLDNLLAQIGDQYADLFLAAKNLSDAILLSDILRVNTEITKAPLSASMIKRYDEHHQDLTLLKALVRQQLPEKYKEIFFDQSKNGYAGYIDGGASQEEFYKFIKPILEKMDGTEELLVKLNREDLLRKQRTFDNGSIPHQIHLGELHAILRRQEDFYPFLKDNREKIEKILTFRIPYYVGPLARGNSRFAWMTRKSEETITPWNFEEVVDKGASAQSFIERMTNFDKNLPNEKVLPKHSLLYEYFTVYNELTKVKYVTEGMRKPAFLSGEQKKAIVDLLFKTNRKVTVKQLKEDYFKKIECFDSVEISGVEDRFNASLGTYHDLLKIIKDKDFLDNEENEDILEDIVLTLTLFEDREMIEERLKTYAHLFDDKVMKQLKRRRYTGWGRLSRKLINGIRDKQSGKTILDFLKSDGFANRNFMQLIHDDSLTFKEDIQKAQVSGQGDSLHEHIANLAGSPAIKKGILQTVKVVDELVKVMGRHKPENIVIEMARENQTTQKGQKNSRERMKRIEEGIKELGSQILKEHPVENTQLQNEKLYLYYLQNGRDMYVDQELDINRLSDYDVDHIVPQSFLKDDSIDNKVLTRSDKARGKSDNVPSEEVVKKMKNYWRQLLNAKLITQRKFDNLTKAERGGLSELDKAGFIKRQLVETRQITKHVAQILDSRMNTKYDENDKLIREVKVITLKSKLVSDFRKDFQFYKVREINNYHHAHDAYLNAVVGTALIKKYPKLESEFVYGDYKVYDVRKMIAKSEQEIGKATAKYFFYSNIMNFFKTEITLANGEIRKRPLIETNGETGEIVWDKGRDFATVRKVLSMPQVNIVKKTEVQTGGFSKESILPKRNSDKLIARKKDWDPKKYGGFDSPTVAYSVLVVAKVEKGKSKKLKSVKELLGITIMERSSFEKNPIDFLEAKGYKEVKKDLIIKLPKYSLFELENGRKRMLASAGELQKGNELALPSKYVNFLYLASHYEKLKGSPEDNEQKQLFVEQHKHYLDEIIEQISEFSKRVILADANLDKVLSAYNKHRDKPIREQAENIIHLFTLTNLGAPAAFKYFDTTIDRKRYTSTKEVLDATLIHQSITGLYETRIDLSQLGGDGGPAPGGSGGTAPLEEEYRLFLEAPIQNVTLLEQWKREIPKVWAEINPPGLASTQAPIHVQLLSTALPVRVRQYPITLEAKRSLRETIRKFRAAGILRPVHSPWNTPLLPVRKSGTSEYRMVQDLREVNKRVETIHPTVPNPYTLLSLLPPDRIWYSVLDLKDAFFCIPLAPESQLIFAFEWADAEEGESGQLTWTRLPQGFKNSPTLFNEALNRDLQGFRLDHPSVSLLQYVDDLLIAADTQAACLSATRDLLMTLAELGYRVSGKKAQLCQEEVTYLGFKIHKGSRSLSNSRTQAILQIPVPKTKRQVREFLGKIGYCRLFIPGFAELAQPLYAATRPGNDPLVWGEKEEEAFQSLKLALTQPPALALPSLDKPFQLFVEETSGAAKGVLTQALGPWKRPVAYLSKRLDPVAAGWPRCLRAIAAAALLTREASKLTFGQDIEITSSHNLESLLRSPPDKWLTNARITQYQVLLLDPPRVRFKQTAALNPATLLPETDDTLPIHHCLDTLDSLTSTRPDLTDQPLAQAEATLFTDGSSYIRDGKRYAGAAVVTLDSVIWAEPLPIGTSAQKAELIALTKALEWSKDKSVNIYTDSRYAFATLHVHGMIYRERGWLTAGGKAIKNAPEILALLTAVWLPKRVAVMHCKGHQKDDAPTSTGNRRADEVAREVAIRPLSTQATISAGKRTADGSEFEKRTADGSEFESPKKKAKVE

SEQ ID NO: 6653 - protein, 2089 aa, synthetic construct
MPAAKRVKLDGGDKKYSIGLDIGTNSVGWAVITDEYKVPSKKFKVLGNTDRHSIKKNLIGALLFDSGETAEATRLKRTARRRYTRRKNRICYLQEIFSNEMAKVDDSFFHRLEESFLVEEDKKHERHPIFGNIVDEVAYHEKYPTIYHLRKKLVDSTDKADLRLIYLALAHMIKFRGHFLIEGDLNPDNSDVDKLFIQLVQTYNQLFEENPINASGVDAKAILSARLSKSRRLENLIAQLPGEKKNGLFGNLIALSLGLTPNFKSNFDLAEDAKLQLSKDTYDDDLDNLLAQIGDQYADLFLAAKNLSDAILLSDILRVNTEITKAPLSASMIKRYDEHHQDLTLLKALVRQQLPEKYKEIFFDQSKNGYAGYIDGGASQEEFYKFIKPILEKMDGTEELLVKLNREDLLRKQRTFDNGSIPHQIHLGELHAILRRQEDFYPFLKDNREKIEKILTFRIPYYVGPLARGNSRFAWMTRKSEETITPWNFEEVVDKGASAQSFIERMTNFDKNLPNEKVLPKHSLLYEYFTVYNELTKVKYVTEGMRKPAFLSGEQKKAIVDLLFKTNRKVTVKQLKEDYFKKIECFDSVEISGVEDRFNASLGTYHDLLKIIKDKDFLDNEENEDILEDIVLTLTLFEDREMIEERLKTYAHLFDDKVMKQLKRRRYTGWGRLSRKLINGIRDKQSGKTILDFLKSDGFANRNFMQLIHDDSLTFKEDIQKAQVSGQGDSLHEHIANLAGSPAIKKGILQTVKVVDELVKVMGRHKPENIVIEMARENQTTQKGQKNSRERMKRIEEGIKELGSQILKEHPVENTQLQNEKLYLYYLQNGRDMYVDQELDINRLSDYDVDHIVPQSFLKDDSIDNKVLTRSDKARGKSDNVPSEEVVKKMKNYWRQLLNAKLITQRKFDNLTKAERGGLSELDKAGFIKRQLVETRQITKHVAQILDSRMNTKYDENDKLIREVKVITLKSKLVSDFRKDFQFYKVREINNYHHAHDAYLNAVVGTALIKKYPKLESEFVYGDYKVYDVRKMIAKSEQEIGKATAKYFFYSNIMNFFKTEITLANGEIRKRPLIETNGETGEIVWDKGRDFATVRKVLSMPQVNIVKKTEVQTGGFSKESILPKRNSDKLIARKKDWDPKKYGGFDSPTVAYSVLVVAKVEKGKSKKLKSVKELLGITIMERSSFEKNPIDFLEAKGYKEVKKDLIIKLPKYSLFELENGRKRMLASAGELQKGNELALPSKYVNFLYLASHYEKLKGSPEDNEQKQLFVEQHKHYLDEIIEQISEFSKRVILADANLDKVLSAYNKHRDKPIREQAENIIHLFTLTNLGAPAAFKYFDTTIDRKRYTSTKEVLDATLIHQSITGLYETRIDLSQLGGDGGPAPGGSGGVLNLEEEYRLHEKPVPSSIDPSWLQLFPTVWAERAGMGLANQVPPVVVELRSGASPVAVRQYPMSKEAREGIRPHIQKFLDLGVLVPCRSPWNTPLLPVKKPGTNDYRPVQDLREINKRVQDIHPTVPNPYNLLSSLPPSYTWYSVLDLKDAFFCLRLHPNSQPLFAFEWKDPEKGNTGQLTWTRLPQGFKNSPTLFDEALHRDLAPFRALNPQVVLLQYVDDLLVAAPTYEDCKKGTQKLLQELSKLGYRVSAKKAQLCQREVTYLGYLLKEGKRWLTPARKATVMKIPVPTTPRQVREFLGTAGFCRLWIPGFASLAAPLYPLTKESIPFIWTEEHQQAFDHIKKALLSAPALALPDLTKPFTLYIDERAGVARGVLTQTLGPWRRPVAYLSKKLDPVASGWPTCLKAVAAVALLLKDADKLTLGQNVTVIASHSLESIVRQPPDRWMTNARMTHYQSLLLNERVSFAPPAVLNPATLLPVESEATPVHRCSEILAEETGTRRDLEDQPLPGVPTWYTDGSSFITEGKRRAGAPIVDGKRTVWASSLPEGTSAQKAELVALTQALRLAEGKNINIYTDSRYAFATAHIHGAIYKQRGLLTSAGKDIKNKEEILALLEAIHLPRRVAIIHCPGHQRGSNPVATGNRRADEAAKQAALSTRVLAGTTKPAGKRTADGSEFEKRTADGSEFESPKKKAKVE

SEQ ID NO: 6654 - protein, 2213 aa, synthetic construct
MPAAKRVKLDGGDKKYSIGLDIGTNSVGWAVITDEYKVPSKKFKVLGNTDRHSIKKNLIGALLFDSGETAEATRLKRTARRRYTRRKNRICYLQEIFSNEMAKVDDSFFHRLEESFLVEEDKKHERHPIFGNIVDEVAYHEKYPTIYHLRKKLVDSTDKADLRLIYLALAHMIKFRGHFLIEGDLNPDNSDVDKLFIQLVQTYNQLFEENPINASGVDAKAILSARLSKSRRLENLIAQLPGEKKNGLFGNLIALSLGLTPNFKSNFDLAEDAKLQLSKDTYDDDLDNLLAQIGDQYADLFLAAKNLSDAILLSDILRVNTEITKAPLSASMIKRYDEHHQDLTLLKALVRQQLPEKYKEIFFDQSKNGYAGYIDGGASQEEFYKFIKPILEKMDGTEELLVKLNREDLLRKQRTFDNGSIPHQIHLGELHAILRRQEDFYPFLKDNREKIEKILTFRIPYYVGPLARGNSRFAWMTRKSEETITPWNFEEVVDKGASAQSFIERMTNFDKNLPNEKVLPKHSLLYEYFTVYNELTKVKYVTEGMRKPAFLSGEQKKAIVDLLFKTNRKVTVKQLKEDYFKKIECFDSVEISGVEDRFNASLGTYHDLLKIIKDKDFLDNEENEDILEDIVLTLTLFEDREMIEERLKTYAHLFDDKVMKQLKRRRYTGWGRLSRKLINGIRDKQSGKTILDFLKSDGFANRNFMQLIHDDSLTFKEDIQKAQVSGQGDSLHEHIANLAGSPAIKKGILQTVKVVDELVKVMGRHKPENIVIEMARENQTTQKGQKNSRERMKRIEEGIKELGSQILKEHPVENTQLQNEKLYLYYLQNGRDMYVDQELDINRLSDYDVDHIVPQSFLKDDSIDNKVLTRSDKARGKSDNVPSEEVVKKMKNYWRQLLNAKLITQRKFDNLTKAERGGLSELDKAGFIKRQLVETRQITKHVAQILDSRMNTKYDENDKLIREVKVITLKSKLVSDFRKDFQFYKVREINNYHHAHDAYLNAVVGTALIKKYPKLESEFVYGDYKVYDVRKMIAKSEQEIGKATAKYFFYSNIMNFFKTEITLANGEIRKRPLIETNGETGEIVWDKGRDFATVRKVLSMPQVNIVKKTEVQTGGFSKESILPKRNSDKLIARKKDWDPKKYGGFDSPTVAYSVLVVAKVEKGKSKKLKSVKELLGITIMERSSFEKNPIDFLEAKGYKEVKKDLIIKLPKYSLFELENGRKRMLASAGELQKGNELALPSKYVNFLYLASHYEKLKGSPEDNEQKQLFVEQHKHYLDEIIEQISEFSKRVILADANLDKVLSAYNKHRDKPIREQAENIIHLFTLTNLGAPAAFKYFDTTIDRKRYTSTKEVLDATLIHQSITGLYETRIDLSQLGGDGGPAPGGSGGTLGDQGSRGSDPLPEPRVTLTVEGIPTEFLVNTGAEHSVLTKPMGKMGSKRTVVAGATGSKVYPWTTKRLLKIGQKQVTHSFLVIPECPAPLLGRDLLTKLKAQIQFSTEGPQVTWEDRPAMCLVLNLEEEYRLHEKPVPPSIDPSWLQLFPMVWAEKAGMGLANQVPPVVVELKSDASPVAVRQYPMSKEAREGIRPHIQRFLDLGILVPCQSPWNTPLLPVKKPGTNDYRPVQDLREVNKRVQDIHPTVPNPYNLLSSLPPSHTWYSVLDLKDAFFCLKLHPNSQPLFAFEWRDPEKGNTGQLTWTRLPQGFKNSPTLFNEALHRDLASFRALNPQVVMLQYVDDLLVAAPTYRDCKEGTRRLLQELSKLGYRVSAKKAQLCREEVTYLGYLLKGGKRWLTPARKATVMKIPTPTTPRQVREFLGTAGFCRLWIPGFASLAAPLYPLTRPKVPFTWTEAHQEAFGRIKEALLSAPALALPDLTKPFALYVDEKEGVARGVLTQTLGPWRRPVAYLSKKLDPVASGWPTCLKAIAAVALLLKDADKLTLGQNVLVIAPHNLESIVRQPPDRWMTNARMTHYQSLLLNERVSFAPPAILNPATLLPVESDDTPIHICSEILAEETGTRPDLRDQPLPGVPAWYTDGSSFIMDGRRQAGAAIVDNKRTVWASNLPEGTSAQKAELIALTQALRLAEGKSINIYTDSRYAFATAHVHGAIYKQRGWLTSAGKDIKNKEEILALLEAIHLPKRVAIIHCPGHQRGTDPVATGNRKADEAAKQAAQSTRILTETTKNAGKRTADGSEFEKRTADGSEFESPKKKAKVE

SEQ ID NO: 6655 - protein, 2091 aa, synthetic construct
MPAAKRVKLDGGDKKYSIGLDIGTNSVGWAVITDEYKVPSKKFKVLGNTDRHSIKKNLIGALLFDSGETAEATRLKRTARRRYTRRKNRICYLQEIFSNEMAKVDDSFFHRLEESFLVEEDKKHERHPIFGNIVDEVAYHEKYPTIYHLRKKLVDSTDKADLRLIYLALAHMIKFRGHFLIEGDLNPDNSDVDKLFIQLVQTYNQLFEENPINASGVDAKAILSARLSKSRRLENLIAQLPGEKKNGLFGNLIALSLGLTPNFKSNFDLAEDAKLQLSKDTYDDDLDNLLAQIGDQYADLFLAAKNLSDAILLSDILRVNTEITKAPLSASMIKRYDEHHQDLTLLKALVRQQLPEKYKEIFFDQSKNGYAGYIDGGASQEEFYKFIKPILEKMDGTEELLVKLNREDLLRKQRTFDNGSIPHQIHLGELHAILRRQEDFYPFLKDNREKIEKILTFRIPYYVGPLARGNSRFAWMTRKSEETITPWNFEEVVDKGASAQSFIERMTNFDKNLPNEKVLPKHSLLYEYFTVYNELTKVKYVTEGMRKPAFLSGEQKKAIVDLLFKTNRKVTVKQLKEDYFKKIECFDSVEISGVEDRFNASLGTYHDLLKIIKDKDFLDNEENEDILEDIVLTLTLFEDREMIEERLKTYAHLFDDKVMKQLKRRRYTGWGRLSRKLINGIRDKQSGKTILDFLKSDGFANRNFMQLIHDDSLTFKEDIQKAQVSGQGDSLHEHIANLAGSPAIKKGILQTVKVVDELVKVMGRHKPENIVIEMARENQTTQKGQKNSRERMKRIEEGIKELGSQILKEHPVENTQLQNEKLYLYYLQNGRDMYVDQELDINRLSDYDVDHIVPQSFLKDDSIDNKVLTRSDKARGKSDNVPSEEVVKKMKNYWRQLLNAKLITQRKFDNLTKAERGGLSELDKAGFIKRQLVETRQITKHVAQILDSRMNTKYDENDKLIREVKVITLKSKLVSDFRKDFQFYKVREINNYHHAHDAYLNAVVGTALIKKYPKLESEFVYGDYKVYDVRKMIAKSEQEIGKATAKYFFYSNIMNFFKTEITLANGEIRKRPLIETNGETGEIVWDKGRDFATVRKVLSMPQVNIVKKTEVQTGGFSKESILPKRNSDKLIARKKDWDPKKYGGFDSPTVAYSVLVVAKVEKGKSKKLKSVKELLGITIMERSSFEKNPIDFLEAKGYKEVKKDLIIKLPKYSLFELENGRKRMLASAGELQKGNELALPSKYVNFLYLASHYEKLKGSPEDNEQKQLFVEQHKHYLDEIIEQISEFSKRVILADANLDKVLSAYNKHRDKPIREQAENIIHLFTLTNLGAPAAFKYFDTTIDRKRYTSTKEVLDATLIHQSITGLYETRIDLSQLGGDGGPAPGGSGGTLNLEDEYRLYETSAEPEVSPGSTWLSDFPQAWAETGGMGLAVRQAPLIIPLKATSTPVSIKQYPMSQEAKLGIKPHIQRLLDQGILVPCQSPWNTPLLPVKKPGTNDYRPVQDLREVNKRVEDIHPTVPNPYNLLSGLPPSHRWYTVLDLKDAFFCLRLHPTSQPLFAFEWRDPGMGISGQLTWTRLPQGFKNSPTLFNEALHRDLADFRIQHPDLILLQYVDDILLAATSELDCQQGTRALLLTLGNLGYRASAKKAQLCQKQVKYLGYLLKEGQRWLTEARKETVMGQPTPKTPRQLREFLGKAGFCRLFIPGFAEMAAPLYPLTKPGTLFNWGPDQQKAYQEIKQALLTAPALGLPDLTKPFELFVDEKQGYAKGVLTQKLGPWRRPVAYLSKKLDPVAAGWPPCLRMVAAIAVLRKDAGKLTMGQPLVILAPHAVEALVKQPPDRWLSNARMTHYQAMLLDTDRVQFGPVVALNPATLLPLPEEGAPHDCLEILAETHGTRPDLTDQPIPDADHTWYTDGSSFLQEGQRKAGAAVTTETEVIWARALPAGTSAQRAELIALTQALKMAEGKRLNVYTDSRYAFATAHIHGEIYRRRGWLTSEGREIKNKSEILALLKALFLPKRLSIIHCLGHQKGDSAEARGNRLADQAAREAAIKTPPDTSTLLAGKRTADGSEFEKRTADGSEFESPKKKAKVE

SEQ ID NO: 6656 - protein, 2082 aa, synthetic construct
MPAAKRVKLDGGDKKYSIGLDIGTNSVGWAVITDEYKVPSKKFKVLGNTDRHSIKKNLIGALLFDSGETAEATRLKRTARRRYTRRKNRICYLQEIFSNEMAKVDDSFFHRLEESFLVEEDKKHERHPIFGNIVDEVAYHEKYPTIYHLRKKLVDSTDKADLRLIYLALAHMIKFRGHFLIEGDLNPDNSDVDKLFIQLVQTYNQLFEENPINASGVDAKAILSARLSKSRRLENLIAQLPGEKKNGLFGNLIALSLGLTPNFKSNFDLAEDAKLQLSKDTYDDDLDNLLAQIGDQYADLFLAAKNLSDAILLSDILRVNTEITKAPLSASMIKRYDEHHQDLTLLKALVRQQLPEKYKEIFFDQSKNGYAGYIDGGASQEEFYKFIKPILEKMDGTEELLVKLNREDLLRKQRTFDNGSIPHQIHLGELHAILRRQEDFYPFLKDNREKIEKILTFRIPYYVGPLARGNSRFAWMTRKSEETITPWNFEEVVDKGASAQSFIERMTNFDKNLPNEKVLPKHSLLYEYFTVYNELTKVKYVTEGMRKPAFLSGEQKKAIVDLLFKTNRKVTVKQLKEDYFKKIECFDSVEISGVEDRFNASLGTYHDLLKIIKDKDFLDNEENEDILEDIVLTLTLFEDREMIEERLKTYAHLFDDKVMKQLKRRRYTGWGRLSRKLINGIRDKQSGKTILDFLKSDGFANRNFMQLIHDDSLTFKEDIQKAQVSGQGDSLHEHIANLAGSPAIKKGILQTVKVVDELVKVMGRHKPENIVIEMARENQTTQKGQKNSRERMKRIEEGIKELGSQILKEHPVENTQLQNEKLYLYYLQNGRDMYVDQELDINRLSDYDVDHIVPQSFLKDDSIDNKVLTRSDKARGKSDNVPSEEVVKKMKNYWRQLLNAKLITQRKFDNLTKAERGGLSELDKAGFIKRQLVETRQITKHVAQILDSRMNTKYDENDKLIREVKVITLKSKLVSDFRKDFQFYKVREINNYHHAHDAYLNAVVGTALIKKYPKLESEFVYGDYKVYDVRKMIAKSEQEIGKATAKYFFYSNIMNFFKTEITLANGEIRKRPLIETNGETGEIVWDKGRDFATVRKVLSMPQVNIVKKTEVQTGGFSKESILPKRNSDKLIARKKDWDPKKYGGFDSPTVAYSVLVVAKVEKGKSKKLKSVKELLGITIMERSSFEKNPIDFLEAKGYKEVKKDLIIKLPKYSLFELENGRKRMLASAGELQKGNELALPSKYVNFLYLASHYEKLKGSPEDNEQKQLFVEQHKHYLDEIIEQISEFSKRVILADANLDKVLSAYNKHRDKPIREQAENIIHLFTLTNLGAPAAFKYFDTTIDRKRYTSTKEVLDATLIHQSITGLYETRIDLSQLGGDGGPAPGGSGGIPWLMKKPLQLTTLVPLQEYEERLLKQTMLTGSYKEKLQSLFLKYDALWQHWENQVGHRRIKPHHIATGTVNPRPQKQYPINPKAKASIQTVINDLLKQGVLIQQNSIMNTPVYPVPKPDGKWRMVLDYREVNKTIPLIAAQNQHSAGILSSIFRGKYKTTLDLSNGFWAHSITPESYWLTAFTWLGQQYCWTRLPQGFLNSPALFNADVVDLLKEVPNVQVYVDDIYISHDDPREHLEQLEKVFSLLLNAGYVVSLKKSEIAQHEVEFLGFNITKEGRGLTETFKQKLLNITPPRDLKQLQSILGKLNFARNFIPNFSELVKPLYNIIATAPGKYITWTTDNSQQLQNIISMLNSAENLEERNPEVRLIMKVNTSPSAGYIRFYNEFAKRPIMYLNYVYTKAEVKFTNTEKLLTTIHKGLIKALDLGMGQEILVYSPIVSMTKIQKTPLPERKALPIRWITWMSYLEDPRIQFHYDKTLPELQQVPTVTDDIIAKIKHPSEFSMVFYTDGSAIKHPNVNKSHNAGMGIAQVQFKPEFTVINTWSIPLGDHTAQLAEVAAVEFACKKALKIDGPVLIVTDSFYVAESVNKELPYWQSNGFFNNKKKPLKHVSKWKSIADCIQLKPDIIIIHEKGHQPTASTFHTEGNNLADKLATQGSYVVNAGKRTADGSEFEKRTADGSEFESPKKKAKVE

SEQ ID NO: 6657 - protein, 2089 aa, synthetic construct
MPAAKRVKLDGGDKKYSIGLDIGTNSVGWAVITDEYKVPSKKFKVLGNTDRHSIKKNLIGALLFDSGETAEATRLKRTARRRYTRRKNRICYLQEIFSNEMAKVDDSFFHRLEESFLVEEDKKHERHPIFGNIVDEVAYHEKYPTIYHLRKKLVDSTDKADLRLIYLALAHMIKFRGHFLIEGDLNPDNSDVDKLFIQLVQTYNQLFEENPINASGVDAKAILSARLSKSRRLENLIAQLPGEKKNGLFGNLIALSLGLTPNFKSNFDLAEDAKLQLSKDTYDDDLDNLLAQIGDQYADLFLAAKNLSDAILLSDILRVNTEITKAPLSASMIKRYDEHHQDLTLLKALVRQQLPEKYKEIFFDQSKNGYAGYIDGGASQEEFYKFIKPILEKMDGTEELLVKLNREDLLRKQRTFDNGSIPHQIHLGELHAILRRQEDFYPFLKDNREKIEKILTFRIPYYVGPLARGNSRFAWMTRKSEETITPWNFEEVVDKGASAQSFIERMTNFDKNLPNEKVLPKHSLLYEYFTVYNELTKVKYVTEGMRKPAFLSGEQKKAIVDLLFKTNRKVTVKQLKEDYFKKIECFDSVEISGVEDRFNASLGTYHDLLKIIKDKDFLDNEENEDILEDIVLTLTLFEDREMIEERLKTYAHLFDDKVMKQLKRRRYTGWGRLSRKLINGIRDKQSGKTILDFLKSDGFANRNFMQLIHDDSLTFKEDIQKAQVSGQGDSLHEHIANLAGSPAIKKGILQTVKVVDELVKVMGRHKPENIVIEMARENQTTQKGQKNSRERMKRIEEGIKELGSQILKEHPVENTQLQNEKLYLYYLQNGRDMYVDQELDINRLSDYDVDHIVPQSFLKDDSIDNKVLTRSDKARGKSDNVPSEEVVKKMKNYWRQLLNAKLITQRKFDNLTKAERGGLSELDKAGFIKRQLVETRQITKHVAQILDSRMNTKYDENDKLIREVKVITLKSKLVSDFRKDFQFYKVREINNYHHAHDAYLNAVVGTALIKKYPKLESEFVYGDYKVYDVRKMIAKSEQEIGKATAKYFFYSNIMNFFKTEITLANGEIRKRPLIETNGETGEIVWDKGRDFATVRKVLSMPQVNIVKKTEVQTGGFSKESILPKRNSDKLIARKKDWDPKKYGGFDSPTVAYSVLVVAKVEKGKSKKLKSVKELLGITIMERSSFEKNPIDFLEAKGYKEVKKDLIIKLPKYSLFELENGRKRMLASAGELQKGNELALPSKYVNFLYLASHYEKLKGSPEDNEQKQLFVEQHKHYLDEIIEQISEFSKRVILADANLDKVLSAYNKHRDKPIREQAENIIHLFTLTNLGAPAAFKYFDTTIDRKRYTSTKEVLDATLIHQSITGLYETRIDLSQLGGDGGPAPGGSGGVLNLEEEYRLHEKPVPSSIDPSWLQLFPTVWAERAGMGLANQVPPVVVELRSGASPVAVRQYPMSKEAREGIRPHIQRFLDLGVLVPCQSPWNTPLLPVKKPGTNDYRPVQDLREINKRVQDIHPTVPNPYNLLSSLPPSHTWYSVLDLKDAFFCLKLHPNSQPLFAFEWRDPEKGNTGQLTWTRLPQGFKNSPTLFNEALHRDLAPFRALNPQVVLLQYVDDLLVAAPTYRDCKEGTQKLLQELSKLGYRVSAKKAQLCQKEVTYLGYLLKEGKRWLTPARKATVMKIPPPTTPRQVREFLGTAGFCRLWIPGFASLAAPLYPLTKPSIPFIWTEEHQKAFDRIKEALLSAPALALPDLTKPFTLYVDERAGVARGVLTQTLGPWRRPVAYLSKKLDPVASGWPTCLKAVAAVALLLKDADKLTLGQNVTVIASHSLESIVRQPPDRWMTNARMTHYQSLLLNERVSFAPPAVLNPATLLPVESEATPVHRCSEILAEETGTRRDLKDQPLPGVPAWYTDGSSFIAEGKRRAGAAIVDGKRTVWASSLPEGTSAQKAELVALTQALRLAEGKDINIYTDSRYAFATAHIHGAIYKQRGWLTSAGKDIKNKEEILALLEAIHLPKRVAIIHCPGHQKGNDPVATGNRRADEAAKQAALSTRVLAETTKPAGKRTADGSEFEKRTADGSEFESPKKKAKVE

SEQ ID NO: 6658 - protein, 2091 aa, synthetic construct
MPAAKRVKLDGGDKKYSIGLDIGTNSVGWAVITDEYKVPSKKFKVLGNTDRHSIKKNLIGALLFDSGETAEATRLKRTARRRYTRRKNRICYLQEIFSNEMAKVDDSFFHRLEESFLVEEDKKHERHPIFGNIVDEVAYHEKYPTIYHLRKKLVDSTDKADLRLIYLALAHMIKFRGHFLIEGDLNPDNSDVDKLFIQLVQTYNQLFEENPINASGVDAKAILSARLSKSRRLENLIAQLPGEKKNGLFGNLIALSLGLTPNFKSNFDLAEDAKLQLSKDTYDDDLDNLLAQIGDQYADLFLAAKNLSDAILLSDILRVNTEITKAPLSASMIKRYDEHHQDLTLLKALVRQQLPEKYKEIFFDQSKNGYAGYIDGGASQEEFYKFIKPILEKMDGTEELLVKLNREDLLRKQRTFDNGSIPHQIHLGELHAILRRQEDFYPFLKDNREKIEKILTFRIPYYVGPLARGNSRFAWMTRKSEETITPWNFEEVVDKGASAQSFIERMTNFDKNLPNEKVLPKHSLLYEYFTVYNELTKVKYVTEGMRKPAFLSGEQKKAIVDLLFKTNRKVTVKQLKEDYFKKIECFDSVEISGVEDRFNASLGTYHDLLKIIKDKDFLDNEENEDILEDIVLTLTLFEDREMIEERLKTYAHLFDDKVMKQLKRRRYTGWGRLSRKLINGIRDKQSGKTILDFLKSDGFANRNFMQLIHDDSLTFKEDIQKAQVSGQGDSLHEHIANLAGSPAIKKGILQTVKVVDELVKVMGRHKPENIVIEMARENQTTQKGQKNSRERMKRIEEGIKELGSQILKEHPVENTQLQNEKLYLYYLQNGRDMYVDQELDINRLSDYDVDHIVPQSFLKDDSIDNKVLTRSDKARGKSDNVPSEEVVKKMKNYWRQLLNAKLITQRKFDNLTKAERGGLSELDKAGFIKRQLVETRQITKHVAQILDSRMNTKYDENDKLIREVKVITLKSKLVSDFRKDFQFYKVREINNYHHAHDAYLNAVVGTALIKKYPKLESEFVYGDYKVYDVRKMIAKSEQEIGKATAKYFFYSNIMNFFKTEITLANGEIRKRPLIETNGETGEIVWDKGRDFATVRKVLSMPQVNIVKKTEVQTGGFSKESILPKRNSDKLIARKKDWDPKKYGGFDSPTVAYSVLVVAKVEKGKSKKLKSVKELLGITIMERSSFEKNPIDFLEAKGYKEVKKDLIIKLPKYSLFELENGRKRMLASAGELQKGNELALPSKYVNFLYLASHYEKLKGSPEDNEQKQLFVEQHKHYLDEIIEQISEFSKRVILADANLDKVLSAYNKHRDKPIREQAENIIHLFTLTNLGAPAAFKYFDTTIDRKRYTSTKEVLDATLIHQSITGLYETRIDLSQLGGDGGPAPGGSGGTLNIEDEYRLHETSKEPDVPLGSTWLSDFPQAWAETGGMGLAVRQAPLIIPLKATSTPVSIKQYPMSQEARLGIKPHIQRLLDQGILVPCQSPWNTPLLPVKKPGTNDYRPVQDLREVNKRVEDIHPTVPNPYNLLSGLPPSHQWYTVLDLKDAFFCLRLHPTSQPLFAFEWRDPEMGISGQLTWTRLPQGFKNSPTLFNEALHRDLADFRIQHPDLILLQYVDDLLLAATSEQDCQRGTRALLQTLGNLGYRASAKKAQICQKQVKYLGYLLKEGQRWLTEARKETVMGQPTPKTPRQLREFLGTAGFCRLWIPGFAEMAAPLYPLTKPGTLFNWGPDQQKAYQEIKQALLTAPALGLPDLTKPFELFVDEKQGYAKGVLTQKLGPWRRPVAYLSKKLDPVAAGWPPCLRMVAAIAVLTKDAGKLTMGQPLVILAPHAVEALVKQPPDRWLSNARMTHYQAMLLDTDRVQFGPVVALNPATLLPLPEKEAPHDCLEILAETHGTRPDLTDQPIPDADYTWYTDGSSFLQEGQRRAGAAVTTETEVIWARALPAGTSAQRAELIALTQALKMAEGKKLNVYTDSRYAFATAHVHGEIYRRRGWLTSEGREIKNKNEILALLKALFLPKRLSIIHCPGHQKGNSAEARGNRMADQAAREAAMKAVLETSTLLAGKRTADGSEFEKRTADGSEFESPKKKAKVE

SEQ ID NO: 6659 - protein, 2093 aa, synthetic construct
MPAAKRVKLDGGDKKYSIGLDIGTNSVGWAVITDEYKVPSKKFKVLGNTDRHSIKKNLIGALLFDSGETAEATRLKRTARRRYTRRKNRICYLQEIFSNEMAKVDDSFFHRLEESFLVEEDKKHERHPIFGNIVDEVAYHEKYPTIYHLRKKLVDSTDKADLRLIYLALAHMIKFRGHFLIEGDLNPDNSDVDKLFIQLVQTYNQLFEENPINASGVDAKAILSARLSKSRRLENLIAQLPGEKKNGLFGNLIALSLGLTPNFKSNFDLAEDAKLQLSKDTYDDDLDNLLAQIGDQYADLFLAAKNLSDAILLSDILRVNTEITKAPLSASMIKRYDEHHQDLTLLKALVRQQLPEKYKEIFFDQSKNGYAGYIDGGASQEEFYKFIKPILEKMDGTEELLVKLNREDLLRKQRTFDNGSIPHQIHLGELHAILRRQEDFYPFLKDNREKIEKILTFRIPYYVGPLARGNSRFAWMTRKSEETITPWNFEEVVDKGASAQSFIERMTNFDKNLPNEKVLPKHSLLYEYFTVYNELTKVKYVTEGMRKPAFLSGEQKKAIVDLLFKTNRKVTVKQLKEDYFKKIECFDSVEISGVEDRFNASLGTYHDLLKIIKDKDFLDNEENEDILEDIVLTLTLFEDREMIEERLKTYAHLFDDKVMKQLKRRRYTGWGRLSRKLINGIRDKQSGKTILDFLKSDGFANRNFMQLIHDDSLTFKEDIQKAQVSGQGDSLHEHIANLAGSPAIKKGILQTVKVVDELVKVMGRHKPENIVIEMARENQTTQKGQKNSRERMKRIEEGIKELGSQILKEHPVENTQLQNEKLYLYYLQNGRDMYVDQELDINRLSDYDVDHIVPQSFLKDDSIDNKVLTRSDKARGKSDNVPSEEVVKKMKNYWRQLLNAKLITQRKFDNLTKAERGGLSELDKAGFIKRQLVETRQITKHVAQILDSRMNTKYDENDKLIREVKVITLKSKLVSDFRKDFQFYKVREINNYHHAHDAYLNAVVGTALIKKYPKLESEFVYGDYKVYDVRKMIAKSEQEIGKATAKYFFYSNIMNFFKTEITLANGEIRKRPLIETNGETGEIVWDKGRDFATVRKVLSMPQVNIVKKTEVQTGGFSKESILPKRNSDKLIARKKDWDPKKYGGFDSPTVAYSVLVVAKVEKGKSKKLKSVKELLGITIMERSSFEKNPIDFLEAKGYKEVKKDLIIKLPKYSLFELENGRKRMLASAGELQKGNELALPSKYVNFLYLASHYEKLKGSPEDNEQKQLFVEQHKHYLDEIIEQISEFSKRVILADANLDKVLSAYNKHRDKPIREQAENIIHLFTLTNLGAPAAFKYFDTTIDRKRYTSTKEVLDATLIHQSITGLYETRIDLSQLGGDGGGGGGSSGGTAPLEEEYRLFLEAPIQNVTLLEQWKREIPKVWAEINPPGLASTQAPIHVQLLSTALPVRVRQYPITLEAKRSLRETIRKFRAAGILRPVHSPWNTPLLPVRKSGTSEYRMVQDLREVNKRVETIHPTVPNPYTLLSLLPPDRIWYSVLDLKDAFFCIPLAPESQLIFAFEWADAEEGESGQLTWTRLPQGFKNSPTLFNEALNRDLQGFRLDHPSVSLLQYVDDLLIAADTQAACLSATRDLLMTLAELGYRVSGKKAQLCQEEVTYLGFKIHKGSRSLSNSRTQAILQIPVPKTKRQVREFLGTIGYCRLWIPGFAELAQPLYAATRPGNDPLVWGEKEEEAFQSLKLALTQPPALALPSLDKPFQLFVEETSGAAKGVLTQALGPWKRPVAYLSKRLDPVAAGWPRCLRAIAAAALLTREASKLTFGQDIEITSSHNLESLLRSPPDKWLTNARITQYQVLLLDPPRVRFKQTAALNPATLLPETDDTLPIHHCLDTLDSLTSTRPDLTDQPLAQAEATLFTDGSSYIRDGKRYAGAAVVTLDSVIWAEPLPIGTSAQKAELIALTKALEWSKDKSVNIYTDSRYAFATLHVHGMIYRERGWLTAGGKAIKNAPEILALLTAVWLPKRVAVMHCKGHQKDDAPTSTGNRRADEVAREVAIRPLSTQATISAGKRTADGSEFEKRTADGSEFESPKKKAKVE

SEQ ID NO: 6660 - protein, 2082 aa, synthetic construct
MPAAKRVKLDGGDKKYSIGLDIGTNSVGWAVITDEYKVPSKKFKVLGNTDRHSIKKNLIGALLFDSGETAEATRLKRTARRRYTRRKNRICYLQEIFSNEMAKVDDSFFHRLEESFLVEEDKKHERHPIFGNIVDEVAYHEKYPTIYHLRKKLVDSTDKADLRLIYLALAHMIKFRGHFLIEGDLNPDNSDVDKLFIQLVQTYNQLFEENPINASGVDAKAILSARLSKSRRLENLIAQLPGEKKNGLFGNLIALSLGLTPNFKSNFDLAEDAKLQLSKDTYDDDLDNLLAQIGDQYADLFLAAKNLSDAILLSDILRVNTEITKAPLSASMIKRYDEHHQDLTLLKALVRQQLPEKYKEIFFDQSKNGYAGYIDGGASQEEFYKFIKPILEKMDGTEELLVKLNREDLLRKQRTFDNGSIPHQIHLGELHAILRRQEDFYPFLKDNREKIEKILTFRIPYYVGPLARGNSRFAWMTRKSEETITPWNFEEVVDKGASAQSFIERMTNFDKNLPNEKVLPKHSLLYEYFTVYNELTKVKYVTEGMRKPAFLSGEQKKAIVDLLFKTNRKVTVKQLKEDYFKKIECFDSVEISGVEDRFNASLGTYHDLLKIIKDKDFLDNEENEDILEDIVLTLTLFEDREMIEERLKTYAHLFDDKVMKQLKRRRYTGWGRLSRKLINGIRDKQSGKTILDFLKSDGFANRNFMQLIHDDSLTFKEDIQKAQVSGQGDSLHEHIANLAGSPAIKKGILQTVKVVDELVKVMGRHKPENIVIEMARENQTTQKGQKNSRERMKRIEEGIKELGSQILKEHPVENTQLQNEKLYLYYLQNGRDMYVDQELDINRLSDYDVDHIVPQSFLKDDSIDNKVLTRSDKARGKSDNVPSEEVVKKMKNYWRQLLNAKLITQRKFDNLTKAERGGLSELDKAGFIKRQLVETRQITKHVAQILDSRMNTKYDENDKLIREVKVITLKSKLVSDFRKDFQFYKVREINNYHHAHDAYLNAVVGTALIKKYPKLESEFVYGDYKVYDVRKMIAKSEQEIGKATAKYFFYSNIMNFFKTEITLANGEIRKRPLIETNGETGEIVWDKGRDFATVRKVLSMPQVNIVKKTEVQTGGFSKESILPKRNSDKLIARKKDWDPKKYGGFDSPTVAYSVLVVAKVEKGKSKKLKSVKELLGITIMERSSFEKNPIDFLEAKGYKEVKKDLIIKLPKYSLFELENGRKRMLASAGELQKGNELALPSKYVNFLYLASHYEKLKGSPEDNEQKQLFVEQHKHYLDEIIEQISEFSKRVILADANLDKVLSAYNKHRDKPIREQAENIIHLFTLTNLGAPAAFKYFDTTIDRKRYTSTKEVLDATLIHQSITGLYETRIDLSQLGGDGGGGGGSSGGVPWILKKPLELTIKLDLEEQQGTLLNNSILSKKGKEELKQLFEKYSALWQSWENQVGHRRIRPHKIATGTVKPTPQKQYHINPKAKPDIQIVINDLLKQGVLIQKESTMNTPVYPVPKPNGRWRMVLDYRAVNKVTPLIAVQNQHSYGILGSLFKGRYKTTIDLSNGFWAHPIVPEDYWITAFTWQGKQYCWTVLPQGFLNSPGLFTGDVVDLLQGIPNVEVYVDDVYISHDSEKEHLEYLDILFNRLKEAGYIISLKKSNIANSIVDFLGFQITNEGRGLTDTFKEKLENITAPTTLKQLQSILGLLNFARNFIPDFTELIAPLYALIPKSTKNYVPWQIEHSTTLETLITKLNGAEYLQGRKGDKTLIMKVNASYTTGYIRYYNEGEKKPISYVSIVFSKTELKFTELEKLLTTVHKGLLKALDLSMGQNIHVYSPIVSMQNIQKTPQTAKKALASRWLSWLSYLEDPRIRFFYDPQMPALKDLPAVDTGKDNKKHPSNFQHIFYTDGSAITSPTKEGHLNAGMGIVYFINKDGNLQKQQEWSISLGNHTAQFAEIAAFEFALKKCLPLGGNILVVTDSNYVAKAYNEELDVWASNGFVNNRKKPLKHISKWKSVADLKRLRPDVVVTHEPGHQKLDSSPHAYGNNLADQLATQASFKVHAGKRTADGSEFEKRTADGSEFESPKKKAKVE

SEQ ID NO: 6661 - protein, 2091 aa, synthetic construct
MPAAKRVKLDGGDKKYSIGLDIGTNSVGWAVITDEYKVPSKKFKVLGNTDRHSIKKNLIGALLFDSGETAEATRLKRTARRRYTRRKNRICYLQEIFSNEMAKVDDSFFHRLEESFLVEEDKKHERHPIFGNIVDEVAYHEKYPTIYHLRKKLVDSTDKADLRLIYLALAHMIKFRGHFLIEGDLNPDNSDVDKLFIQLVQTYNQLFEENPINASGVDAKAILSARLSKSRRLENLIAQLPGEKKNGLFGNLIALSLGLTPNFKSNFDLAEDAKLQLSKDTYDDDLDNLLAQIGDQYADLFLAAKNLSDAILLSDILRVNTEITKAPLSASMIKRYDEHHQDLTLLKALVRQQLPEKYKEIFFDQSKNGYAGYIDGGASQEEFYKFIKPILEKMDGTEELLVKLNREDLLRKQRTFDNGSIPHQIHLGELHAILRRQEDFYPFLKDNREKIEKILTFRIPYYVGPLARGNSRFAWMTRKSEETITPWNFEEVVDKGASAQSFIERMTNFDKNLPNEKVLPKHSLLYEYFTVYNELTKVKYVTEGMRKPAFLSGEQKKAIVDLLFKTNRKVTVKQLKEDYFKKIECFDSVEISGVEDRFNASLGTYHDLLKIIKDKDFLDNEENEDILEDIVLTLTLFEDREMIEERLKTYAHLFDDKVMKQLKRRRYTGWGRLSRKLINGIRDKQSGKTILDFLKSDGFANRNFMQLIHDDSLTFKEDIQKAQVSGQGDSLHEHIANLAGSPAIKKGILQTVKVVDELVKVMGRHKPENIVIEMARENQTTQKGQKNSRERMKRIEEGIKELGSQILKEHPVENTQLQNEKLYLYYLQNGRDMYVDQELDINRLSDYDVDHIVPQSFLKDDSIDNKVLTRSDKARGKSDNVPSEEVVKKMKNYWRQLLNAKLITQRKFDNLTKAERGGLSELDKAGFIKRQLVETRQITKHVAQILDSRMNTKYDENDKLIREVKVITLKSKLVSDFRKDFQFYKVREINNYHHAHDAYLNAVVGTALIKKYPKLESEFVYGDYKVYDVRKMIAKSEQEIGKATAKYFFYSNIMNFFKTEITLANGEIRKRPLIETNGETGEIVWDKGRDFATVRKVLSMPQVNIVKKTEVQTGGFSKESILPKRNSDKLIARKKDWDPKKYGGFDSPTVAYSVLVVAKVEKGKSKKLKSVKELLGITIMERSSFEKNPIDFLEAKGYKEVKKDLIIKLPKYSLFELENGRKRMLASAGELQKGNELALPSKYVNFLYLASHYEKLKGSPEDNEQKQLFVEQHKHYLDEIIEQISEFSKRVILADANLDKVLSAYNKHRDKPIREQAENIIHLFTLTNLGAPAAFKYFDTTIDRKRYTSTKEVLDATLIHQSITGLYETRIDLSQLGGDGGGGGGSSGGTLGIEDEYRLHETSTEPDVSLGSTWLSDFPQAWAETGGMGLAVRQAPLIIPLKATSTPVSIQQYPMSHEARLGIKPHIQRLLDQGILVPCQSPWNTPLLPVKKPGTNDYRPVQDLREVNKRVEDIHPTVPNPYNLLSGLPPSHQWYTVLDLKDAFFCLRLHPTSQPLFAFEWRDPGMGISGQLTWTRLPQGFKNSPTLFDEALHRDLADFRIQHPDLILLQYVDDILLAATSELDCQQGTRALLQTLGDLGYRASAKKAQICQKQVKYLGYLLREGQRWLTEARKETVMGQPVPKTPRQLREFLGTAGFCRLWIPGFAEMAAPLYPLTKTGTLFSWGPDQQKAYQEIKQALLTAPALGLPDLTKPFELFVDEKQGYAKGVLTQKLGPWRRPVAYLSKKLDPVAAGWPPCLRMVAAIAVLTKDAGKLTMGQPLVILAPHAVEALVKQPPDRWLSNARMTHYQAMLLDTDRVQFGPVVALNPATLLPLPEEGAPHDCLEILAETHGTRPDLTDQPIPDADHTWYTDGSSFLQEGQRKAGAAVTTETEVIWAGALPAGTSAQRAELIALTQALKMAEGKRLNVYTDSRYAFATAHIHGEIYRRRGLLTSEGREIKNKSEILALLKALFLPKRLSIIHCLGHQKGDSAEARGNRLADQAAREAAIKTPPDTSTLLAGKRTADGSEFEKRTADGSEFESPKKKAKVE

SEQ ID NO: 6662 - protein, 2091 aa, synthetic construct
MPAAKRVKLDGGDKKYSIGLDIGTNSVGWAVITDEYKVPSKKFKVLGNTDRHSIKKNLIGALLFDSGETAEATRLKRTARRRYTRRKNRICYLQEIFSNEMAKVDDSFFHRLEESFLVEEDKKHERHPIFGNIVDEVAYHEKYPTIYHLRKKLVDSTDKADLRLIYLALAHMIKFRGHFLIEGDLNPDNSDVDKLFIQLVQTYNQLFEENPINASGVDAKAILSARLSKSRRLENLIAQLPGEKKNGLFGNLIALSLGLTPNFKSNFDLAEDAKLQLSKDTYDDDLDNLLAQIGDQYADLFLAAKNLSDAILLSDILRVNTEITKAPLSASMIKRYDEHHQDLTLLKALVRQQLPEKYKEIFFDQSKNGYAGYIDGGASQEEFYKFIKPILEKMDGTEELLVKLNREDLLRKQRTFDNGSIPHQIHLGELHAILRRQEDFYPFLKDNREKIEKILTFRIPYYVGPLARGNSRFAWMTRKSEETITPWNFEEVVDKGASAQSFIERMTNFDKNLPNEKVLPKHSLLYEYFTVYNELTKVKYVTEGMRKPAFLSGEQKKAIVDLLFKTNRKVTVKQLKEDYFKKIECFDSVEISGVEDRFNASLGTYHDLLKIIKDKDFLDNEENEDILEDIVLTLTLFEDREMIEERLKTYAHLFDDKVMKQLKRRRYTGWGRLSRKLINGIRDKQSGKTILDFLKSDGFANRNFMQLIHDDSLTFKEDIQKAQVSGQGDSLHEHIANLAGSPAIKKGILQTVKVVDELVKVMGRHKPENIVIEMARENQTTQKGQKNSRERMKRIEEGIKELGSQILKEHPVENTQLQNEKLYLYYLQNGRDMYVDQELDINRLSDYDVDHIVPQSFLKDDSIDNKVLTRSDKARGKSDNVPSEEVVKKMKNYWRQLLNAKLITQRKFDNLTKAERGGLSELDKAGFIKRQLVETRQITKHVAQILDSRMNTKYDENDKLIREVKVITLKSKLVSDFRKDFQFYKVREINNYHHAHDAYLNAVVGTALIKKYPKLESEFVYGDYKVYDVRKMIAKSEQEIGKATAKYFFYSNIMNFFKTEITLANGEIRKRPLIETNGETGEIVWDKGRDFATVRKVLSMPQVNIVKKTEVQTGGFSKESILPKRNSDKLIARKKDWDPKKYGGFDSPTVAYSVLVVAKVEKGKSKKLKSVKELLGITIMERSSFEKNPIDFLEAKGYKEVKKDLIIKLPKYSLFELENGRKRMLASAGELQKGNELALPSKYVNFLYLASHYEKLKGSPEDNEQKQLFVEQHKHYLDEIIEQISEFSKRVILADANLDKVLSAYNKHRDKPIREQAENIIHLFTLTNLGAPAAFKYFDTTIDRKRYTSTKEVLDATLIHQSITGLYETRIDLSQLGGDGGGGGGSSGGTLNIEDEYRLHETSKEPDVSLGSTWLSDFPQAWAETGGMGLAVRQAPLIIPLKATSTPVSIKQYPMSQEARLGIKPHIQRLLDQGILVPCQSPWNTPLLPVKKPGTNDYRPVQDLREVNKRVEDIHPTVPNPYNLLSGLPPSHQWYTVLDLKDAFFCLRLHPTSQPLFAFEWRDPEMGISGQLTWTRLPQGFKNSPTLFNEALHRDLAGFRIQHPDLILLQYVDDLLLAATSELDCQQGTRALLQTLGDLGYRASAKKAQICQKQVKYLGYLLKEGQRWLTEARKETVMGQPIPKTPRQLREFLGTAGFCRLWIPGFAEMAAPLYPLTKPGTLFNWGPDQQKAFQEIKQALLTAPALGLPDLTKPFELFVDEKQGYAKGVLTQKLGPWRRPVAYLSKKLDPVAAGWPPCLRMVAAIAVLTKDAGKLTMGQPLVILAPHAVEALVKQPPDRWLSNARMTHYQALLLDTDRVQFGPVVALNPATLLPLPEEGLQHDCLDILAEAHGTRSDLMDQPLPDADHTWYTDGSSFLQEGQRKAGAAVTTETEVIWARALPAGTSAQRAELIALTQALKMAEGKKLNVYTDSRYAFATAHIHGEIYRRRGWLTSEGKEIKNKDEILALLKALFLPKRLSIIHCPGHQKGNSAEARGNRMADQAAREVATRETPETSTLLAGKRTADGSEFEKRTADGSEFESPKKKAKVE

SEQ ID NO: 6663 - protein, 2091 aa, synthetic construct
MPAAKRVKLDGGDKKYSIGLDIGTNSVGWAVITDEYKVPSKKFKVLGNTDRHSIKKNLIGALLFDSGETAEATRLKRTARRRYTRRKNRICYLQEIFSNEMAKVDDSFFHRLEESFLVEEDKKHERHPIFGNIVDEVAYHEKYPTIYHLRKKLVDSTDKADLRLIYLALAHMIKFRGHFLIEGDLNPDNSDVDKLFIQLVQTYNQLFEENPINASGVDAKAILSARLSKSRRLENLIAQLPGEKKNGLFGNLIALSLGLTPNFKSNFDLAEDAKLQLSKDTYDDDLDNLLAQIGDQYADLFLAAKNLSDAILLSDILRVNTEITKAPLSASMIKRYDEHHQDLTLLKALVRQQLPEKYKEIFFDQSKNGYAGYIDGGASQEEFYKFIKPILEKMDGTEELLVKLNREDLLRKQRTFDNGSIPHQIHLGELHAILRRQEDFYPFLKDNREKIEKILTFRIPYYVGPLARGNSRFAWMTRKSEETITPWNFEEVVDKGASAQSFIERMTNFDKNLPNEKVLPKHSLLYEYFTVYNELTKVKYVTEGMRKPAFLSGEQKKAIVDLLFKTNRKVTVKQLKEDYFKKIECFDSVEISGVEDRFNASLGTYHDLLKIIKDKDFLDNEENEDILEDIVLTLTLFEDREMIEERLKTYAHLFDDKVMKQLKRRRYTGWGRLSRKLINGIRDKQSGKTILDFLKSDGFANRNFMQLIHDDSLTFKEDIQKAQVSGQGDSLHEHIANLAGSPAIKKGILQTVKVVDELVKVMGRHKPENIVIEMARENQTTQKGQKNSRERMKRIEEGIKELGSQILKEHPVENTQLQNEKLYLYYLQNGRDMYVDQELDINRLSDYDVDHIVPQSFLKDDSIDNKVLTRSDKARGKSDNVPSEEVVKKMKNYWRQLLNAKLITQRKFDNLTKAERGGLSELDKAGFIKRQLVETRQITKHVAQILDSRMNTKYDENDKLIREVKVITLKSKLVSDFRKDFQFYKVREINNYHHAHDAYLNAVVGTALIKKYPKLESEFVYGDYKVYDVRKMIAKSEQEIGKATAKYFFYSNIMNFFKTEITLANGEIRKRPLIETNGETGEIVWDKGRDFATVRKVLSMPQVNIVKKTEVQTGGFSKESILPKRNSDKLIARKKDWDPKKYGGFDSPTVAYSVLVVAKVEKGKSKKLKSVKELLGITIMERSSFEKNPIDFLEAKGYKEVKKDLIIKLPKYSLFELENGRKRMLASAGELQKGNELALPSKYVNFLYLASHYEKLKGSPEDNEQKQLFVEQHKHYLDEIIEQISEFSKRVILADANLDKVLSAYNKHRDKPIREQAENIIHLFTLTNLGAPAAFKYFDTTIDRKRYTSTKEVLDATLIHQSITGLYETRIDLSQLGGDGGGGGGSSGGTLNIEDEHRLHETSKEPDVSLGSTWLSDFPQAWAETGGMGLAVRQAPLIIPLKATSTPVSIKQYPMSQEARLGIKPHIQRLLDQGILVPCQSPWNTPLLPVKKPGTNDYRPVQDLREVNKRVEDIHPTVPNPYNLLSGLPPSHQWYTVLDLKDAFFCLRLHPTSQPLFAFEWRDPEMGISGQLTWTRLPQGFKNSPTLFNEALHRDLADFRIQHPDLILLQYVDDLLLAATSELDCQQGTRALLQTLGNLGYRASAKKAQICQKQVKYLGYLLKEGQRWLTEARKETVMGQPTPKTPRQLREFLGTAGFCRLWIPGFAEMAAPLYPLTKPGTLFNWGPDQQKAYQEIKQALLTAPALGLPDLTKPFELFVDEKQGYAKGVLTQKLGPWRRPVAYLSKKLDPVAAGWPPCLRMVAAIAVLTKDAGKLTMGQPLVILAPHAVEALVKQPPDRWLSNARMTHYQALLLDTDRVQFGPVVALNPATLLPLPEEGLQHNCLDILAEAHGTRPDLTDQPLPDADHTWYTDGSSLLQEGQRKAGAAVTTETEVIWAKALPAGTSAQRAELIALTQALKMAEGKKLNVYTDSRYAFATAHIHGEIYRRRGWLTSEGKEIKNKDEILALLKALFLPKRLSIIHCPGHQKGHSAEARGNRMADQAARKAAITETPDTSTLLAGKRTADGSEFEKRTADGSEFESPKKKAKVE

SEQ ID NO: 6664 - protein, 2091 aa, synthetic construct; identical to SEQ ID NO: 6663

SEQ ID NO: 6665 - protein, 2083 aa, synthetic construct
MPAAKRVKLDGGDKKYSIGLDIGTNSVGWAVITDEYKVPSKKFKVLGNTDRHSIKKNLIGALLFDSGETAEATRLKRTARRRYTRRKNRICYLQEIFSNEMAKVDDSFFHRLEESFLVEEDKKHERHPIFGNIVDEVAYHEKYPTIYHLRKKLVDSTDKADLRLIYLALAHMIKFRGHFLIEGDLNPDNSDVDKLFIQLVQTYNQLFEENPINASGVDAKAILSARLSKSRRLENLIAQLPGEKKNGLFGNLIALSLGLTPNFKSNFDLAEDAKLQLSKDTYDDDLDNLLAQIGDQYADLFLAAKNLSDAILLSDILRVNTEITKAPLSASMIKRYDEHHQDLTLLKALVRQQLPEKYKEIFFDQSKNGYAGYIDGGASQEEFYKFIKPILEKMDGTEELLVKLNREDLLRKQRTFDNGSIPHQIHLGELHAILRRQEDFYPFLKDNREKIEKILTFRIPYYVGPLARGNSRFAWMTRKSEETITPWNFEEVVDKGASAQSFIERMTNFDKNLPNEKVLPKHSLLYEYFTVYNELTKVKYVTEGMRKPAFLSGEQKKAIVDLLFKTNRKVTVKQLKEDYFKKIECFDSVEISGVEDRFNASLGTYHDLLKIIKDKDFLDNEENEDILEDIVLTLTLFEDREMIEERLKTYAHLFDDKVMKQLKRRRYTGWGRLSRKLINGIRDKQSGKTILDFLKSDGFANRNFMQLIHDDSLTFKEDIQKAQVSGQGDSLHEHIANLAGSPAIKKGILQTVKVVDELVKVMGRHKPENIVIEMARENQTTQKGQKNSRERMKRIEEGIKELGSQILKEHPVENTQLQNEKLYLYYLQNGRDMYVDQELDINRLSDYDVDHIVPQSFLKDDSIDNKVLTRSDKARGKSDNVPSEEVVKKMKNYWRQLLNAKLITQRKFDNLTKAERGGLSELDKAGFIKRQLVETRQITKHVAQILDSRMNTKYDENDKLIREVKVITLKSKLVSDFRKDFQFYKVREINNYHHAHDAYLNAVVGTALIKKYPKLESEFVYGDYKVYDVRKMIAKSEQEIGKATAKYFFYSNIMNFFKTEITLANGEIRKRPLIETNGETGEIVWDKGRDFATVRKVLSMPQVNIVKKTEVQTGGFSKESILPKRNSDKLIARKKDWDPKKYGGFDSPTVAYSVLVVAKVEKGKSKKLKSVKELLGITIMERSSFEKNPIDFLEAKGYKEVKKDLIIKLPKYSLFELENGRKRMLASAGELQKGNELALPSKYVNFLYLASHYEKLKGSPEDNEQKQLFVEQHKHYLDEIIEQISEFSKRVILADANLDKVLSAYNKHRDKPIREQAENIIHLFTLTNLGAPAAFKYFDTTIDRKRYTSTKEVLDATLIHQSITGLYETRIDLSQLGGDGGGGGGSSGGLDDEYRLYSPLVKPDQNIQFWLEQFPQAWAETAGMGLAKQVPPQVIQLKASATPVSVRQYPLSKEAQEGIRPHVQRLIQQGILVPVQSPWNTPLLPVRKPGTNDYRPVQDLREVNKRVQDIHPTVPNPYNLLCALPPQRSWYTVLDLKDAFFCLRLHPTSQPLFAFEWRDPGTGRTGQLTWTRLPQGFKNSPTIFNEALHRDLANFRIQHPQVTLLQYVDDLLLAGATKQDCLEGTKALLLELSDLGYRASAKKAQICRREVTYLGYSLRDGQRWLTEARKKTVVQIPAPTTAKQVREFLGKAGFCRLFIPGFATLAAPLYPLTKPKGEFSWAPEHQKAFDAIKKALLSAPALALPDVTKPFTLYVDERKGVARGVLTQTLGPWRRPVAYLSKKLDPVASGWPVCLKAIAAVAILVKDADKLTLGQNITVIAPHALENIVRQPPDRWMTNARMTHYQSLLLTERVTFAPPAALNPATLLPEETDEPVTHDCHQLLIEETGVRKDLTDIPLTGEVLTWFTDGSSYVVEGKRMAGAAVVDGTRTIWASSLPEGTSAQKAELMALTQALRLAEGKSINIYTDSRYAFATAHVHGAIYKQRGWLTSAGREIKNKEEILSLLEALHLPKRLAIIHCPGHQKAKDPISRGNQMADRVAKQAAQGVNLLPAGKRTADGSEFEKRTADGSEFESPKKKAKVE

SEQ ID NO: 6666 - protein, 2083 aa, synthetic construct; identical to SEQ ID NO: 6665

SEQ ID NO: 6667 - protein, 2082 aa, synthetic construct
MPAAKRVKLDGGDKKYSIGLDIGTNSVGWAVITDEYKVPSKKFKVLGNTDRHSIKKNLIGALLFDSGETAEATRLKRTARRRYTRRKNRICYLQEIFSNEMAKVDDSFFHRLEESFLVEEDKKHERHPIFGNIVDEVAYHEKYPTIYHLRKKLVDSTDKADLRLIYLALAHMIKFRGHFLIEGDLNPDNSDVDKLFIQLVQTYNQLFEENPINASGVDAKAILSARLSKSRRLENLIAQLPGEKKNGLFGNLIALSLGLTPNFKSNFDLAEDAKLQLSKDTYDDDLDNLLAQIGDQYADLFLAAKNLSDAILLSDILRVNTEITKAPLSASMIKRYDEHHQDLTLLKALVRQQLPEKYKEIFFDQSKNGYAGYIDGGASQEEFYKFIKPILEKMDGTEELLVKLNREDLLRKQRTFDNGSIPHQIHLGELHAILRRQEDFYPFLKDNREKIEKILTFRIPYYVGPLARGNSRFAWMTRKSEETITPWNFEEVVDKGASAQSFIERMTNFDKNLPNEKVLPKHSLLYEYFTVYNELTKVKYVTEGMRKPAFLSGEQKKAIVDLLFKTNRKVTVKQLKEDYFKKIECFDSVEISGVEDRFNASLGTYHDLLKIIKDKDFLDNEENEDILEDIVLTLTLFEDREMIEERLKTYAHLFDDKVMKQLKRRRYTGWGRLSRKLINGIRDKQSGKTILDFLKSDGFANRNFMQLIHDDSLTFKEDIQKAQVSGQGDSLHEHIANLAGSPAIKKGILQTVKVVDELVKVMGRHKPENIVIEMARENQTTQKGQKNSRERMKRIEEGIKELGSQILKEHPVENTQLQNEKLYLYYLQNGRDMYVDQELDINRLSDYDVDHIVPQSFLKDDSIDNKVLTRSDKARGKSDNVPSEEVVKKMKNYWRQLLNAKLITQRKFDNLTKAERGGLSELDKAGFIKRQLVETRQITKHVAQILDSRMNTKYDENDKLIREVKVITLKSKLVSDFRKDFQFYKVREINNYHHAHDAYLNAVVGTALIKKYPKLESEFVYGDYKVYDVRKMIAKSEQEIGKATAKYFFYSNIMNFFKTEITLANGEIRKRPLIETNGETGEIVWDKGRDFATVRKVLSMPQVNIVKKTEVQTGGFSKESILPKRNSDKLIARKKDWDPKKYGGFDSPTVAYSVLVVAKVEKGKSKKLKSVKELLGITIMERSSFEKNPIDFLEAKGYKEVKKDLIIKLPKYSLFELENGRKRMLASAGELQKGNELALPSKYVNFLYLASHYEKLKGSPEDNEQKQLFVEQHKHYLDEIIEQISEFSKRVILADANLDKVLSAYNKHRDKPIREQAENIIHLFTLTNLGAPAAFKYFDTTIDRKRYTSTKEVLDATLIHQSITGLYETRIDLSQLGGDGGGGGGSSGGIPWLMKKPLQLTTLVPLQEYEERLLKQTMLTGSYKEKLQSLFLKYDALWQHWENQVGHRRIKPHHIATGTVNPRPQKQYPINPKAKASIQTVINDLLKQGVLIQQNSIMNTPVYPVPKPDGKWRMVLDYREVNKTIPLIAAQNQHSAGILSSIFRGKYKTTLDLSNGFWAHSITPESYWLTAFTWLGQQYCWTRLPQGFLNSPALFNADVVDLLKEVPNVQVYVDDIYISHDDPREHLEQLEKVFSLLLNAGYVVSLKKSEIAQHEVEFLGFNITKEGRGLTETFKQKLLNITPPRDLKQLQSILGLLNFARNFIPNFSELVKPLYNIIATAPGKYITWTTDNSQQLQNIISMLNSAENLEERNPEVRLIMKVNTSPSAGYIRFYNEFAKRPIMYLNYVYTKAEVKFTNTEKLLTTIHKGLIKALDLGMGQEILVYSPIVSMTKIQKTPLPERKALPIRWITWMSYLEDPRIQFHYDKTLPELQQVPTVTDDIIAKIKHPSEFSMVFYTDGSAIKHPNVNKSHNAGMGIAQVQFKPEFTVINTWSIPLGDHTAQLAEVAAVEFACKKALKIDGPVLIVTDSFYVAESVNKELPYWQSNGFFNNKKKPLKHVSKWKSIADCIQLKPDIIIIHEKGHQPTASTFHTEGNNLADKLATQGSYVVNAGKRTADGSEFEKRTADGSEFESPKKKAKVE

SEQ ID NO: 6668 - protein, 2089 aa, synthetic construct
MPAAKRVKLDGGDKKYSIGLDIGTNSVGWAVITDEYKVPSKKFKVLGNTDRHSIKKNLIGALLFDSGETAEATRLKRTARRRYTRRKNRICYLQEIFSNEMAKVDDSFFHRLEESFLVEEDKKHERHPIFGNIVDEVAYHEKYPTIYHLRKKLVDSTDKADLRLIYLALAHMIKFRGHFLIEGDLNPDNSDVDKLFIQLVQTYNQLFEENPINASGVDAKAILSARLSKSRRLENLIAQLPGEKKNGLFGNLIALSLGLTPNFKSNFDLAEDAKLQLSKDTYDDDLDNLLAQIGDQYADLFLAAKNLSDAILLSDILRVNTEITKAPLSASMIKRYDEHHQDLTLLKALVRQQLPEKYKEIFFDQSKNGYAGYIDGGASQEEFYKFIKPILEKMDGTEELLVKLNREDLLRKQRTFDNGSIPHQIHLGELHAILRRQEDFYPFLKDNREKIEKILTFRIPYYVGPLARGNSRFAWMTRKSEETITPWNFEEVVDKGASAQSFIERMTNFDKNLPNEKVLPKHSLLYEYFTVYNELTKVKYVTEGMRKPAFLSGEQKKAIVDLLFKTNRKVTVKQLKEDYFKKIECFDSVEISGVEDRFNASLGTYHDLLKIIKDKDFLDNEENEDILEDIVLTLTLFEDREMIEERLKTYAHLFDDKVMKQLKRRRYTGWGRLSRKLINGIRDKQSGKTILDFLKSDGFANRNFMQLIHDDSLTFKEDIQKAQVSGQGDSLHEHIANLAGSPAIKKGILQTVKVVDELVKVMGRHKPENIVIEMARENQTTQKGQKNSRERMKRIEEGIKELGSQILKEHPVENTQLQNEKLYLYYLQNGRDMYVDQELDINRLSDYDVDHIVPQSFLKDDSIDNKVLTRSDKARGKSDNVPSEEVVKKMKNYWRQLLNAKLITQRKFDNLTKAERGGLSELDKAGFIKRQLVETRQITKHVAQILDSRMNTKYDENDKLIREVKVITLKSKLVSDFRKDFQFYKVREINNYHHAHDAYLNAVVGTALIKKYPKLESEFVYGDYKVYDVRKMIAKSEQEIGKATAKYFFYSNIMNFFKTEITLANGEIRKRPLIETNGETGEIVWDKGRDFATVRKVLSMPQVNIVKKTEVQTGGFSKESILPKRNSDKLIARKKDWDPKKYGGFDSPTVAYSVLVVAKVEKGKSKKLKSVKELLGITIMERSSFEKNPIDFLEAKGYKEVKKDLIIKLPKYSLFELENGRKRMLASAGELQKGNELALPSKYVNFLYLASHYEKLKGSPEDNEQKQLFVEQHKHYLDEIIEQISEFSKRVILADANLDKVLSAYNKHRDKPIREQAENIIHLFTLTNLGAPAAFKYFDTTIDRKRYTSTKEVLDATLIHQSITGLYETRIDLSQLGGDGGGGGGSSGGVLNLEEEYRLHEKPVPSSIDPSWLQLFPTVWAERAGMGLANQVPPVVVELRSGASPVAVRQYPMSKEAREGIRPHIQRFLDLGVLVPCQSPWNTPLLPVKKPGTNDYRPVQDLREINKRVQDIHPTVPNPYNLLSSLPPSHTWYSVLDLKDAFFCLKLHPNSQPLFAFEWRDPEKGNTGQLTWTRLPQGFKNSPTLFNEALHRDLAPFRALNPQVVLLQYVDDLLVAAPTYRDCKEGTQKLLQELSKLGYRVSAKKAQLCQKEVTYLGYLLKEGKRWLTPARKATVMKIPPPTTPRQVREFLGTAGFCRLWIPGFASLAAPLYPLTKPSIPFIWTEEHQKAFDRIKEALLSAPALALPDLTKPFTLYVDERAGVARGVLTQTLGPWRRPVAYLSKKLDPVASGWPTCLKAVAAVALLLKDADKLTLGQNVTVIASHSLESIVRQPPDRWMTNARMTHYQSLLLNERVSFAPPAVLNPATLLPVESEATPVHRCSEILAEETGTRRDLKDQPLPGVPAWYTDGSSFIAEGKRRAGAAIVDGKRTVWASSLPEGTSAQKAELVALTQALRLAEGKDINIYTDSRYAFATAHIHGAIYKQRGWLTSAGKDIKNKEEILALLEAIHLPKRVAIIHCPGHQKGNDPVATGNRRADEAAKQAALSTRVLAETTKPAGKRTADGSEFEKRTADGSEFESPKKKAKVE

SEQ ID NO: 6669 - protein, 2089 aa, synthetic construct
MPAAKRVKLDGGDKKYSIGLDIGTNSVGWAVITDEYKVPSKKFKVLGNTDRHSIKKNLIGALLFDSGETAEATRLKRTARRRYTRRKNRICYLQEIFSNEMAKVDDSFFHRLEESFLVEEDKKHERHPIFGNIVDEVAYHEKYPTIYHLRKKLVDSTDKADLRLIYLALAHMIKFRGHFLIEGDLNPDNSDVDKLFIQLVQTYNQLFEENPINASGVDAKAILSARLSKSRRLENLIAQLPGEKKNGLFGNLIALSLGLTPNFKSNFDLAEDAKLQLSKDTYDDDLDNLLAQIGDQYADLFLAAKNLSDAILLSDILRVNTEITKAPLSASMIKRYDEHHQDLTLLKALVRQQLPEKYKEIFFDQSKNGYAGYIDGGASQEEFYKFIKPILEKMDGTEELLVKLNREDLLRKQRTFDNGSIPHQIHLGELHAILRRQEDFYPFLKDNREKIEKILTFRIPYYVGPLARGNSRFAWMTRKSEETITPWNFEEVVDKGASAQSFIERMTNFDKNLPNEKVLPKHSLLYEYFTVYNELTKVKYVTEGMRKPAFLSGEQKKAIVDLLFKTNRKVTVKQLKEDYFKKIECFDSVEISGVEDRFNASLGTYHDLLKIIKDKDFLDNEENEDILEDIVLTLTLFEDREMIEERLKTYAHLFDDKVMKQLKRRRYTGWGRLSRKLINGIRDKQSGKTILDFLKSDGFANRNFMQLIHDDSLTFKEDIQKAQVSGQGDSLHEHIANLAGSPAIKKGILQTVKVVDELVKVMGRHKPENIVIEMARENQTTQKGQKNSRERMKRIEEGIKELGSQILKEHPVENTQLQNEKLYLYYLQNGRDMYVDQELDINRLSDYDVDHIVPQSFLKDDSIDNKVLTRSDKARGKSDNVPSEEVVKKMKNYWRQLLNAKLITQRKFDNLTKAERGGLSELDKAGFIKRQLVETRQITKHVAQILDSRMNTKYDENDKLIREVKVITLKSKLVSDFRKDFQFYKVREINNYHHAHDAYLNAVVGTALIKKYPKLESEFVYGDYKVYDVRKMIAKSEQEIGKATAKYFFYSNIMNFFKTEITLANGEIRKRPLIETNGETGEIVWDKGRDFATVRKVLSMPQVNIVKKTEVQTGGFSKESILPKRNSDKLIARKKDWDPKKYGGFDSPTVAYSVLVVAKVEKGKSKKLKSVKELLGITIMERSSFEKNPIDFLEAKGYKEVKKDLIIKLPKYSLFELENGRKRMLASAGELQKGNELALPSKYVNFLYLASHYEKLKGSPEDNEQKQLFVEQHKHYLDEIIEQISEFSKRVILADANLDKVLSAYNKHRDKPIREQAENIIHLFTLTNLGAPAAFKYFDTTIDRKRYTSTKEVLDATLIHQSITGLYETRIDLSQLGGDGGGGGGSSGGVLNLEEEYRLHEKPVPSSIDPSWLQLFPTVWAERAGMGLANQVPPVVVELRSGASPVAVRQYPMSKEAREGIRPHIQRFLDLGVLVPCQSPWNTPLLPVKKPGTNDYRPVQDLREINKRVQDIHPTVPNPYNLLSSLPPSHTWYSVLDLKDAFFCLKLHPNSQPLFAFEWRDPEKGNTGQLTWTRLPQGFKNSPTLFNEALHRDLAPFRALNPQVVLLQYVDDLLVAAPTYRDCKEGTQKLLQELSKLGYRVSAKKAQLCQKEVTYLGYLLKEGKRWLTPARKATVMKIPPPTTPRQVREFLGKAGFCRLFIPGFASLAAPLYPLTKPSIPFIWTEEHQKAFDRIKEALLSAPALALPDLTKPFTLYVDERAGVARGVLTQTLGPWRRPVAYLSKKLDPVASGWPTCLKAVAAVALLLKDADKLTLGQNVTVIASHSLESIVRQPPDRWMTNARMTHYQSLLLNERVSFAPPAVLNPATLLPVESEATPVHRCSEILAEETGTRRDLKDQPLPGVPAWYTDGSSFIAEGKRRAGAAIVDGKRTVWASSLPEGTSAQKAELVALTQALRLAEGKDINIYTDSRYAFATAHIHGAIYKQRGWLTSAGKDIKNKEEILALLEAIHLPKRVAIIHCPGHQKGNDPVATGNRRADEAAKQAALSTRVLAETTKPAGKRTADGSEFEKRTADGSEFESPKKKAKVE

SEQ ID NO: 6670 - protein, 2091 aa, synthetic construct
MPAAKRVKLDGGDKKYSIGLDIGTNSVGWAVITDEYKVPSKKFKVLGNTDRHSIKKNLIGALLFDSGETAEATRLKRTARRRYTRRKNRICYLQEIFSNEMAKVDDSFFHRLEESFLVEEDKKHERHPIFGNIVDEVAYHEKYPTIYHLRKKLVDSTDKADLRLIYLALAHMIKFRGHFLIEGDLNPDNSDVDKLFIQLVQTYNQLFEENPINASGVDAKAILSARLSKSRRLENLIAQLPGEKKNGLFGNLIALSLGLTPNFKSNFDLAEDAKLQLSKDTYDDDLDNLLAQIGDQYADLFLAAKNLSDAILLSDILRVNTEITKAPLSASMIKRYDEHHQDLTLLKALVRQQLPEKYKEIFFDQSKNGYAGYIDGGASQEEFYKFIKPILEKMDGTEELLVKLNREDLLRKQRTFDNGSIPHQIHLGELHAILRRQEDFYPFLKDNREKIEKILTFRIPYYVGPLARGNSRFAWMTRKSEETITPWNFEEVVDKGASAQSFIERMTNFDKNLPNEKVLPKHSLLYEYFTVYNELTKVKYVTEGMRKPAFLSGEQKKAIVDLLFKTNRKVTVKQLKEDYFKKIECFDSVEISGVEDRFNASLGTYHDLLKIIKDKDFLDNEENEDILEDIVLTLTLFEDREMIEERLKTYAHLFDDKVMKQLKRRRYTGWGRLSRKLINGIRDKQSGKTILDFLKSDGFANRNFMQLIHDDSLTFKEDIQKAQVSGQGDSLHEHIANLAGSPAIKKGILQTVKVVDELVKVMGRHKPENIVIEMARENQTTQKGQKNSRERMKRIEEGIKELGSQILKEHPVENTQLQNEKLYLYYLQNGRDMYVDQELDINRLSDYDVDHIVPQSFLKDDSIDNKVLTRSDKARGKSDNVPSEEVVKKMKNYWRQLLNAKLITQRKFDNLTKAERGGLSELDKAGFIKRQLVETRQITKHVAQILDSRMNTKYDENDKLIREVKVITLKSKLVSDFRKDFQFYKVREINNYHHAHDAYLNAVVGTALIKKYPKLESEFVYGDYKVYDVRKMIAKSEQEIGKATAKYFFYSNIMNFFKTEITLANGEIRKRPLIETNGETGEIVWDKGRDFATVRKVLSMPQVNIVKKTEVQTGGFSKESILPKRNSDKLIARKKDWDPKKYGGFDSPTVAYSVLVVAKVEKGKSKKLKSVKELLGITIMERSSFEKNPIDFLEAKGYKEVKKDLIIKLPKYSLFELENGRKRMLASAGELQKGNELALPSKYVNFLYLASHYEKLKGSPEDNEQKQLFVEQHKHYLDEIIEQISEFSKRVILADANLDKVLSAYNKHRDKPIREQAENIIHLFTLTNLGAPAAFKYFDTTIDRKRYTSTKEVLDATLIHQSITGLYETRIDLSQLGGDGGGGGGSSGGTLNIEDEYRLHETSKEPDVPLGSTWLSDFPQAWAETGGMGLAVRQAPLIIPLKATSTPVSIKQYPMSQEARLGIKPHIQRLLDQGILVPCQSPWNTPLLPVKKPGTNDYRPVQDLREVNKRVEDIHPTVPNPYNLLSGLPPSHQWYTVLDLKDAFFCLRLHPTSQPLFAFEWRDPEMGISGQLTWTRLPQGFKNSPTLFNEALHRDLADFRIQHPDLILLQYVDDLLLAATSEQDCQRGTRALLQTLGNLGYRASAKKAQICQKQVKYLGYLLKEGQRWLTEARKETVMGQPTPKTPRQLREFLGTAGFCRLWIPGFAEMAAPLYPLTKPGTLFNWGPDQQKAYQEIKQALLTAPALGLPDLTKPFELFVDEKQGYAKGVLTQKLGPWRRPVAYLSKKLDPVAAGWPPCLRMVAAIAVLTKDAGKLTMGQPLVILAPHAVEALVKQPPDRWLSNARMTHYQAMLLDTDRVQFGPVVALNPATLLPLPEKEAPHDCLEILAETHGTRPDLTDQPIPDADYTWYTDGSSFLQEGQRRAGAAVTTETEVIWARALPAGTSAQRAELIALTQALKMAEGKKLNVYTDSRYAFATAHVHGEIYRRRGWLTSEGREIKNKNEILALLKALFLPKRLSIIHCPGHQKGNSAEARGNRMADQAAREAAMKAVLETSTLLAGKRTADGSEFEKRTADGSEFESPKKKAKVE

SEQ ID NO: 6671 - protein, 2093 aa, synthetic construct
MPAAKRVKLDGGDKKYSIGLDIGTNSVGWAVITDEYKVPSKKFKVLGNTDRHSIKKNLIGALLFDSGETAEATRLKRTARRRYTRRKNRICYLQEIFSNEMAKVDDSFFHRLEESFLVEEDKKHERHPIFGNIVDEVAYHEKYPTIYHLRKKLVDSTDKADLRLIYLALAHMIKFRGHFLIEGDLNPDNSDVDKLFIQLVQTYNQLFEENPINASGVDAKAILSARLSKSRRLENLIAQLPGEKKNGLFGNLIALSLGLTPNFKSNFDLAEDAKLQLSKDTYDDDLDNLLAQIGDQYADLFLAAKNLSDAILLSDILRVNTEITKAPLSASMIKRYDEHHQDLTLLKALVRQQLPEKYKEIFFDQSKNGYAGYIDGGASQEEFYKFIKPILEKMDGTEELLVKLNREDLLRKQRTFDNGSIPHQIHLGELHAILRRQEDFYPFLKDNREKIEKILTFRIPYYVGPLARGNSRFAWMTRKSEETITPWNFEEVVDKGASAQSFIERMTNFDKNLPNEKVLPKHSLLYEYFTVYNELTKVKYVTEGMRKPAFLSGEQKKAIVDLLFKTNRKVTVKQLKEDYFKKIECFDSVEISGVEDRFNASLGTYHDLLKIIKDKDFLDNEENEDILEDIVLTLTLFEDREMIEERLKTYAHLFDDKVMKQLKRRRYTGWGRLSRKLINGIRDKQSGKTILDFLKSDGFANRNFMQLIHDDSLTFKEDIQKAQVSGQGDSLHEHIANLAGSPAIKKGILQTVKVVDELVKVMGRHKPENIVIEMARENQTTQKGQKNSRERMKRIEEGIKELGSQILKEHPVENTQLQNEKLYLYYLQNGRDMYVDQELDINRLSDYDVDHIVPQSFLKDDSIDNKVLTRSDKARGKSDNVPSEEVVKKMKNYWRQLLNAKLITQRKFDNLTKAERGGLSELDKAGFIKRQLVETRQITKHVAQILDSRMNTKYDENDKLIREVKVITLKSKLVSDFRKDFQFYKVREINNYHHAHDAYLNAVVGTALIKKYPKLESEFVYGDYKVYDVRKMIAKSEQEIGKATAKYFFYSNIMNFFKTEITLANGEIRKRPLIETNGETGEIVWDKGRDFATVRKVLSMPQVNIVKKTEVQTGGFSKESILPKRNSDKLIARKKDWDPKKYGGFDSPTVAYSVLVVAKVEKGKSKKLKSVKELLGITIMERSSFEKNPIDFLEAKGYKEVKKDLIIKLPKYSLFELENGRKRMLASAGELQKGNELALPSKYVNFLYLASHYEKLKGSPEDNEQKQLFVEQHKHYLDEIIEQISEFSKRVILADANLDKVLSAYNKHRDKPIREQAENIIHLFTLTNLGAPAAFKYFDTTIDRKRYTSTKEVLDATLIHQSITGLYETRIDLSQLGGDGGGSSGGGGGTAPLEEEYRLFLEAPIQNVTLLEQWKREIPKVWAEINPPGLASTQAPIHVQLLSTALPVRVRQYPITLEAKRSLRETIRKFRAAGILRPVHSPWNTPLLPVRKSGTSEYRMVQDLREVNKRVETIHPTVPNPYTLLSLLPPDRIWYSVLDLKDAFFCIPLAPESQLIFAFEWADAEEGESGQLTWTRLPQGFKNSPTLFDEALNRDLQGFRLDHPSVSLLQYVDDLLIAADTQAACLSATRDLLMTLAELGYRVSGKKAQLCQEEVTYLGFKIHKGSRSLSNSRTQAILQIPVPKTKRQVREFLGTIGYCRLWIPGFAELAQPLYAATRGGNDPLVWGEKEEEAFQSLKLALTQPPALALPSLDKPFQLFVEETSGAAKGVLTQALGPWKRPVAYLSKRLDPVAAGWPRCLRAIAAAALLTREASKLTFGQDIEITSSHNLESLLRSPPDKWLTNARITQYQVLLLDPPRVRFKQTAALNPATLLPETDDTLPIHHCLDTLDSLTSTRPDLTDQPLAQAEATLFTDGSSYIRDGKRYAGAAVVTLDSVIWAEPLPIGTSAQKAELIALTKALEWSKDKSVNIYTDSRYAFATLHVHGMIYRERGLLTAGGKAIKNAPEILALLTAVWLPKRVAVMHCKGHQKDDAPTSTGNRRADEVAREVAIRPLSTQATISAGKRTADGSEFEKRTADGSEFESPKKKAKVE

SEQ ID NO: 6672 - protein, 2097 aa, synthetic construct
MPAAKRVKLDGGDKKYSIGLDIGTNSVGWAVITDEYKVPSKKFKVLGNTDRHSIKKNLIGALLFDSGETAEATRLKRTARRRYTRRKNRICYLQEIFSNEMAKVDDSFFHRLEESFLVEEDKKHERHPIFGNIVDEVAYHEKYPTIYHLRKKLVDSTDKADLRLIYLALAHMIKFRGHFLIEGDLNPDNSDVDKLFIQLVQTYNQLFEENPINASGVDAKAILSARLSKSRRLENLIAQLPGEKKNGLFGNLIALSLGLTPNFKSNFDLAEDAKLQLSKDTYDDDLDNLLAQIGDQYADLFLAAKNLSDAILLSDILRVNTEITKAPLSASMIKRYDEHHQDLTLLKALVRQQLPEKYKEIFFDQSKNGYAGYIDGGASQEEFYKFIKPILEKMDGTEELLVKLNREDLLRKQRTFDNGSIPHQIHLGELHAILRRQEDFYPFLKDNREKIEKILTFRIPYYVGPLARGNSRFAWMTRKSEETITPWNFEEVVDKGASAQSFIERMTNFDKNLPNEKVLPKHSLLYEYFTVYNELTKVKYVTEGMRKPAFLSGEQKKAIVDLLFKTNRKVTVKQLKEDYFKKIECFDSVEISGVEDRFNASLGTYHDLLKIIKDKDFLDNEENEDILEDIVLTLTLFEDREMIEERLKTYAHLFDDKVMKQLKRRRYTGWGRLSRKLINGIRDKQSGKTILDFLKSDGFANRNFMQLIHDDSLTFKEDIQKAQVSGQGDSLHEHIANLAGSPAIKKGILQTVKVVDELVKVMGRHKPENIVIEMARENQTTQKGQKNSRERMKRIEEGIKELGSQILKEHPVENTQLQNEKLYLYYLQNGRDMYVDQELDINRLSDYDVDHIVPQSFLKDDSIDNKVLTRSDKARGKSDNVPSEEVVKKMKNYWRQLLNAKLITQRKFDNLTKAERGGLSELDKAGFIKRQLVETRQITKHVAQILDSRMNTKYDENDKLIREVKVITLKSKLVSDFRKDFQFYKVREINNYHHAHDAYLNAVVGTALIKKYPKLESEFVYGDYKVYDVRKMIAKSEQEIGKATAKYFFYSNIMNFFKTEITLANGEIRKRPLIETNGETGEIVWDKGRDFATVRKVLSMPQVNIVKKTEVQTGGFSKESILPKRNSDKLIARKKDWDPKKYGGFDSPTVAYSVLVVAKVEKGKSKKLKSVKELLGITIMERSSFEKNPIDFLEAKGYKEVKKDLIIKLPKYSLFELENGRKRMLASAGELQKGNELALPSKYVNFLYLASHYEKLKGSPEDNEQKQLFVEQHKHYLDEIIEQISEFSKRVILADANLDKVLSAYNKHRDKPIREQAENIIHLFTLTNLGAPAAFKYFDTTIDRKRYTSTKEVLDATLIHQSITGLYETRIDLSQLGGDGGGSSGGGGGTVSLQDEHRLFDIPVTTSLPDVWLQDFPQAWAETGGLGRAKCQAPIIIDLKPTAVPVSIKQYPMSLEAHMGIRQHIIKFLELGVLRPCRSPWNTPLLPVKKPGTQDYRPVQDLREINKRTVDIHPTVPNPYNLLSTLKPDYSWYTVLDLKDAFFCLPLAPQSQELFAFEWKDPERGISGQLTWTRLPQGFKNSPTLFNEALHRDLTDFRTQHPEVTLLQYVDDLLLAAPTKKACTQGTRHLLQELGEKGYRASAKKAQICQTKVTYLGYILSEGKRWLTPGRIETVARIPPPRNPREVREFLGKAGFCRLFIPGFAELAAPLYALTKPSTPFTWQTEHQLAFEALKKALLSAPALGLPDTSKPFTLFLDERQGIAKGVLTQKLGPWKRPVAYLSKKLDPVAAGWPPCLRIMAATAMLVKDSAKLTLGQPLTVITPHTLEAIVRQPPDRWITNARLTHYQALLLDTDRVQFGPPVTLNPATLLPVPENQPSPHDCRQVLAETHGTREDLKDQELPDADHTWYTDGSSYLDSGTRRAGAAVVDGHNTIWAQSLPPGTSAQKAELIALTKALELSKGKKANIYTDSRYAFATAHTHGSIYERRGWLTSEGKEIKNKAEIIALLKALFLPQEVAIIHCPGHQKGQDPVAVGNRQADRVARQAAMAEVLTLATEPDNTSHITAGKRTADGSEFEKRTADGSEFESPKKKAKVE

SEQ ID NO: 6673 - protein, 2008 aa, synthetic construct
MPAAKRVKLDGGDKKYSIGLDIGTNSVGWAVITDEYKVPSKKFKVLGNTDRHSIKKNLIGALLFDSGETAEATRLKRTARRRYTRRKNRICYLQEIFSNEMAKVDDSFFHRLEESFLVEEDKKHERHPIFGNIVDEVAYHEKYPTIYHLRKKLVDSTDKADLRLIYLALAHMIKFRGHFLIEGDLNPDNSDVDKLFIQLVQTYNQLFEENPINASGVDAKAILSARLSKSRRLENLIAQLPGEKKNGLFGNLIALSLGLTPNFKSNFDLAEDAKLQLSKDTYDDDLDNLLAQIGDQYADLFLAAKNLSDAILLSDILRVNTEITKAPLSASMIKRYDEHHQDLTLLKALVRQQLPEKYKEIFFDQSKNGYAGYIDGGASQEEFYKFIKPILEKMDGTEELLVKLNREDLLRKQRTFDNGSIPHQIHLGELHAILRRQEDFYPFLKDNREKIEKILTFRIPYYVGPLARGNSRFAWMTRKSEETITPWNFEEVVDKGASAQSFIERMTNFDKNLPNEKVLPKHSLLYEYFTVYNELTKVKYVTEGMRKPAFLSGEQKKAIVDLLFKTNRKVTVKQLKEDYFKKIECFDSVEISGVEDRFNASLGTYHDLLKIIKDKDFLDNEENEDILEDIVLTLTLFEDREMIEERLKTYAHLFDDKVMKQLKRRRYTGWGRLSRKLINGIRDKQSGKTILDFLKSDGFANRNFMQLIHDDSLTFKEDIQKAQVSGQGDSLHEHIANLAGSPAIKKGILQTVKVVDELVKVMGRHKPENIVIEMARENQTTQKGQKNSRERMKRIEEGIKELGSQILKEHPVENTQLQNEKLYLYYLQNGRDMYVDQELDINRLSDYDVDHIVPQSFLKDDSIDNKVLTRSDKARGKSDNVPSEEVVKKMKNYWRQLLNAKLITQRKFDNLTKAERGGLSELDKAGFIKRQLVETRQITKHVAQILDSRMNTKYDENDKLIREVKVITLKSKLVSDFRKDFQFYKVREINNYHHAHDAYLNAVVGTALIKKYPKLESEFVYGDYKVYDVRKMIAKSEQEIGKATAKYFFYSNIMNFFKTEITLANGEIRKRPLIETNGETGEIVWDKGRDFATVRKVLSMPQVNIVKKTEVQTGGFSKESILPKRNSDKLIARKKDWDPKKYGGFDSPTVAYSVLVVAKVEKGKSKKLKSVKELLGITIMERSSFEKNPIDFLEAKGYKEVKKDLIIKLPKYSLFELENGRKRMLASAGELQKGNELALPSKYVNFLYLASHYEKLKGSPEDNEQKQLFVEQHKHYLDEIIEQISEFSKRVILADANLDKVLSAYNKHRDKPIREQAENIIHLFTLTNLGAPAAFKYFDTTIDRKRYTSTKEVLDATLIHQSITGLYETRIDLSQLGGDGGGSSGGGGGAVLGLEHLPRPPQISQFPLNPERLQALQHLVRKALEAGHIEPYTGPGNNPVFPVKKANGTWRFIHDLRATNSLTIDLSSSSPGPPDLSSLPTTLAHLQTIDLRDAFFQIPLPKQFQPYFAFTVPQQCNYGPGTRYAWKVLPQGFKNSPTLFEMQLAHILQPIRQAFPQCTILQYMDDILLASPSHEDLLLLSEATMASLISHGLPVSENKTQQTPGTIKFLGQIISPNHLTYDAVPTVPIRSRWALPELQALLGEIQWVSKGTPTLRQPLHSLYCALQRHTDPRDQIYLNPSQVQSLVQLRQALSQNCRSRLVQTLPLLGAIMLTLTGTTTVVFQSKEQWPLVWLHAPLPHTSQCPWGQLLASAVLLLDKYTLQSYGLLCQTIHHNISTQTFNQFIQTSDHPSVPILLHHSHRFKNLGAQTGELWNTFLKTAAPLAPVKALMPVFTLSPVIINTAPCLFSDGSTSRAAYILWDKQILSQRSFPLPPPHKSAQRAELLGLLHGLSSARSWRCLNIFLDSKYLYHYLRTLALGTFQGRSSQAPFQALLPRLLSRKVVYLHHVRSHTNLPDPISRLNALTDALLITPVLQLAGKRTADGSEFEKRTADGSEFESPKKKAKVE

SEQ ID NO: 6674 - protein, 2122 aa, synthetic construct
MPAAKRVKLDGGDKKYSIGLDIGTNSVGWAVITDEYKVPSKKFKVLGNTDRHSIKKNLIGALLFDSGETAEATRLKRTARRRYTRRKNRICYLQEIFSNEMAKVDDSFFHRLEESFLVEEDKKHERHPIFGNIVDEVAYHEKYPTIYHLRKKLVDSTDKADLRLIYLALAHMIKFRGHFLIEGDLNPDNSDVDKLFIQLVQTYNQLFEENPINASGVDAKAILSARLSKSRRLENLIAQLPGEKKNGLFGNLIALSLGLTPNFKSNFDLAEDAKLQLSKDTYDDDLDNLLAQIGDQYADLFLAAKNLSDAILLSDILRVNTEITKAPLSASMIKRYDEHHQDLTLLKALVRQQLPEKYKEIFFDQSKNGYAGYIDGGASQEEFYKFIKPILEKMDGTEELLVKLNREDLLRKQRTFDNGSIPHQIHLGELHAILRRQEDFYPFLKDNREKIEKILTFRIPYYVGPLARGNSRFAWMTRKSEETITPWNFEEVVDKGASAQSFIERMTNFDKNLPNEKVLPKHSLLYEYFTVYNELTKVKYVTEGMRKPAFLSGEQKKAIVDLLFKTNRKVTVKQLKEDYFKKIECFDSVEISGVEDRFNASLGTYHDLLKIIKDKDFLDNEENEDILEDIVLTLTLFEDREMIEERLKTYAHLFDDKVMKQLKRRRYTGWGRLSRKLINGIRDKQSGKTILDFLKSDGFANRNFMQLIHDDSLTFKEDIQKAQVSGQGDSLHEHIANLAGSPAIKKGILQTVKVVDELVKVMGRHKPENIVIEMARENQTTQKGQKNSRERMKRIEEGIKELGSQILKEHPVENTQLQNEKLYLYYLQNGRDMYVDQELDINRLSDYDVDHIVPQSFLKDDSIDNKVLTRSDKARGKSDNVPSEEVVKKMKNYWRQLLNAKLITQRKFDNLTKAERGGLSELDKAGFIKRQLVETRQITKHVAQILDSRMNTKYDENDKLIREVKVITLKSKLVSDFRKDFQFYKVREINNYHHAHDAYLNAVVGTALIKKYPKLESEFVYGDYKVYDVRKMIAKSEQEIGKATAKYFFYSNIMNFFKTEITLANGEIRKRPLIETNGETGEIVWDKGRDFATVRKVLSMPQVNIVKKTEVQTGGFSKESILPKRNSDKLIARKKDWDPKKYGGFDSPTVAYSVLVVAKVEKGKSKKLKSVKELLGITIMERSSFEKNPIDFLEAKGYKEVKKDLIIKLPKYSLFELENGRKRMLASAGELQKGNELALPSKYVNFLYLASHYEKLKGSPEDNEQKQLFVEQHKHYLDEIIEQISEFSKRVILADANLDKVLSAYNKHRDKPIREQAENIIHLFTLTNLGAPAAFKYFDTTIDRKRYTSTKEVLDATLIHQSITGLYETRIDLSQLGGDGGGSSGGGGGLLGRDLLTKLKAQIQFSTEGPQVTWEDRPAMCLVLNLEEEYRLHEKPVPPSIDPSWLQLFPMVWAEKAGMGLANQVPPVVVELKSDASPVAVRQYPMSKEAREGIRPHIQRFLDLGILVPCQSPWNTPLLPVKKPGTNDYRPVQDLREVNKRVQDIHPTVPNPYNLLSSLPPSHTWYSVLDLKDAFFCLKLHPNSQPLFAFEWRDPEKGNTGQLTWTRLPQGFKNSPTLFNEALHRDLASFRALNPQVVMLQYVDDLLVAAPTYRDCKEGTRRLLQELSKLGYRVSAKKAQLCREEVTYLGYLLKGGKRWLTPARKATVMKIPTPTTPRQVREFLGTAGFCRLWIPGFASLAAPLYPLTRPKVPFTWTEAHQEAFGRIKEALLSAPALALPDLTKPFALYVDEKEGVARGVLTQTLGPWRRPVAYLSKKLDPVASGWPTCLKAIAAVALLLKDADKLTLGQNVLVIAPHNLESIVRQPPDRWMTNARMTHYQSLLLNERVSFAPPAILNPATLLPVESDDTPIHICSEILAEETGTRPDLRDQPLPGVPAWYTDGSSFIMDGRRQAGAAIVDNKRTVWASNLPEGTSAQKAELIALTQALRLAEGKSINIYTDSRYAFATAHVHGAIYKQRGWLTSAGKDIKNKEEILALLEAIHLPKRVAIIHCPGHQRGTDPVATGNRKADEAAKQAAQSTRILTETTKNAGKRTADGSEFEKRTADGSEFESPKKKAKVE

SEQ ID NO: 6675 - protein, 2213 aa, synthetic construct
MPAAKRVKLDGGDKKYSIGLDIGTNSVGWAVITDEYKVPSKKFKVLGNTDRHSIKKNLIGALLFDSGETAEATRLKRTARRRYTRRKNRICYLQEIFSNEMAKVDDSFFHRLEESFLVEEDKKHERHPIFGNIVDEVAYHEKYPTIYHLRKKLVDSTDKADLRLIYLALAHMIKFRGHFLIEGDLNPDNSDVDKLFIQLVQTYNQLFEENPINASGVDAKAILSARLSKSRRLENLIAQLPGEKKNGLFGNLIALSLGLTPNFKSNFDLAEDAKLQLSKDTYDDDLDNLLAQIGDQYADLFLAAKNLSDAILLSDILRVNTEITKAPLSASMIKRYDEHHQDLTLLKALVRQQLPEKYKEIFFDQSKNGYAGYIDGGASQEEFYKFIKPILEKMDGTEELLVKLNREDLLRKQRTFDNGSIPHQIHLGELHAILRRQEDFYPFLKDNREKIEKILTFRIPYYVGPLARGNSRFAWMTRKSEETITPWNFEEVVDKGASAQSFIERMTNFDKNLPNEKVLPKHSLLYEYFTVYNELTKVKYVTEGMRKPAFLSGEQKKAIVDLLFKTNRKVTVKQLKEDYFKKIECFDSVEISGVEDRFNASLGTYHDLLKIIKDKDFLDNEENEDILEDIVLTLTLFEDREMIEERLKTYAHLFDDKVMKQLKRRRYTGWGRLSRKLINGIRDKQSGKTILDFLKSDGFANRNFMQLIHDDSLTFKEDIQKAQVSGQGDSLHEHIANLAGSPAIKKGILQTVKVVDELVKVMGRHKPENIVIEMARENQTTQKGQKNSRERMKRIEEGIKELGSQILKEHPVENTQLQNEKLYLYYLQNGRDMYVDQELDINRLSDYDVDHIVPQSFLKDDSIDNKVLTRSDKARGKSDNVPSEEVVKKMKNYWRQLLNAKLITQRKFDNLTKAERGGLSELDKAGFIKRQLVETRQITKHVAQILDSRMNTKYDENDKLIREVKVITLKSKLVSDFRKDFQFYKVREINNYHHAHDAYLNAVVGTALIKKYPKLESEFVYGDYKVYDVRKMIAKSEQEIGKATAKYFFYSNIMNFFKTEITLANGEIRKRPLIETNGETGEIVWDKGRDFATVRKVLSMPQVNIVKKTEVQTGGFSKESILPKRNSDKLIARKKDWDPKKYGGFDSPTVAYSVLVVAKVEKGKSKKLKSVKELLGITIMERSSFEKNPIDFLEAKGYKEVKKDLIIKLPKYSLFELENGRKRMLASAGELQKGNELALPSKYVNFLYLASHYEKLKGSPEDNEQKQLFVEQHKHYLDEIIEQISEFSKRVILADANLDKVLSAYNKHRDKPIREQAENIIHLFTLTNLGAPAAFKYFDTTIDRKRYTSTKEVLDATLIHQSITGLYETRIDLSQLGGDGGGSSGGGGGTLGDQGSRGSDPLPEPRVTLTVEGIPTEFLVNTGAEHSVLTKPMGKMGSKRTVVAGATGSKVYPWTTKRLLKIGQKQVTHSFLVIPECPAPLLGRDLLTKLKAQIQFSTEGPQVTWEDRPAMCLVLNLEEEYRLHEKPVPPSIDPSWLQLFPMVWAEKAGMGLANQVPPVVVELKSDASPVAVRQYPMSKEAREGIRPHIQRFLDLGILVPCQSPWNTPLLPVKKPGTNDYRPVQDLREVNKRVQDIHPTVPNPYNLLSSLPPSHTWYSVLDLKDAFFCLKLHPNSQPLFAFEWRDPEKGNTGQLTWTRLPQGFKNSPTLFNEALHRDLASFRALNPQVVMLQYVDDLLVAAPTYRDCKEGTRRLLQELSKLGYRVSAKKAQLCREEVTYLGYLLKGGKRWLTPARKATVMKIPTPTTPRQVREFLGTAGFCRLWIPGFASLAAPLYPLTRPKVPFTWTEAHQEAFGRIKEALLSAPALALPDLTKPFALYVDEKEGVARGVLTQTLGPWRRPVAYLSKKLDPVASGWPTCLKAIAAVALLLKDADKLTLGQNVLVIAPHNLESIVRQPPDRWMTNARMTHYQSLLLNERVSFAPPAILNPATLLPVESDDTPIHICSEILAEETGTRPDLRDQPLPGVPAWYTDGSSFIMDGRRQAGAAIVDNKRTVWASNLPEGTSAQKAELIALTQALRLAEGKSINIYTDSRYAFATAHVHGAIYKQRGWLTSAGKDIKNKEEILALLEAIHLPKRVAIIHCPGHQRGTDPVATGNRKADEAAKQAAQSTRILTETTKNAGKRTADGSEFEKRTADGSEFESPKKKAKVE

SEQ ID NO: 6676 - protein, 2213 aa, synthetic construct
MPAAKRVKLDGGDKKYSIGLDIGTNSVGWAVITDEYKVPSKKFKVLGNTDRHSIKKNLIGALLFDSGETAEATRLKRTARRRYTRRKNRICYLQEIFSNEMAKVDDSFFHRLEESFLVEEDKKHERHPIFGNIVDEVAYHEKYPTIYHLRKKLVDSTDKADLRLIYLALAHMIKFRGHFLIEGDLNPDNSDVDKLFIQLVQTYNQLFEENPINASGVDAKAILSARLSKSRRLENLIAQLPGEKKNGLFGNLIALSLGLTPNFKSNFDLAEDAKLQLSKDTYDDDLDNLLAQIGDQYADLFLAAKNLSDAILLSDILRVNTEITKAPLSASMIKRYDEHHQDLTLLKALVRQQLPEKYKEIFFDQSKNGYAGYIDGGASQEEFYKFIKPILEKMDGTEELLVKLNREDLLRKQRTFDNGSIPHQIHLGELHAILRRQEDFYPFLKDNREKIEKILTFRIPYYVGPLARGNSRFAWMTRKSEETITPWNFEEVVDKGASAQSFIERMTNFDKNLPNEKVLPKHSLLYEYFTVYNELTKVKYVTEGMRKPAFLSGEQKKAIVDLLFKTNRKVTVKQLKEDYFKKIECFDSVEISGVEDRFNASLGTYHDLLKIIKDKDFLDNEENEDILEDIVLTLTLFEDREMIEERLKTYAHLFDDKVMKQLKRRRYTGWGRLSRKLINGIRDKQSGKTILDFLKSDGFANRNFMQLIHDDSLTFKEDIQKAQVSGQGDSLHEHIANLAGSPAIKKGILQTVKVVDELVKVMGRHKPENIVIEMARENQTTQKGQKNSRERMKRIEEGIKELGSQILKEHPVENTQLQNEKLYLYYLQNGRDMYVDQELDINRLSDYDVDHIVPQSFLKDDSIDNKVLTRSDKARGKSDNVPSEEVVKKMKNYWRQLLNAKLITQRKFDNLTKAERGGLSELDKAGFIKRQLVETRQITKHVAQILDSRMNTKYDENDKLIREVKVITLKSKLVSDFRKDFQFYKVREINNYHHAHDAYLNAVVGTALIKKYPKLESEFVYGDYKVYDVRKMIAKSEQEIGKATAKYFFYSNIMNFFKTEITLANGEIRKRPLIETNGETGEIVWDKGRDFATVRKVLSMPQVNIVKKTEVQTGGFSKESILPKRNSDKLIARKKDWDPKKYGGFDSPTVAYSVLVVAKVEKGKSKKLKSVKELLGITIMERSSFEKNPIDFLEAKGYKEVKKDLIIKLPKYSLFELENGRKRMLASAGELQKGNELALPSKYVNFLYLASHYEKLKGSPEDNEQKQLFVEQHKHYLDEIIEQISEFSKRVILADANLDKVLSAYNKHRDKPIREQAENIIHLFTLTNLGAPAAFKYFDTTIDRKRYTSTKEVLDATLIHQSITGLYETRIDLSQLGGDGGGSSGGGGGTLGDQGSRGSDPLPEPRVTLTVEGIPTEFLVNTGAEHSVLTKPMGKMGSKRTVVAGATGSKVYPWTTKRLLKIGQKQVTHSFLVIPECPAPLLGRDLLTKLKAQIQFSTEGPQVTWEDRPAMCLVLNLEEEYRLHEKPVPPSIDPSWLQLFPMVWAEKAGMGLANQVPPVVVELKSDASPVAVRQYPMSKEAREGIRPHIQRFLDLGILVPCQSPWNTPLLPVKKPGTNDYRPVQDLREVNKRVQDIHPTVPNPYNLLSSLPPSHTWYSVLDLKDAFFCLKLHPNSQPLFAFEWRDPEKGNTGQLTWTRLPQGFKNSPTLFNEALHRDLASFRALNPQVVMLQYVDDLLVAAPTYRDCKEGTRRLLQELSKLGYRVSAKKAQLCREEVTYLGYLLKGGKRWLTPARKATVMKIPTPTTPRQVREFLGKAGFCRLFIPGFASLAAPLYPLTRPKVPFTWTEAHQEAFGRIKEALLSAPALALPDLTKPFALYVDEKEGVARGVLTQTLGPWRRPVAYLSKKLDPVASGWPTCLKAIAAVALLLKDADKLTLGQNVLVIAPHNLESIVRQPPDRWMTNARMTHYQSLLLNERVSFAPPAILNPATLLPVESDDTPIHICSEILAEETGTRPDLRDQPLPGVPAWYTDGSSFIMDGRRQAGAAIVDNKRTVWASNLPEGTSAQKAELIALTQALRLAEGKSINIYTDSRYAFATAHVHGAIYKQRGWLTSAGKDIKNKEEILALLEAIHLPKRVAIIHCPGHQRGTDPVATGNRKADEAAKQAAQSTRILTETTKNAGKRTADGSEFEKRTADGSEFESPKKKAKVE

SEQ ID NO: 6677 - protein, 2091 aa, synthetic construct
MPAAKRVKLDGGDKKYSIGLDIGTNSVGWAVITDEYKVPSKKFKVLGNTDRHSIKKNLIGALLFDSGETAEATRLKRTARRRYTRRKNRICYLQEIFSNEMAKVDDSFFHRLEESFLVEEDKKHERHPIFGNIVDEVAYHEKYPTIYHLRKKLVDSTDKADLRLIYLALAHMIKFRGHFLIEGDLNPDNSDVDKLFIQLVQTYNQLFEENPINASGVDAKAILSARLSKSRRLENLIAQLPGEKKNGLFGNLIALSLGLTPNFKSNFDLAEDAKLQLSKDTYDDDLDNLLAQIGDQYADLFLAAKNLSDAILLSDILRVNTEITKAPLSASMIKRYDEHHQDLTLLKALVRQQLPEKYKEIFFDQSKNGYAGYIDGGASQEEFYKFIKPILEKMDGTEELLVKLNREDLLRKQRTFDNGSIPHQIHLGELHAILRRQEDFYPFLKDNREKIEKILTFRIPYYVGPLARGNSRFAWMTRKSEETITPWNFEEVVDKGASAQSFIERMTNFDKNLPNEKVLPKHSLLYEYFTVYNELTKVKYVTEGMRKPAFLSGEQKKAIVDLLFKTNRKVTVKQLKEDYFKKIECFDSVEISGVEDRFNASLGTYHDLLKIIKDKDFLDNEENEDILEDIVLTLTLFEDREMIEERLKTYAHLFDDKVMKQLKRRRYTGWGRLSRKLINGIRDKQSGKTILDFLKSDGFANRNFMQLIHDDSLTFKEDIQKAQVSGQGDSLHEHIANLAGSPAIKKGILQTVKVVDELVKVMGRHKPENIVIEMARENQTTQKGQKNSRERMKRIEEGIKELGSQILKEHPVENTQLQNEKLYLYYLQNGRDMYVDQELDINRLSDYDVDHIVPQSFLKDDSIDNKVLTRSDKARGKSDNVPSEEVVKKMKNYWRQLLNAKLITQRKFDNLTKAERGGLSELDKAGFIKRQLVETRQITKHVAQILDSRMNTKYDENDKLIREVKVITLKSKLVSDFRKDFQFYKVREINNYHHAHDAYLNAVVGTALIKKYPKLESEFVYGDYKVYDVRKMIAKSEQEIGKATAKYFFYSNIMNFFKTEITLANGEIRKRPLIETNGETGEIVWDKGRDFATVRKVLSMPQVNIVKKTEVQTGGFSKESILPKRNSDKLIARKKDWDPKKYGGFDSPTVAYSVLVVAKVEKGKSKKLKSVKELLGITIMERSSFEKNPIDFLEAKGYKEVKKDLIIKLPKYSLFELENGRKRMLASAGELQKGNELALPSKYVNFLYLASHYEKLKGSPEDNEQKQLFVEQHKHYLDEIIEQISEFSKRVILADANLDKVLSAYNKHRDKPIREQAENIIHLFTLTNLGAPAAFKYFDTTIDRKRYTSTKEVLDATLIHQSITGLYETRIDLSQLGGDGGGSSGGGGGTLNLEDEYRLYETSAEPEVSPGSTWLSDFPQAWAETGGMGLAVRQAPLIIPLKATSTPVSIKQYPMSQEAKLGIKPHIQRLLDQGILVPCQSPWNTPLLPVKKPGTNDYRPVQDLREVNKRVEDIHPTVPNPYNLLSGLPPSHRWYTVLDLKDAFFCLRLHPTSQPLFAFEWRDPGMGISGQLTWTRLPQGFKNSPTLFNEALHRDLADFRIQHPDLILLQYVDDILLAATSELDCQQGTRALLLTLGNLGYRASAKKAQLCQKQVKYLGYLLKEGQRWLTEARKETVMGQPTPKTPRQLREFLGTAGFCRLWIPGFAEMAAPLYPLTKPGTLFNWGPDQQKAYQEIKQALLTAPALGLPDLTKPFELFVDEKQGYAKGVLTQKLGPWRRPVAYLSKKLDPVAAGWPPCLRMVAAIAVLRKDAGKLTMGQPLVILAPHAVEALVKQPPDRWLSNARMTHYQAMLLDTDRVQFGPVVALNPATLLPLPEEGAPHDCLEILAETHGTRPDLTDQPIPDADHTWYTDGSSFLQEGQRKAGAAVTTETEVIWARALPAGTSAQRAELIALTQALKMAEGKRLNVYTDSRYAFATAHIHGEIYRRRGWLTSEGREIKNKSEILALLKALFLPKRLSIIHCLGHQKGDSAEARGNRLADQAAREAAIKTPPDTSTLLAGKRTADGSEFEKRTADGSEFESPKKKAKVE

SEQ ID NO: 6678 - protein, 2091 aa, synthetic construct
MPAAKRVKLDGGDKKYSIGLDIGTNSVGWAVITDEYKVPSKKFKVLGNTDRHSIKKNLIGALLFDSGETAEATRLKRTARRRYTRRKNRICYLQEIFSNEMAKVDDSFFHRLEESFLVEEDKKHERHPIFGNIVDEVAYHEKYPTIYHLRKKLVDSTDKADLRLIYLALAHMIKFRGHFLIEGDLNPDNSDVDKLFIQLVQTYNQLFEENPINASGVDAKAILSARLSKSRRLENLIAQLPGEKKNGLFGNLIALSLGLTPNFKSNFDLAEDAKLQLSKDTYDDDLDNLLAQIGDQYADLFLAAKNLSDAILLSDILRVNTEITKAPLSASMIKRYDEHHQDLTLLKALVRQQLPEKYKEIFFDQSKNGYAGYIDGGASQEEFYKFIKPILEKMDGTEELLVKLNREDLLRKQRTFDNGSIPHQIHLGELHAILRRQEDFYPFLKDNREKIEKILTFRIPYYVGPLARGNSRFAWMTRKSEETITPWNFEEVVDKGASAQSFIERMTNFDKNLPNEKVLPKHSLLYEYFTVYNELTKVKYVTEGMRKPAFLSGEQKKAIVDLLFKTNRKVTVKQLKEDYFKKIECFDSVEISGVEDRFNASLGTYHDLLKIIKDKDFLDNEENEDILEDIVLTLTLFEDREMIEERLKTYAHLFDDKVMKQLKRRRYTGWGRLSRKLINGIRDKQSGKTILDFLKSDGFANRNFMQLIHDDSLTFKEDIQKAQVSGQGDSLHEHIANLAGSPAIKKGILQTVKVVDELVKVMGRHKPENIVIEMARENQTTQKGQKNSRERMKRIEEGIKELGSQILKEHPVENTQLQNEKLYLYYLQNGRDMYVDQELDINRLSDYDVDHIVPQSFLKDDSIDNKVLTRSDKARGKSDNVPSEEVVKKMKNYWRQLLNAKLITQRKFDNLTKAERGGLSELDKAGFIKRQLVETRQITKHVAQILDSRMNTKYDENDKLIREVKVITLKSKLVSDFRKDFQFYKVREINNYHHAHDAYLNAVVGTALIKKYPKLESEFVYGDYKVYDVRKMIAKSEQEIGKATAKYFFYSNIMNFFKTEITLANGEIRKRPLIETNGETGEIVWDKGRDFATVRKVLSMPQVNIVKKTEVQTGGFSKESILPKRNSDKLIARKKDWDPKKYGGFDSPTVAYSVLVVAKVEKGKSKKLKSVKELLGITIMERSSFEKNPIDFLEAKGYKEVKKDLIIKLPKYSLFELENGRKRMLASAGELQKGNELALPSKYVNFLYLASHYEKLKGSPEDNEQKQLFVEQHKHYLDEIIEQISEFSKRVILADANLDKVLSAYNKHRDKPIREQAENIIHLFTLTNLGAPAAFKYFDTTIDRKRYTSTKEVLDATLIHQSITGLYETRIDLSQLGGDGGGSSGGGGGTLGIEDEYRLHETSTEPDVSLGSTWLSDFPQAWAETGGMGLAVRQAPLIIPLKATSTPVSIQQYPMSHEARLGIKPHIQRLLDQGILVPCQSPWNTPLLPVKKPGTNDYRPVQDLREVNKRVEDIHPTVPNPYNLLSGLPPSHQWYTVLDLKDAFFCLRLHPTSQPLFAFEWRDPGMGISGQLTWTRLPQGFKNSPTLFDEALHRDLADFRIQHPDLILLQYVDDILLAATSELDCQQGTRALLQTLGDLGYRASAKKAQICQKQVKYLGYLLREGQRWLTEARKETVMGQPVPKTPRQLREFLGTAGFCRLWIPGFAEMAAPLYPLTKTGTLFSWGPDQQKAYQEIKQALLTAPALGLPDLTKPFELFVDEKQGYAKGVLTQKLGPWRRPVAYLSKKLDPVAAGWPPCLRMVAAIAVLTKDAGKLTMGQPLVILAPHAVEALVKQPPDRWLSNARMTHYQAMLLDTDRVQFGPVVALNPATLLPLPEEGAPHDCLEILAETHGTRPDLTDQPIPDADHTWYTDGSSFLQEGQRKAGAAVTTETEVIWAGALPAGTSAQRAELIALTQALKMAEGKRLNVYTDSRYAFATAHIHGEIYRRRGLLTSEGREIKNKSEILALLKALFLPKRLSIIHCLGHQKGDSAEARGNRLADQAAREAAIKTPPDTSTLLAGKRTADGSEFEKRTADGSEFESPKKKAKVE

SEQ ID NO: 6679 - protein, 2091 aa, synthetic construct
MPAAKRVKLDGGDKKYSIGLDIGTNSVGWAVITDEYKVPSKKFKVLGNTDRHSIKKNLIGALLFDSGETAEATRLKRTARRRYTRRKNRICYLQEIFSNEMAKVDDSFFHRLEESFLVEEDKKHERHPIFGNIVDEVAYHEKYPTIYHLRKKLVDSTDKADLRLIYLALAHMIKFRGHFLIEGDLNPDNSDVDKLFIQLVQTYNQLFEENPINASGVDAKAILSARLSKSRRLENLIAQLPGEKKNGLFGNLIALSLGLTPNFKSNFDLAEDAKLQLSKDTYDDDLDNLLAQIGDQYADLFLAAKNLSDAILLSDILRVNTEITKAPLSASMIKRYDEHHQDLTLLKALVRQQLPEKYKEIFFDQSKNGYAGYIDGGASQEEFYKFIKPILEKMDGTEELLVKLNREDLLRKQRTFDNGSIPHQIHLGELHAILRRQEDFYPFLKDNREKIEKILTFRIPYYVGPLARGNSRFAWMTRKSEETITPWNFEEVVDKGASAQSFIERMTNFDKNLPNEKVLPKHSLLYEYFTVYNELTKVKYVTEGMRKPAFLSGEQKKAIVDLLFKTNRKVTVKQLKEDYFKKIECFDSVEISGVEDRFNASLGTYHDLLKIIKDKDFLDNEENEDILEDIVLTLTLFEDREMIEERLKTYAHLFDDKVMKQLKRRRYTGWGRLSRKLINGIRDKQSGKTILDFLKSDGFANRNFMQLIHDDSLTFKEDIQKAQVSGQGDSLHEHIANLAGSPAIKKGILQTVKVVDELVKVMGRHKPENIVIEMARENQTTQKGQKNSRERMKRIEEGIKELGSQILKEHPVENTQLQNEKLYLYYLQNGRDMYVDQELDINRLSDYDVDHIVPQSFLKDDSIDNKVLTRSDKARGKSDNVPSEEVVKKMKNYWRQLLNAKLITQRKFDNLTKAERGGLSELDKAGFIKRQLVETRQITKHVAQILDSRMNTKYDENDKLIREVKVITLKSKLVSDFRKDFQFYKVREINNYHHAHDAYLNAVVGTALIKKYPKLESEFVYGDYKVYDVRKMIAKSEQEIGKATAKYFFYSNIMNFFKTEITLANGEIRKRPLIETNGETGEIVWDKGRDFATVRKVLSMPQVNIVKKTEVQTGGFSKESILPKRNSDKLIARKKDWDPKKYGGFDSPTVAYSVLVVAKVEKGKSKKLKSVKELLGITIMERSSFEKNPIDFLEAKGYKEVKKDLIIKLPKYSLFELENGRKRMLASAGELQKGNELALPSKYVNFLYLASHYEKLKGSPEDNEQKQLFVEQHKHYLDEIIEQISEFSKRVILADANLDKVLSAYNKHRDKPIREQAENIIHLFTLTNLGAPAAFKYFDTTIDRKRYTSTKEVLDATLIHQSITGLYETRIDLSQLGGDGGGSSGGGGGTLNIEDEYRLHETSKGPDVPLGSTWLSDFPQAWAETGGMGLAVRQAPLIIPLKATSTPVSIKQYPMSQEARLGIKPHIQRLLDQGILVPCQSPWNTPLLPVKKPGTNDYRPVQDLREVNKRVEDIHPTVPNPYNLLSGLPPSHQWYTVLDLKDAFFCLRLHPTSQSLFAFEWRDPEMGISGQLTWTRLPQGFKNSPTLFNEALHRDLADFRIQHPDLILLQYVDDLLLAATSELDCQQGTRALLQTLGDLGYRASAKKAQICQKQVKYLGYLLKEGQRWLTEARKETVMGQPTPKTPRQLREFLGTAGFCRLWIPGFAEMAAPLYPLTKPGTLFEWGPDQQKAYQEIKQALLTAPALGLPDLTKPFELFVDEKQGYAKGVLTQKLGPWRRPVAYLSKKLDPVAAGWPPCLRMVAAIAVLTKDAGKLTMGQPLVILAPHAVEALVKQPPDRWLSNARMTHYQALLLDTDRVQFGPIVALNPATLLPLPEEGLQHDCLDILAEAHGTRPDLTDQPLPDADHTWYTDGSSFLQEGQRKAGAAVTTETEVVWAKALPAGTSAQRAELIALTQALKMAEGKKLNVYTDSRYAFATAHIHGEIYRRRGWLTSEGKEIKNKDEILALLKALFLPKRLSIIHCPGHQKGNRAEARGNRMADQAAREVATRETPETSTLLAGKRTADGSEFEKRTADGSEFESPKKKAKVE

SEQ ID NO: 6680 - protein, 2085 aa, synthetic construct
MPAAKRVKLDGGDKKYSIGLDIGTNSVGWAVITDEYKVPSKKFKVLGNTDRHSIKKNLIGALLFDSGETAEATRLKRTARRRYTRRKNRICYLQEIFSNEMAKVDDSFFHRLEESFLVEEDKKHERHPIFGNIVDEVAYHEKYPTIYHLRKKLVDSTDKADLRLIYLALAHMIKFRGHFLIEGDLNPDNSDVDKLFIQLVQTYNQLFEENPINASGVDAKAILSARLSKSRRLENLIAQLPGEKKNGLFGNLIALSLGLTPNFKSNFDLAEDAKLQLSKDTYDDDLDNLLAQIGDQYADLFLAAKNLSDAILLSDILRVNTEITKAPLSASMIKRYDEHHQDLTLLKALVRQQLPEKYKEIFFDQSKNGYAGYIDGGASQEEFYKFIKPILEKMDGTEELLVKLNREDLLRKQRTFDNGSIPHQIHLGELHAILRRQEDFYPFLKDNREKIEKILTFRIPYYVGPLARGNSRFAWMTRKSEETITPWNFEEVVDKGASAQSFIERMTNFDKNLPNEKVLPKHSLLYEYFTVYNELTKVKYVTEGMRKPAFLSGEQKKAIVDLLFKTNRKVTVKQLKEDYFKKIECFDSVEISGVEDRFNASLGTYHDLLKIIKDKDFLDNEENEDILEDIVLTLTLFEDREMIEERLKTYAHLFDDKVMKQLKRRRYTGWGRLSRKLINGIRDKQSGKTILDFLKSDGFANRNFMQLIHDDSLTFKEDIQKAQVSGQGDSLHEHIANLAGSPAIKKGILQTVKVVDELVKVMGRHKPENIVIEMARENQTTQKGQKNSRERMKRIEEGIKELGSQILKEHPVENTQLQNEKLYLYYLQNGRDMYVDQELDINRLSDYDVDHIVPQSFLKDDSIDNKVLTRSDKARGKSDNVPSEEVVKKMKNYWRQLLNAKLITQRKFDNLTKAERGGLSELDKAGFIKRQLVETRQITKHVAQILDSRMNTKYDENDKLIREVKVITLKSKLVSDFRKDFQFYKVREINNYHHAHDAYLNAVVGTALIKKYPKLESEFVYGDYKVYDVRKMIAKSEQEIGKATAKYFFYSNIMNFFKTEITLANGEIRKRPLIETNGETGEIVWDKGRDFATVRKVLSMPQVNIVKKTEVQTGGFSKESILPKRNSDKLIARKKDWDPKKYGGFDSPTVAYSVLVVAKVEKGKSKKLKSVKELLGITIMERSSFEKNPIDFLEAKGYKEVKKDLIIKLPKYSLFELENGRKRMLASAGELQKGNELALPSKYVNFLYLASHYEKLKGSPEDNEQKQLFVEQHKHYLDEIIEQISEFSKRVILADANLDKVLSAYNKHRDKPIREQAENIIHLFTLTNLGAPAAFKYFDTTIDRKRYTSTKEVLDATLIHQSITGLYETRIDLSQLGGDGGGSSGGGGGTLQLDDEYRLYSPLVKPDQNIQFWLEQFPQAWAETAGMGLAKQVPPQVIQLKASATPVSVRQYPLSKEAQEGIRPHVQRLIQQGILVPVQSPWNTPLLPVRKPGTNDYRPVQDLREVNKRVQDIHPTVPNPYNLLCALPPQRSWYTVLDLKDAFFCLRLHPTSQPLFAFEWRDPGTGRTGQLTWTRLPQGFKNSPTIFDEALHRDLANFRIQHPQVTLLQYVDDLLLAGATKQDCLEGTKALLLELSDLGYRASAKKAQICRREVTYLGYSLRDGQRWLTEARKKTVVQIPAPTTAKQVREFLGTAGFCRLWIPGFATLAAPLYPLTKEKGEFSWAPEHQKAFDAIKKALLSAPALALPDVTKPFTLYVDERKGVARGVLTQTLGPWRRPVAYLSKKLDPVASGWPVCLKAIAAVAILVKDADKLTLGQNITVIAPHALENIVRQPPDRWMTNARMTHYQSLLLTERVTFAPPAALNPATLLPEETDEPVTHDCHQLLIEETGVRKDLTDIPLTGEVLTWFTDGSSYVVEGKRMAGAAVVDGTRTIWASSLPEGTSAQKAELMALTQALRLAEGKSINIYTDSRYAFATAHVHGAIYKQRGLLTSAGREIKNKEEILSLLEALHLPKRLAIIHCPGHQKAKDPISRGNQMADRVAKQAAQGVNLLAGKRTADGSEFEKRTADGSEFESPKKKAKVE

SEQ ID NO: 6681 - protein, 2171 aa, synthetic construct
MPAAKRVKLDGGDKKYSIGLDIGTNSVGWAVITDEYKVPSKKFKVLGNTDRHSIKKNLIGALLFDSGETAEATRLKRTARRRYTRRKNRICYLQEIFSNEMAKVDDSFFHRLEESFLVEEDKKHERHPIFGNIVDEVAYHEKYPTIYHLRKKLVDSTDKADLRLIYLALAHMIKFRGHFLIEGDLNPDNSDVDKLFIQLVQTYNQLFEENPINASGVDAKAILSARLSKSRRLENLIAQLPGEKKNGLFGNLIALSLGLTPNFKSNFDLAEDAKLQLSKDTYDDDLDNLLAQIGDQYADLFLAAKNLSDAILLSDILRVNTEITKAPLSASMIKRYDEHHQDLTLLKALVRQQLPEKYKEIFFDQSKNGYAGYIDGGASQEEFYKFIKPILEKMDGTEELLVKLNREDLLRKQRTFDNGSIPHQIHLGELHAILRRQEDFYPFLKDNREKIEKILTFRIPYYVGPLARGNSRFAWMTRKSEETITPWNFEEVVDKGASAQSFIERMTNFDKNLPNEKVLPKHSLLYEYFTVYNELTKVKYVTEGMRKPAFLSGEQKKAIVDLLFKTNRKVTVKQLKEDYFKKIECFDSVEISGVEDRFNASLGTYHDLLKIIKDKDFLDNEENEDILEDIVLTLTLFEDREMIEERLKTYAHLFDDKVMKQLKRRRYTGWGRLSRKLINGIRDKQSGKTILDFLKSDGFANRNFMQLIHDDSLTFKEDIQKAQVSGQGDSLHEHIANLAGSPAIKKGILQTVKVVDELVKVMGRHKPENIVIEMARENQTTQKGQKNSRERMKRIEEGIKELGSQILKEHPVENTQLQNEKLYLYYLQNGRDMYVDQELDINRLSDYDVDHIVPQSFLKDDSIDNKVLTRSDKARGKSDNVPSEEVVKKMKNYWRQLLNAKLITQRKFDNLTKAERGGLSELDKAGFIKRQLVETRQITKHVAQILDSRMNTKYDENDKLIREVKVITLKSKLVSDFRKDFQFYKVREINNYHHAHDAYLNAVVGTALIKKYPKLESEFVYGDYKVYDVRKMIAKSEQEIGKATAKYFFYSNIMNFFKTEITLANGEIRKRPLIETNGETGEIVWDKGRDFATVRKVLSMPQVNIVKKTEVQTGGFSKESILPKRNSDKLIARKKDWDPKKYGGFDSPTVAYSVLVVAKVEKGKSKKLKSVKELLGITIMERSSFEKNPIDFLEAKGYKEVKKDLIIKLPKYSLFELENGRKRMLASAGELQKGNELALPSKYVNFLYLASHYEKLKGSPEDNEQKQLFVEQHKHYLDEIIEQISEFSKRVILADANLDKVLSAYNKHRDKPIREQAENIIHLFTLTNLGAPAAFKYFDTTIDRKRYTSTKEVLDATLIHQSITGLYETRIDLSQLGGDGGGSSGGGGGMDPLQLLQPLEAEIKGTKLKAHWNSGATITCVPQAFLEEEVPIKNIWIKTIHGEKEQPVYYLTFKIQGRKVEAEVISSPYDYILVSPSDIPWLMKKPLQLTTLVPLQEYEERLLKQTMLTGSYKEKLQSLFLKYDALWQHWENQVGHRRIKPHHIATGTVNPRPQKQYPINPKAKASIQTVINDLLKQGVLIQQNSIMNTPVYPVPKPDGKWRMVLDYREVNKTIPLIAAQNQHSAGILSSIFRGKYKTTLDLSNGFWAHSITPESYWLTAFTWLGQQYCWTRLPQGFLNSPALFNADVVDLLKEVPNVQVYVDDIYISHDDPREHLEQLEKVFSLLLNAGYVVSLKKSEIAQHEVEFLGFNITKEGRGLTETFKQKLLNITPPRDLKQLQSILGKLNFARNFIPNFSELVKPLYNIIATAPGKYITWTTDNSQQLQNIISMLNSAENLEERNPEVRLIMKVNTSPSAGYIRFYNEFAKRPIMYLNYVYTKAEVKFTNTEKLLTTIHKGLIKALDLGMGQEILVYSPIVSMTKIQKTPLPERKALPIRWITWMSYLEDPRIQFHYDKTLPELQQVPTVTDDIIAKIKHPSEFSMVFYTDGSAIKHPNVNKSHNAGMGIAQVQFKPEFTVINTWSIPLGDHTAQLAEVAAVEFACKKALKIDGPVLIVTDSFYVAESVNKELPYWQSNGFFNNKKKPLKHVSKWKSIADCIQLKPDIIIIHEKGHQPTASTFHTEGNNLADKLATQGSYVVNAGKRTADGSEFEKRTADGSEFESPKKKAKVE

SEQ ID NO: 6682 - protein, 2089 aa, synthetic construct
MPAAKRVKLDGGDKKYSIGLDIGTNSVGWAVITDEYKVPSKKFKVLGNTDRHSIKKNLIGALLFDSGETAEATRLKRTARRRYTRRKNRICYLQEIFSNEMAKVDDSFFHRLEESFLVEEDKKHERHPIFGNIVDEVAYHEKYPTIYHLRKKLVDSTDKADLRLIYLALAHMIKFRGHFLIEGDLNPDNSDVDKLFIQLVQTYNQLFEENPINASGVDAKAILSARLSKSRRLENLIAQLPGEKKNGLFGNLIALSLGLTPNFKSNFDLAEDAKLQLSKDTYDDDLDNLLAQIGDQYADLFLAAKNLSDAILLSDILRVNTEITKAPLSASMIKRYDEHHQDLTLLKALVRQQLPEKYKEIFFDQSKNGYAGYIDGGASQEEFYKFIKPILEKMDGTEELLVKLNREDLLRKQRTFDNGSIPHQIHLGELHAILRRQEDFYPFLKDNREKIEKILTFRIPYYVGPLARGNSRFAWMTRKSEETITPWNFEEVVDKGASAQSFIERMTNFDKNLPNEKVLPKHSLLYEYFTVYNELTKVKYVTEGMRKPAFLSGEQKKAIVDLLFKTNRKVTVKQLKEDYFKKIECFDSVEISGVEDRFNASLGTYHDLLKIIKDKDFLDNEENEDILEDIVLTLTLFEDREMIEERLKTYAHLFDDKVMKQLKRRRYTGWGRLSRKLINGIRDKQSGKTILDFLKSDGFANRNFMQLIHDDSLTFKEDIQKAQVSGQGDSLHEHIANLAGSPAIKKGILQTVKVVDELVKVMGRHKPENIVIEMARENQTTQKGQKNSRERMKRIEEGIKELGSQILKEHPVENTQLQNEKLYLYYLQNGRDMYVDQELDINRLSDYDVDHIVPQSFLKDDSIDNKVLTRSDKARGKSDNVPSEEVVKKMKNYWRQLLNAKLITQRKFDNLTKAERGGLSELDKAGFIKRQLVETRQITKHVAQILDSRMNTKYDENDKLIREVKVITLKSKLVSDFRKDFQFYKVREINNYHHAHDAYLNAVVGTALIKKYPKLESEFVYGDYKVYDVRKMIAKSEQEIGKATAKYFFYSNIMNFFKTEITLANGEIRKRPLIETNGETGEIVWDKGRDFATVRKVLSMPQVNIVKKTEVQTGGFSKESILPKRNSDKLIARKKDWDPKKYGGFDSPTVAYSVLVVAKVEKGKSKKLKSVKELLGITIMERSSFEKNPIDFLEAKGYKEVKKDLIIKLPKYSLFELENGRKRMLASAGELQKGNELALPSKYVNFLYLASHYEKLKGSPEDNEQKQLFVEQHKHYLDEIIEQISEFSKRVILADANLDKVLSAYNKHRDKPIREQAENIIHLFTLTNLGAPAAFKYFDTTIDRKRYTSTKEVLDATLIHQSITGLYETRIDLSQLGGDGGGSSGGGGGVLNLEEEYRLHEKPVPSSIDPSWLQLFPTVWAERAGMGLANQVPPVVVELRSGASPVAVRQYPMSKEAREGIRPHIQRFLDLGVLVPCQSPWNTPLLPVKKPGTNDYRPVQDLREINKRVQDIHPTVPNPYNLLSSLPPSHTWYSVLDLKDAFFCLKLHPNSQPLFAFEWRDPEKGNTGQLTWTRLPQGFKNSPTLFDEALHRDLAPFRALNPQVVLLQYVDDLLVAAPTYRDCKEGTQKLLQELSKLGYRVSAKKAQLCQKEVTYLGYLLKEGKRWLTPARKATVMKIPPPTTPRQVREFLGTAGFCRLWIPGFASLAAPLYPLTKESIPFIWTEEHQKAFDRIKEALLSAPALALPDLTKPFTLYVDERAGVARGVLTQTLGPWRRPVAYLSKKLDPVASGWPTCLKAVAAVALLLKDADKLTLGQNVTVIASHSLESIVRQPPDRWMTNARMTHYQSLLLNERVSFAPPAVLNPATLLPVESEATPVHRCSEILAEETGTRRDLKDQPLPGVPAWYTDGSSFIAEGKRRAGAAIVDGKRTVWASSLPEGTSAQKAELVALTQALRLAEGKDINIYTDSRYAFATAHIHGAIYKQRGLLTSAGKDIKNKEEILALLEAIHLPKRVAIIHCPGHQKGNDPVATGNRRADEAAKQAALSTRVLAETTKPAGKRTADGSEFEKRTADGSEFESPKKKAKVE

SEQ ID NO: 6683 - protein, 2095 aa, synthetic construct
MPAAKRVKLDGGDKKYSIGLDIGTNSVGWAVITDEYKVPSKKFKVLGNTDRHSIKKNLIGALLFDSGETAEATRLKRTARRRYTRRKNRICYLQEIFSNEMAKVDDSFFHRLEESFLVEEDKKHERHPIFGNIVDEVAYHEKYPTIYHLRKKLVDSTDKADLRLIYLALAHMIKFRGHFLIEGDLNPDNSDVDKLFIQLVQTYNQLFEENPINASGVDAKAILSARLSKSRRLENLIAQLPGEKKNGLFGNLIALSLGLTPNFKSNFDLAEDAKLQLSKDTYDDDLDNLLAQIGDQYADLFLAAKNLSDAILLSDILRVNTEITKAPLSASMIKRYDEHHQDLTLLKALVRQQLPEKYKEIFFDQSKNGYAGYIDGGASQEEFYKFIKPILEKMDGTEELLVKLNREDLLRKQRTFDNGSIPHQIHLGELHAILRRQEDFYPFLKDNREKIEKILTFRIPYYVGPLARGNSRFAWMTRKSEETITPWNFEEVVDKGASAQSFIERMTNFDKNLPNEKVLPKHSLLYEYFTVYNELTKVKYVTEGMRKPAFLSGEQKKAIVDLLFKTNRKVTVKQLKEDYFKKIECFDSVEISGVEDRFNASLGTYHDLLKIIKDKDFLDNEENEDILEDIVLTLTLFEDREMIEERLKTYAHLFDDKVMKQLKRRRYTGWGRLSRKLINGIRDKQSGKTILDFLKSDGFANRNFMQLIHDDSLTFKEDIQKAQVSGQGDSLHEHIANLAGSPAIKKGILQTVKVVDELVKVMGRHKPENIVIEMARENQTTQKGQKNSRERMKRIEEGIKELGSQILKEHPVENTQLQNEKLYLYYLQNGRDMYVDQELDINRLSDYDVDHIVPQSFLKDDSIDNKVLTRSDKARGKSDNVPSEEVVKKMKNYWRQLLNAKLITQRKFDNLTKAERGGLSELDKAGFIKRQLVETRQITKHVAQILDSRMNTKYDENDKLIREVKVITLKSKLVSDFRKDFQFYKVREINNYHHAHDAYLNAVVGTALIKKYPKLESEFVYGDYKVYDVRKMIAKSEQEIGKATAKYFFYSNIMNFFKTEITLANGEIRKRPLIETNGETGEIVWDKGRDFATVRKVLSMPQVNIVKKTEVQTGGFSKESILPKRNSDKLIARKKDWDPKKYGGFDSPTVAYSVLVVAKVEKGKSKKLKSVKELLGITIMERSSFEKNPIDFLEAKGYKEVKKDLIIKLPKYSLFELENGRKRMLASAGELQKGNELALPSKYVNFLYLASHYEKLKGSPEDNEQKQLFVEQHKHYLDEIIEQISEFSKRVILADANLDKVLSAYNKHRDKPIREQAENIIHLFTLTNLGAPAAFKYFDTTIDRKRYTSTKEVLDATLIHQSITGLYETRIDLSQLGGDGGGGGEAAAKGGTAPLEEEYRLFLEAPIQNVTLLEQWKREIPKVWAEINPPGLASTQAPIHVQLLSTALPVRVRQYPITLEAKRSLRETIRKFRAAGILRPVHSPWNTPLLPVRKSGTSEYRMVQDLREVNKRVETIHPTVPNPYTLLSLLPPDRIWYSVLDLKDAFFCIPLAPESQLIFAFEWADAEEGESGQLTWTRLPQGFKNSPTLFNEALNRDLQGFRLDHPSVSLLQYVDDLLIAADTQAACLSATRDLLMTLAELGYRVSGKKAQLCQEEVTYLGFKIHKGSRSLSNSRTQAILQIPVPKTKRQVREFLGTIGYCRLWIPGFAELAQPLYAATRPGNDPLVWGEKEEEAFQSLKLALTQPPALALPSLDKPFQLFVEETSGAAKGVLTQALGPWKRPVAYLSKRLDPVAAGWPRCLRAIAAAALLTREASKLTFGQDIEITSSHNLESLLRSPPDKWLTNARITQYQVLLLDPPRVRFKQTAALNPATLLPETDDTLPIHHCLDTLDSLTSTRPDLTDQPLAQAEATLFTDGSSYIRDGKRYAGAAVVTLDSVIWAEPLPIGTSAQKAELIALTKALEWSKDKSVNIYTDSRYAFATLHVHGMIYRERGWLTAGGKAIKNAPEILALLTAVWLPKRVAVMHCKGHQKDDAPTSTGNRRADEVAREVAIRPLSTQATISAGKRTADGSEFEKRTADGSEFESPKKKAKVE

SEQ ID NO: 6684 - protein, 2099 aa, synthetic construct
MPAAKRVKLDGGDKKYSIGLDIGTNSVGWAVITDEYKVPSKKFKVLGNTDRHSIKKNLIGALLFDSGETAEATRLKRTARRRYTRRKNRICYLQEIFSNEMAKVDDSFFHRLEESFLVEEDKKHERHPIFGNIVDEVAYHEKYPTIYHLRKKLVDSTDKADLRLIYLALAHMIKFRGHFLIEGDLNPDNSDVDKLFIQLVQTYNQLFEENPINASGVDAKAILSARLSKSRRLENLIAQLPGEKKNGLFGNLIALSLGLTPNFKSNFDLAEDAKLQLSKDTYDDDLDNLLAQIGDQYADLFLAAKNLSDAILLSDILRVNTEITKAPLSASMIKRYDEHHQDLTLLKALVRQQLPEKYKEIFFDQSKNGYAGYIDGGASQEEFYKFIKPILEKMDGTEELLVKLNREDLLRKQRTFDNGSIPHQIHLGELHAILRRQEDFYPFLKDNREKIEKILTFRIPYYVGPLARGNSRFAWMTRKSEETITPWNFEEVVDKGASAQSFIERMTNFDKNLPNEKVLPKHSLLYEYFTVYNELTKVKYVTEGMRKPAFLSGEQKKAIVDLLFKTNRKVTVKQLKEDYFKKIECFDSVEISGVEDRFNASLGTYHDLLKIIKDKDFLDNEENEDILEDIVLTLTLFEDREMIEERLKTYAHLFDDKVMKQLKRRRYTGWGRLSRKLINGIRDKQSGKTILDFLKSDGFANRNFMQLIHDDSLTFKEDIQKAQVSGQGDSLHEHIANLAGSPAIKKGILQTVKVVDELVKVMGRHKPENIVIEMARENQTTQKGQKNSRERMKRIEEGIKELGSQILKEHPVENTQLQNEKLYLYYLQNGRDMYVDQELDINRLSDYDVDHIVPQSFLKDDSIDNKVLTRSDKARGKSDNVPSEEVVKKMKNYWRQLLNAKLITQRKFDNLTKAERGGLSELDKAGFIKRQLVETRQITKHVAQILDSRMNTKYDENDKLIREVKVITLKSKLVSDFRKDFQFYKVREINNYHHAHDAYLNAVVGTALIKKYPKLESEFVYGDYKVYDVRKMIAKSEQEIGKATAKYFFYSNIMNFFKTEITLANGEIRKRPLIETNGETGEIVWDKGRDFATVRKVLSMPQVNIVKKTEVQTGGFSKESILPKRNSDKLIARKKDWDPKKYGGFDSPTVAYSVLVVAKVEKGKSKKLKSVKELLGITIMERSSFEKNPIDFLEAKGYKEVKKDLIIKLPKYSLFELENGRKRMLASAGELQKGNELALPSKYVNFLYLASHYEKLKGSPEDNEQKQLFVEQHKHYLDEIIEQISEFSKRVILADANLDKVLSAYNKHRDKPIREQAENIIHLFTLTNLGAPAAFKYFDTTIDRKRYTSTKEVLDATLIHQSITGLYETRIDLSQLGGDGGGGGEAAAKGGTVSLQDEHRLFDIPVTTSLPDVWLQDFPQAWAETGGLGRAKCQAPIIIDLKPTAVPVSIKQYPMSLEAHMGIRQHIIKFLELGVLRPCRSPWNTPLLPVKKPGTQDYRPVQDLREINKRTVDIHPTVPNPYNLLSTLKPDYSWYTVLDLKDAFFCLPLAPQSQELFAFEWKDPERGISGQLTWTRLPQGFKNSPTLFDEALHRDLTDFRTQHPEVTLLQYVDDLLLAAPTKKACTQGTRHLLQELGEKGYRASAKKAQICQTKVTYLGYILSEGKRWLTPGRIETVARIPPPRNPREVREFLGTAGFCRLWIPGFAELAAPLYALTKESTPFTWQTEHQLAFEALKKALLSAPALGLPDTSKPFTLFLDERQGIAKGVLTQKLGPWKRPVAYLSKKLDPVAAGWPPCLRIMAATAMLVKDSAKLTLGQPLTVITPHTLEAIVRQPPDRWITNARLTHYQALLLDTDRVQFGPPVTLNPATLLPVPENQPSPHDCRQVLAETHGTREDLKDQELPDADHTWYTDGSSYLDSGTRRAGAAVVDGHNTIWAQSLPPGTSAQKAELIALTKALELSKGKKANIYTDSRYAFATAHTHGSIYERRGLLTSEGKEIKNKAEIIALLKALFLPQEVAIIHCPGHQKGQDPVAVGNRQADRVARQAAMAEVLTLATEPDNTSHITAGKRTADGSEFEKRTADGSEFESPKKKAKVE

SEQ ID NO: 6685 - protein, 2092 aa, synthetic construct
MPAAKRVKLDGGDKKYSIGLDIGTNSVGWAVITDEYKVPSKKFKVLGNTDRHSIKKNLIGALLFDSGETAEATRLKRTARRRYTRRKNRICYLQEIFSNEMAKVDDSFFHRLEESFLVEEDKKHERHPIFGNIVDEVAYHEKYPTIYHLRKKLVDSTDKADLRLIYLALAHMIKFRGHFLIEGDLNPDNSDVDKLFIQLVQTYNQLFEENPINASGVDAKAILSARLSKSRRLENLIAQLPGEKKNGLFGNLIALSLGLTPNFKSNFDLAEDAKLQLSKDTYDDDLDNLLAQIGDQYADLFLAAKNLSDAILLSDILRVNTEITKAPLSASMIKRYDEHHQDLTLLKALVRQQLPEKYKEIFFDQSKNGYAGYIDGGASQEEFYKFIKPILEKMDGTEELLVKLNREDLLRKQRTFDNGSIPHQIHLGELHAILRRQEDFYPFLKDNREKIEKILTFRIPYYVGPLARGNSRFAWMTRKSEETITPWNFEEVVDKGASAQSFIERMTNFDKNLPNEKVLPKHSLLYEYFTVYNELTKVKYVTEGMRKPAFLSGEQKKAIVDLLFKTNRKVTVKQLKEDYFKKIECFDSVEISGVEDRFNASLGTYHDLLKIIKDKDFLDNEENEDILEDIVLTLTLFEDREMIEERLKTYAHLFDDKVMKQLKRRRYTGWGRLSRKLINGIRDKQSGKTILDFLKSDGFANRNFMQLIHDDSLTFKEDIQKAQVSGQGDSLHEHIANLAGSPAIKKGILQTVKVVDELVKVMGRHKPENIVIEMARENQTTQKGQKNSRERMKRIEEGIKELGSQILKEHPVENTQLQNEKLYLYYLQNGRDMYVDQELDINRLSDYDVDHIVPQSFLKDDSIDNKVLTRSDKARGKSDNVPSEEVVKKMKNYWRQLLNAKLITQRKFDNLTKAERGGLSELDKAGFIKRQLVETRQITKHVAQILDSRMNTKYDENDKLIREVKVITLKSKLVSDFRKDFQFYKVREINNYHHAHDAYLNAVVGTALIKKYPKLESEFVYGDYKVYDVRKMIAKSEQEIGKATAKYFFYSNIMNFFKTEITLANGEIRKRPLIETNGETGEIVWDKGRDFATVRKVLSMPQVNIVKKTEVQTGGFSKESILPKRNSDKLIARKKDWDPKKYGGFDSPTVAYSVLVVAKVEKGKSKKLKSVKELLGITIMERSSFEKNPIDFLEAKGYKEVKKDLIIKLPKYSLFELENGRKRMLASAGELQKGNELALPSKYVNFLYLASHYEKLKGSPEDNEQKQLFVEQHKHYLDEIIEQISEFSKRVILADANLDKVLSAYNKHRDKPIREQAENIIHLFTLTNLGAPAAFKYFDTTIDRKRYTSTKEVLDATLIHQSITGLYETRIDLSQLGGDGGGGGEAAAKGGTLQLEEEYRLFEPESTQKQEMDIWLKNFPQAWAETGGMGTAHCQAPVLIQLKATATPISIRQYPMPHEAYQGIKPHIRRMLDQGILKPCQSPWNTPLLPVKKPGTEDYRPVQDLREVNKRVEDIHPTVPNPYNLLSTLPPSHPWYTVLDLKDAFFCLRLHSESQLLFAFEWRDPEIGLSGQLTWTRLPQGFKNSPTLFNEALHSDLADFRVRYPALVLLQYVDDLLLAAATRTECLEGTKALLETLGNKGYRASAKKAQICLQEVTYLGYSLKDGQRWLTKARKEAILSIPVPKNSRQVREFLGTAGYCRLWIPGFAELAAPLYPLTRPGTLFQWGTEQQLAFEDIKKALLSSPALGLPDITKPFELFIDENSGFAKGVLVQKLGPWKRPVAYLSKKLDTVASGWPPCLRMVAAIAILVKDAGKLTLGQPLTILTSHPVEALVRQPPNKWLSNARMTHYQAMLLDAERVHFGPTVSLNPATLLPLPSGGNHHDCLQILAETHGTRPDLTDQPLPDADLTWYTDGSSFIRNGEREAGAAVTTESEVIWAAPLPPGTSAQRAELIALTQALKMAEGKKLTVYTDSRYAFATTHVHGEIYRRRGWLTSEGKEIKNKNEILALLEALFLPKRLSIIHCPGHQKGDSPQAKGNRLADDTAKKAATETHSSLTVLPAGKRTADGSEFEKRTADGSEFESPKKKAKVE

SEQ ID NO: 6686 - protein, 2124 aa, synthetic construct
MPAAKRVKLDGGDKKYSIGLDIGTNSVGWAVITDEYKVPSKKFKVLGNTDRHSIKKNLIGALLFDSGETAEATRLKRTARRRYTRRKNRICYLQEIFSNEMAKVDDSFFHRLEESFLVEEDKKHERHPIFGNIVDEVAYHEKYPTIYHLRKKLVDSTDKADLRLIYLALAHMIKFRGHFLIEGDLNPDNSDVDKLFIQLVQTYNQLFEENPINASGVDAKAILSARLSKSRRLENLIAQLPGEKKNGLFGNLIALSLGLTPNFKSNFDLAEDAKLQLSKDTYDDDLDNLLAQIGDQYADLFLAAKNLSDAILLSDILRVNTEITKAPLSASMIKRYDEHHQDLTLLKALVRQQLPEKYKEIFFDQSKNGYAGYIDGGASQEEFYKFIKPILEKMDGTEELLVKLNREDLLRKQRTFDNGSIPHQIHLGELHAILRRQEDFYPFLKDNREKIEKILTFRIPYYVGPLARGNSRFAWMTRKSEETITPWNFEEVVDKGASAQSFIERMTNFDKNLPNEKVLPKHSLLYEYFTVYNELTKVKYVTEGMRKPAFLSGEQKKAIVDLLFKTNRKVTVKQLKEDYFKKIECFDSVEISGVEDRFNASLGTYHDLLKIIKDKDFLDNEENEDILEDIVLTLTLFEDREMIEERLKTYAHLFDDKVMKQLKRRRYTGWGRLSRKLINGIRDKQSGKTILDFLKSDGFANRNFMQLIHDDSLTFKEDIQKAQVSGQGDSLHEHIANLAGSPAIKKGILQTVKVVDELVKVMGRHKPENIVIEMARENQTTQKGQKNSRERMKRIEEGIKELGSQILKEHPVENTQLQNEKLYLYYLQNGRDMYVDQELDINRLSDYDVDHIVPQSFLKDDSIDNKVLTRSDKARGKSDNVPSEEVVKKMKNYWRQLLNAKLITQRKFDNLTKAERGGLSELDKAGFIKRQLVETRQITKHVAQILDSRMNTKYDENDKLIREVKVITLKSKLVSDFRKDFQFYKVREINNYHHAHDAYLNAVVGTALIKKYPKLESEFVYGDYKVYDVRKMIAKSEQEIGKATAKYFFYSNIMNFFKTEITLANGEIRKRPLIETNGETGEIVWDKGRDFATVRKVLSMPQVNIVKKTEVQTGGFSKESILPKRNSDKLIARKKDWDPKKYGGFDSPTVAYSVLVVAKVEKGKSKKLKSVKELLGITIMERSSFEKNPIDFLEAKGYKEVKKDLIIKLPKYSLFELENGRKRMLASAGELQKGNELALPSKYVNFLYLASHYEKLKGSPEDNEQKQLFVEQHKHYLDEIIEQISEFSKRVILADANLDKVLSAYNKHRDKPIREQAENIIHLFTLTNLGAPAAFKYFDTTIDRKRYTSTKEVLDATLIHQSITGLYETRIDLSQLGGDGGGGGEAAAKGGLLGRDLLTKLKAQIQFSTEGPQVTWEDRPAMCLVLNLEEEYRLHEKPVPPSIDPSWLQLFPMVWAEKAGMGLANQVPPVVVELKSDASPVAVRQYPMSKEAREGIRPHIQRFLDLGILVPCQSPWNTPLLPVKKPGTNDYRPVQDLREVNKRVQDIHPTVPNPYNLLSSLPPSHTWYSVLDLKDAFFCLKLHPNSQPLFAFEWRDPEKGNTGQLTWTRLPQGFKNSPTLFNEALHRDLASFRALNPQVVMLQYVDDLLVAAPTYRDCKEGTRRLLQELSKLGYRVSAKKAQLCREEVTYLGYLLKGGKRWLTPARKATVMKIPTPTTPRQVREFLGKAGFCRLFIPGFASLAAPLYPLTRPKVPFTWTEAHQEAFGRIKEALLSAPALALPDLTKPFALYVDEKEGVARGVLTQTLGPWRRPVAYLSKKLDPVASGWPTCLKAIAAVALLLKDADKLTLGQNVLVIAPHNLESIVRQPPDRWMTNARMTHYQSLLLNERVSFAPPAILNPATLLPVESDDTPIHICSEILAEETGTRPDLRDQPLPGVPAWYTDGSSFIMDGRRQAGAAIVDNKRTVWASNLPEGTSAQKAELIALTQALRLAEGKSINIYTDSRYAFATAHVHGAIYKQRGWLTSAGKDIKNKEEILALLEAIHLPKRVAIIHCPGHQRGTDPVATGNRKADEAAKQAAQSTRILTETTKNAGKRTADGSEFEKRTADGSEFESPKKKAKVE

SEQ ID NO: 6687 - protein, 2215 aa, synthetic construct
MPAAKRVKLDGGDKKYSIGLDIGTNSVGWAVITDEYKVPSKKFKVLGNTDRHSIKKNLIGALLFDSGETAEATRLKRTARRRYTRRKNRICYLQEIFSNEMAKVDDSFFHRLEESFLVEEDKKHERHPIFGNIVDEVAYHEKYPTIYHLRKKLVDSTDKADLRLIYLALAHMIKFRGHFLIEGDLNPDNSDVDKLFIQLVQTYNQLFEENPINASGVDAKAILSARLSKSRRLENLIAQLPGEKKNGLFGNLIALSLGLTPNFKSNFDLAEDAKLQLSKDTYDDDLDNLLAQIGDQYADLFLAAKNLSDAILLSDILRVNTEITKAPLSASMIKRYDEHHQDLTLLKALVRQQLPEKYKEIFFDQSKNGYAGYIDGGASQEEFYKFIKPILEKMDGTEELLVKLNREDLLRKQRTFDNGSIPHQIHLGELHAILRRQEDFYPFLKDNREKIEKILTFRIPYYVGPLARGNSRFAWMTRKSEETITPWNFEEVVDKGASAQSFIERMTNFDKNLPNEKVLPKHSLLYEYFTVYNELTKVKYVTEGMRKPAFLSGEQKKAIVDLLFKTNRKVTVKQLKEDYFKKIECFDSVEISGVEDRFNASLGTYHDLLKIIKDKDFLDNEENEDILEDIVLTLTLFEDREMIEERLKTYAHLFDDKVMKQLKRRRYTGWGRLSRKLINGIRDKQSGKTILDFLKSDGFANRNFMQLIHDDSLTFKEDIQKAQVSGQGDSLHEHIANLAGSPAIKKGILQTVKVVDELVKVMGRHKPENIVIEMARENQTTQKGQKNSRERMKRIEEGIKELGSQILKEHPVENTQLQNEKLYLYYLQNGRDMYVDQELDINRLSDYDVDHIVPQSFLKDDSIDNKVLTRSDKARGKSDNVPSEEVVKKMKNYWRQLLNAKLITQRKFDNLTKAERGGLSELDKAGFIKRQLVETRQITKHVAQILDSRMNTKYDENDKLIREVKVITLKSKLVSDFRKDFQFYKVREINNYHHAHDAYLNAVVGTALIKKYPKLESEFVYGDYKVYDVRKMIAKSEQEIGKATAKYFFYSNIMNFFKTEITLANGEIRKRPLIETNGETGEIVWDKGRDFATVRKVLSMPQVNIVKKTEVQTGGFSKESILPKRNSDKLIARKKDWDPKKYGGFDSPTVAYSVLVVAKVEKGKSKKLKSVKELLGITIMERSSFEKNPIDFLEAKGYKEVKKDLIIKLPKYSLFELENGRKRMLASAGELQKGNELALPSKYVNFLYLASHYEKLKGSPEDNEQKQLFVEQHKHYLDEIIEQISEFSKRVILADANLDKVLSAYNKHRDKPIREQAENIIHLFTLTNLGAPAAFKYFDTTIDRKRYTSTKEVLDATLIHQSITGLYETRIDLSQLGGDGGGGGEAAAKGGTLGDQGSRGSDPLPEPRVTLTVEGIPTEFLVNTGAEHSVLTKPMGKMGSKRTVVAGATGSKVYPWTTKRLLKIGQKQVTHSFLVIPECPAPLLGRDLLTKLKAQIQFSTEGPQVTWEDRPAMCLVLNLEEEYRLHEKPVPPSIDPSWLQLFPMVWAEKAGMGLANQVPPVVVELKSDASPVAVRQYPMSKEAREGIRPHIQRFLDLGILVPCQSPWNTPLLPVKKPGTNDYRPVQDLREVNKRVQDIHPTVPNPYNLLSSLPPSHTWYSVLDLKDAFFCLKLHPNSQPLFAFEWRDPEKGNTGQLTWTRLPQGFKNSPTLFNEALHRDLASFRALNPQVVMLQYVDDLLVAAPTYRDCKEGTRRLLQELSKLGYRVSAKKAQLCREEVTYLGYLLKGGKRWLTPARKATVMKIPTPTTPRQVREFLGTAGFCRLWIPGFASLAAPLYPLTRPKVPFTWTEAHQEAFGRIKEALLSAPALALPDLTKPFALYVDEKEGVARGVLTQTLGPWRRPVAYLSKKLDPVASGWPTCLKAIAAVALLLKDADKLTLGQNVLVIAPHNLESIVRQPPDRWMTNARMTHYQSLLLNERVSFAPPAILNPATLLPVESDDTPIHICSEILAEETGTRPDLRDQPLPGVPAWYTDGSSFIMDGRRQAGAAIVDNKRTVWASNLPEGTSAQKAELIALTQALRLAEGKSINIYTDSRYAFATAHVHGAIYKQRGWLTSAGKDIKNKEEILALLEAIHLPKRVAIIHCPGHQRGTDPVATGNRKADEAAKQAAQSTRILTETTKNAGKRTADGSEFEKRTADGSEFESPKKKAKVE

SEQ ID NO: 6688 - protein, 2215 aa, synthetic construct
MPAAKRVKLDGGDKKYSIGLDIGTNSVGWAVITDEYKVPSKKFKVLGNTDRHSIKKNLIGALLFDSGETAEATRLKRTARRRYTRRKNRICYLQEIFSNEMAKVDDSFFHRLEESFLVEEDKKHERHPIFGNIVDEVAYHEKYPTIYHLRKKLVDSTDKADLRLIYLALAHMIKFRGHFLIEGDLNPDNSDVDKLFIQLVQTYNQLFEENPINASGVDAKAILSARLSKSRRLENLIAQLPGEKKNGLFGNLIALSLGLTPNFKSNFDLAEDAKLQLSKDTYDDDLDNLLAQIGDQYADLFLAAKNLSDAILLSDILRVNTEITKAPLSASMIKRYDEHHQDLTLLKALVRQQLPEKYKEIFFDQSKNGYAGYIDGGASQEEFYKFIKPILEKMDGTEELLVKLNREDLLRKQRTFDNGSIPHQIHLGELHAILRRQEDFYPFLKDNREKIEKILTFRIPYYVGPLARGNSRFAWMTRKSEETITPWNFEEVVDKGASAQSFIERMTNFDKNLPNEKVLPKHSLLYEYFTVYNELTKVKYVTEGMRKPAFLSGEQKKAIVDLLFKTNRKVTVKQLKEDYFKKIECFDSVEISGVEDRFNASLGTYHDLLKIIKDKDFLDNEENEDILEDIVLTLTLFEDREMIEERLKTYAHLFDDKVMKQLKRRRYTGWGRLSRKLINGIRDKQSGKTILDFLKSDGFANRNFMQLIHDDSLTFKEDIQKAQVSGQGDSLHEHIANLAGSPAIKKGILQTVKVVDELVKVMGRHKPENIVIEMARENQTTQKGQKNSRERMKRIEEGIKELGSQILKEHPVENTQLQNEKLYLYYLQNGRDMYVDQELDINRLSDYDVDHIVPQSFLKDDSIDNKVLTRSDKARGKSDNVPSEEVVKKMKNYWRQLLNAKLITQRKFDNLTKAERGGLSELDKAGFIKRQLVETRQITKHVAQILDSRMNTKYDENDKLIREVKVITLKSKLVSDFRKDFQFYKVREINNYHHAHDAYLNAVVGTALIKKYPKLESEFVYGDYKVYDVRKMIAKSEQEIGKATAKYFFYSNIMNFFKTEITLANGEIRKRPLIETNGETGEIVWDKGRDFATVRKVLSMPQVNIVKKTEVQTGGFSKESILPKRNSDKLIARKKDWDPKKYGGFDSPTVAYSVLVVAKVEKGKSKKLKSVKELLGITIMERSSFEKNPIDFLEAKGYKEVKKDLIIKLPKYSLFELENGRKRMLASAGELQKGNELALPSKYVNFLYLASHYEKLKGSPEDNEQKQLFVEQHKHYLDEIIEQISEFSKRVILADANLDKVLSAYNKHRDKPIREQAENIIHLFTLTNLGAPAAFKYFDTTIDRKRYTSTKEVLDATLIHQSITGLYETRIDLSQLGGDGGGGGEAAAKGGTLGDQGSRGSDPLPEPRVTLTVEGIPTEFLVNTGAEHSVLTKPMGKMGSKRTVVAGATGSKVYPWTTKRLLKIGQKQVTHSFLVIPECPAPLLGRDLLTKLKAQIQFSTEGPQVTWEDRPAMCLVLNLEEEYRLHEKPVPPSIDPSWLQLFPMVWAEKAGMGLANQVPPVVVELKSDASPVAVRQYPMSKEAREGIRPHIQRFLDLGILVPCQSPWNTPLLPVKKPGTNDYRPVQDLREVNKRVQDIHPTVPNPYNLLSSLPPSHTWYSVLDLKDAFFCLKLHPNSQPLFAFEWRDPEKGNTGQLTWTRLPQGFKNSPTLFNEALHRDLASFRALNPQVVMLQYVDDLLVAAPTYRDCKEGTRRLLQELSKLGYRVSAKKAQLCREEVTYLGYLLKGGKRWLTPARKATVMKIPTPTTPRQVREFLGKAGFCRLFIPGFASLAAPLYPLTRPKVPFTWTEAHQEAFGRIKEALLSAPALALPDLTKPFALYVDEKEGVARGVLTQTLGPWRRPVAYLSKKLDPVASGWPTCLKAIAAVALLLKDADKLTLGQNVLVIAPHNLESIVRQPPDRWMTNARMTHYQSLLLNERVSFAPPAILNPATLLPVESDDTPIHICSEILAEETGTRPDLRDQPLPGVPAWYTDGSSFIMDGRRQAGAAIVDNKRTVWASNLPEGTSAQKAELIALTQALRLAEGKSINIYTDSRYAFATAHVHGAIYKQRGWLTSAGKDIKNKEEILALLEAIHLPKRVAIIHCPGHQRGTDPVATGNRKADEAAKQAAQSTRILTETTKNAGKRTADGSEFEKRTADGSEFESPKKKAKVE

SEQ ID NO: 6689 - protein, 2093 aa, synthetic construct
MPAAKRVKLDGGDKKYSIGLDIGTNSVGWAVITDEYKVPSKKFKVLGNTDRHSIKKNLIGALLFDSGETAEATRLKRTARRRYTRRKNRICYLQEIFSNEMAKVDDSFFHRLEESFLVEEDKKHERHPIFGNIVDEVAYHEKYPTIYHLRKKLVDSTDKADLRLIYLALAHMIKFRGHFLIEGDLNPDNSDVDKLFIQLVQTYNQLFEENPINASGVDAKAILSARLSKSRRLENLIAQLPGEKKNGLFGNLIALSLGLTPNFKSNFDLAEDAKLQLSKDTYDDDLDNLLAQIGDQYADLFLAAKNLSDAILLSDILRVNTEITKAPLSASMIKRYDEHHQDLTLLKALVRQQLPEKYKEIFFDQSKNGYAGYIDGGASQEEFYKFIKPILEKMDGTEELLVKLNREDLLRKQRTFDNGSIPHQIHLGELHAILRRQEDFYPFLKDNREKIEKILTFRIPYYVGPLARGNSRFAWMTRKSEETITPWNFEEVVDKGASAQSFIERMTNFDKNLPNEKVLPKHSLLYEYFTVYNELTKVKYVTEGMRKPAFLSGEQKKAIVDLLFKTNRKVTVKQLKEDYFKKIECFDSVEISGVEDRFNASLGTYHDLLKIIKDKDFLDNEENEDILEDIVLTLTLFEDREMIEERLKTYAHLFDDKVMKQLKRRRYTGWGRLSRKLINGIRDKQSGKTILDFLKSDGFANRNFMQLIHDDSLTFKEDIQKAQVSGQGDSLHEHIANLAGSPAIKKGILQTVKVVDELVKVMGRHKPENIVIEMARENQTTQKGQKNSRERMKRIEEGIKELGSQILKEHPVENTQLQNEKLYLYYLQNGRDMYVDQELDINRLSDYDVDHIVPQSFLKDDSIDNKVLTRSDKARGKSDNVPSEEVVKKMKNYWRQLLNAKLITQRKFDNLTKAERGGLSELDKAGFIKRQLVETRQITKHVAQILDSRMNTKYDENDKLIREVKVITLKSKLVSDFRKDFQFYKVREINNYHHAHDAYLNAVVGTALIKKYPKLESEFVYGDYKVYDVRKMIAKSEQEIGKATAKYFFYSNIMNFFKTEITLANGEIRKRPLIETNGETGEIVWDKGRDFATVRKVLSMPQVNIVKKTEVQTGGFSKESILPKRNSDKLIARKKDWDPKKYGGFDSPTVAYSVLVVAKVEKGKSKKLKSVKELLGITIMERSSFEKNPIDFLEAKGYKEVKKDLIIKLPKYSLFELENGRKRMLASAGELQKGNELALPSKYVNFLYLASHYEKLKGSPEDNEQKQLFVEQHKHYLDEIIEQISEFSKRVILADANLDKVLSAYNKHRDKPIREQAENIIHLFTLTNLGAPAAFKYFDTTIDRKRYTSTKEVLDATLIHQSITGLYETRIDLSQLGGDGGGGGEAAAKGGTLNLEDEYRLYETSAEPEVSPGSTWLSDFPQAWAETGGMGLAVRQAPLIIPLKATSTPVSIKQYPMSQEAKLGIKPHIQRLLDQGILVPCQSPWNTPLLPVKKPGTNDYRPVQDLREVNKRVEDIHPTVPNPYNLLSGLPPSHRWYTVLDLKDAFFCLRLHPTSQPLFAFEWRDPGMGISGQLTWTRLPQGFKNSPTLFNEALHRDLADFRIQHPDLILLQYVDDILLAATSELDCQQGTRALLLTLGNLGYRASAKKAQLCQKQVKYLGYLLKEGQRWLTEARKETVMGQPTPKTPRQLREFLGTAGFCRLWIPGFAEMAAPLYPLTKPGTLFNWGPDQQKAYQEIKQALLTAPALGLPDLTKPFELFVDEKQGYAKGVLTQKLGPWRRPVAYLSKKLDPVAAGWPPCLRMVAAIAVLRKDAGKLTMGQPLVILAPHAVEALVKQPPDRWLSNARMTHYQAMLLDTDRVQFGPVVALNPATLLPLPEEGAPHDCLEILAETHGTRPDLTDQPIPDADHTWYTDGSSFLQEGQRKAGAAVTTETEVIWARALPAGTSAQRAELIALTQALKMAEGKRLNVYTDSRYAFATAHIHGEIYRRRGWLTSEGREIKNKSEILALLKALFLPKRLSIIHCLGHQKGDSAEARGNRLADQAAREAAIKTPPDTSTLLAGKRTADGSEFEKRTADGSEFESPKKKAKVE

SEQ ID NO: 6690 - protein, 2093 aa, synthetic construct
MPAAKRVKLDGGDKKYSIGLDIGTNSVGWAVITDEYKVPSKKFKVLGNTDRHSIKKNLIGALLFDSGETAEATRLKRTARRRYTRRKNRICYLQEIFSNEMAKVDDSFFHRLEESFLVEEDKKHERHPIFGNIVDEVAYHEKYPTIYHLRKKLVDSTDKADLRLIYLALAHMIKFRGHFLIEGDLNPDNSDVDKLFIQLVQTYNQLFEENPINASGVDAKAILSARLSKSRRLENLIAQLPGEKKNGLFGNLIALSLGLTPNFKSNFDLAEDAKLQLSKDTYDDDLDNLLAQIGDQYADLFLAAKNLSDAILLSDILRVNTEITKAPLSASMIKRYDEHHQDLTLLKALVRQQLPEKYKEIFFDQSKNGYAGYIDGGASQEEFYKFIKPILEKMDGTEELLVKLNREDLLRKQRTFDNGSIPHQIHLGELHAILRRQEDFYPFLKDNREKIEKILTFRIPYYVGPLARGNSRFAWMTRKSEETITPWNFEEVVDKGASAQSFIERMTNFDKNLPNEKVLPKHSLLYEYFTVYNELTKVKYVTEGMRKPAFLSGEQKKAIVDLLFKTNRKVTVKQLKEDYFKKIECFDSVEISGVEDRFNASLGTYHDLLKIIKDKDFLDNEENEDILEDIVLTLTLFEDREMIEERLKTYAHLFDDKVMKQLKRRRYTGWGRLSRKLINGIRDKQSGKTILDFLKSDGFANRNFMQLIHDDSLTFKEDIQKAQVSGQGDSLHEHIANLAGSPAIKKGILQTVKVVDELVKVMGRHKPENIVIEMARENQTTQKGQKNSRERMKRIEEGIKELGSQILKEHPVENTQLQNEKLYLYYLQNGRDMYVDQELDINRLSDYDVDHIVPQSFLKDDSIDNKVLTRSDKARGKSDNVPSEEVVKKMKNYWRQLLNAKLITQRKFDNLTKAERGGLSELDKAGFIKRQLVETRQITKHVAQILDSRMNTKYDENDKLIREVKVITLKSKLVSDFRKDFQFYKVREINNYHHAHDAYLNAVVGTALIKKYPKLESEFVYGDYKVYDVRKMIAKSEQEIGKATAKYFFYSNIMNFFKTEITLANGEIRKRPLIETNGETGEIVWDKGRDFATVRKVLSMPQVNIVKKTEVQTGGFSKESILPKRNSDKLIARKKDWDPKKYGGFDSPTVAYSVLVVAKVEKGKSKKLKSVKELLGITIMERSSFEKNPIDFLEAKGYKEVKKDLIIKLPKYSLFELENGRKRMLASAGELQKGNELALPSKYVNFLYLASHYEKLKGSPEDNEQKQLFVEQHKHYLDEIIEQISEFSKRVILADANLDKVLSAYNKHRDKPIREQAENIIHLFTLTNLGAPAAFKYFDTTIDRKRYTSTKEVLDATLIHQSITGLYETRIDLSQLGGDGGGGGEAAAKGGTLNLEDEYRLYETSAEPEVSPGSTWLSDFPQAWAETGGMGLAVRQAPLIIPLKATSTPVSIKQYPMSQEAKLGIKPHIQRLLDQGILVPCQSPWNTPLLPVKKPGTNDYRPVQDLREVNKRVEDIHPTVPNPYNLLSGLPPSHRWYTVLDLKDAFFCLRLHPTSQPLFAFEWRDPGMGISGQLTWTRLPQGFKNSPTLFNEALHRDLADFRIQHPDLILLQYVDDILLAATSELDCQQGTRALLLTLGNLGYRASAKKAQLCQKQVKYLGYLLKEGQRWLTEARKETVMGQPTPKTPRQLREFLGKAGFCRLFIPGFAEMAAPLYPLTKPGTLFNWGPDQQKAYQEIKQALLTAPALGLPDLTKPFELFVDEKQGYAKGVLTQKLGPWRRPVAYLSKKLDPVAAGWPPCLRMVAAIAVLRKDAGKLTMGQPLVILAPHAVEALVKQPPDRWLSNARMTHYQAMLLDTDRVQFGPVVALNPATLLPLPEEGAPHDCLEILAETHGTRPDLTDQPIPDADHTWYTDGSSFLQEGQRKAGAAVTTETEVIWARALPAGTSAQRAELIALTQALKMAEGKRLNVYTDSRYAFATAHIHGEIYRRRGWLTSEGREIKNKSEILALLKALFLPKRLSIIHCLGHQKGDSAEARGNRLADQAAREAAIKTPPDTSTLLAGKRTADGSEFEKRTADGSEFESPKKKAKVE

SEQ ID NO: 6691 - protein, 2093 aa, synthetic construct
MPAAKRVKLDGGDKKYSIGLDIGTNSVGWAVITDEYKVPSKKFKVLGNTDRHSIKKNLIGALLFDSGETAEATRLKRTARRRYTRRKNRICYLQEIFSNEMAKVDDSFFHRLEESFLVEEDKKHERHPIFGNIVDEVAYHEKYPTIYHLRKKLVDSTDKADLRLIYLALAHMIKFRGHFLIEGDLNPDNSDVDKLFIQLVQTYNQLFEENPINASGVDAKAILSARLSKSRRLENLIAQLPGEKKNGLFGNLIALSLGLTPNFKSNFDLAEDAKLQLSKDTYDDDLDNLLAQIGDQYADLFLAAKNLSDAILLSDILRVNTEITKAPLSASMIKRYDEHHQDLTLLKALVRQQLPEKYKEIFFDQSKNGYAGYIDGGASQEEFYKFIKPILEKMDGTEELLVKLNREDLLRKQRTFDNGSIPHQIHLGELHAILRRQEDFYPFLKDNREKIEKILTFRIPYYVGPLARGNSRFAWMTRKSEETITPWNFEEVVDKGASAQSFIERMTNFDKNLPNEKVLPKHSLLYEYFTVYNELTKVKYVTEGMRKPAFLSGEQKKAIVDLLFKTNRKVTVKQLKEDYFKKIECFDSVEISGVEDRFNASLGTYHDLLKIIKDKDFLDNEENEDILEDIVLTLTLFEDREMIEERLKTYAHLFDDKVMKQLKRRRYTGWGRLSRKLINGIRDKQSGKTILDFLKSDGFANRNFMQLIHDDSLTFKEDIQKAQVSGQGDSLHEHIANLAGSPAIKKGILQTVKVVDELVKVMGRHKPENIVIEMARENQTTQKGQKNSRERMKRIEEGIKELGSQILKEHPVENTQLQNEKLYLYYLQNGRDMYVDQELDINRLSDYDVDHIVPQSFLKDDSIDNKVLTRSDKARGKSDNVPSEEVVKKMKNYWRQLLNAKLITQRKFDNLTKAERGGLSELDKAGFIKRQLVETRQITKHVAQILDSRMNTKYDENDKLIREVKVITLKSKLVSDFRKDFQFYKVREINNYHHAHDAYLNAVVGTALIKKYPKLESEFVYGDYKVYDVRKMIAKSEQEIGKATAKYFFYSNIMNFFKTEITLANGEIRKRPLIETNGETGEIVWDKGRDFATVRKVLSMPQVNIVKKTEVQTGGFSKESILPKRNSDKLIARKKDWDPKKYGGFDSPTVAYSVLVVAKVEKGKSKKLKSVKELLGITIMERSSFEKNPIDFLEAKGYKEVKKDLIIKLPKYSLFELENGRKRMLASAGELQKGNELALPSKYVNFLYLASHYEKLKGSPEDNEQKQLFVEQHKHYLDEIIEQISEFSKRVILADANLDKVLSAYNKHRDKPIREQAENIIHLFTLTNLGAPAAFKYFDTTIDRKRYTSTKEVLDATLIHQSITGLYETRIDLSQLGGDGGGGGEAAAKGGLGIEDEYRLHETSTEPDVSLGSTWLSDFPQAWAETGGMGLAVRQAPLIIPLKATSTPVSIQQYPMSHEARLGIKPHIQRLLDQGILVPCQSPWNTPLLPVKKPGTNDYRPVQDLREVNKRVEDIHPTVPNPYNLLSGLPPSHQWYTVLDLKDAFFCLRLHPTSQPLFAFEWRDPGMGISGQLTWTRLPQGFKNSPTLFNEALHRDLADFRIQHPDLILLQYVDDILLAATSELDCQQGTRALLQTLGDLGYRASAKKAQICQKQVKYLGYLLREGQRWLTEARKETVMGQPVPKTPRQLREFLGKAGFCRLFIPGFAEMAAPLYPLTKPGTLFSWGPDQQKAYQEIKQALLTAPALGLPDLTKPFELFVDEKQGYAKGVLTQKLGPWRRPVAYLSKKLDPVAAGWPPCLRMVAAIAVLTKDAGKLTMGQPLVILAPHAVEALVKQPPDRWLSNARMTHYQAMLLDTDRVQFGPVVALNPATLLPLPEEGAPHDCLEILAETHGTRPDLTDQPIPDADHTWYTDGSSFLQEGQRKAGAAVTTETEVIWAGALPAGTSAQRAELIALTQALKMAEGKRLNVYTDSRYAFATAHIHGEIYRRRGWLTSEGREIKNKSEILALLKALFLPKRLSIIHCLGHQKGDSAEARGNRLADQAAREAAIKTPPDTSTLLIAGKRTADGSEFEKRTADGSEFESPKKKAKVE

SEQ ID NO: 6692 - protein, 2093 aa, synthetic construct
MPAAKRVKLDGGDKKYSIGLDIGTNSVGWAVITDEYKVPSKKFKVLGNTDRHSIKKNLIGALLFDSGETAEATRLKRTARRRYTRRKNRICYLQEIFSNEMAKVDDSFFHRLEESFLVEEDKKHERHPIFGNIVDEVAYHEKYPTIYHLRKKLVDSTDKADLRLIYLALAHMIKFRGHFLIEGDLNPDNSDVDKLFIQLVQTYNQLFEENPINASGVDAKAILSARLSKSRRLENLIAQLPGEKKNGLFGNLIALSLGLTPNFKSNFDLAEDAKLQLSKDTYDDDLDNLLAQIGDQYADLFLAAKNLSDAILLSDILRVNTEITKAPLSASMIKRYDEHHQDLTLLKALVRQQLPEKYKEIFFDQSKNGYAGYIDGGASQEEFYKFIKPILEKMDGTEELLVKLNREDLLRKQRTFDNGSIPHQIHLGELHAILRRQEDFYPFLKDNREKIEKILTFRIPYYVGPLARGNSRFAWMTRKSEETITPWNFEEVVDKGASAQSFIERMTNFDKNLPNEKVLPKHSLLYEYFTVYNELTKVKYVTEGMRKPAFLSGEQKKAIVDLLFKTNRKVTVKQLKEDYFKKIECFDSVEISGVEDRFNASLGTYHDLLKIIKDKDFLDNEENEDILEDIVLTLTLFEDREMIEERLKTYAHLFDDKVMKQLKRRRYTGWGRLSRKLINGIRDKQSGKTILDFLKSDGFANRNFMQLIHDDSLTFKEDIQKAQVSGQGDSLHEHIANLAGSPAIKKGILQTVKVVDELVKVMGRHKPENIVIEMARENQTTQKGQKNSRERMKRIEEGIKELGSQILKEHPVENTQLQNEKLYLYYLQNGRDMYVDQELDINRLSDYDVDHIVPQSFLKDDSIDNKVLTRSDKARGKSDNVPSEEVVKKMKNYWRQLLNAKLITQRKFDNLTKAERGGLSELDKAGFIKRQLVETRQITKHVAQILDSRMNTKYDENDKLIREVKVITLKSKLVSDFRKDFQFYKVREINNYHHAHDAYLNAVVGTALIKKYPKLESEFVYGDYKVYDVRKMIAKSEQEIGKATAKYFFYSNIMNFFKTEITLANGEIRKRPLIETNGETGEIVWDKGRDFATVRKVLSMPQVNIVKKTEVQTGGFSKESILPKRNSDKLIARKKDWDPKKYGGFDSPTVAYSVLVVAKVEKGKSKKLKSVKELLGITIMERSSFEKNPIDFLEAKGYKEVKKDLIIKLPKYSLFELENGRKRMLASAGELQKGNELALPSKYVNFLYLASHYEKLKGSPEDNEQKQLFVEQHKHYLDEIIEQISEFSKRVILADANLDKVLSAYNKHRDKPIREQAENIIHLFTLTNLGAPAAFKYFDTTIDRKRYTSTKEVLDATLIHQSITGLYETRIDLSQLGGDGGGGGEAAAKGGTLNIEDEYRLHETSKGPDVPLGSTWLSDFPQAWAETGGMGLAVRQAPLIIPLKATSTPVSIKQYPMSQEARLGIKPHIQRLLDQGILVPCQSPWNTPLLPVKKPGTNDYRPVQDLREVNKRVEDIHPTVPNPYNLLSGLPPSHQWYTVLDLKDAFFCLRLHPTSQSLFAFEWRDPEMGISGQLTWTRLPQGFKNSPTLFNEALHRDLADFRIQHPDLILLQYVDDLLLAATSELDCQQGTRALLQTLGDLGYRASAKKAQICQKQVKYLGYLLKEGQRWLTEARKETVMGQPTPKTPRQLREFLGTAGFCRLWIPGFAEMAAPLYPLTKPGTLFEWGPDQQKAYQEIKQALLTAPALGLPDLTKPFELFVDEKQGYAKGVLTQKLGPWRRPVAYLSKKLDPVAAGWPPCLRMVAAIAVLTKDAGKLTMGQPLVILAPHAVEALVKQPPDRWLSNARMTHYQALLLDTDRVQFGPIVALNPATLLPLPEEGLQHDCLDILAEAHGTRPDLTDQPLPDADHTWYTDGSSFLQEGQRKAGAAVTTETEVVWAKALPAGTSAQRAELIALTQALKMAEGKKLNVYTDSRYAFATAHIHGEIYRRRGWLTSEGKEIKNKDEILALLKALFLPKRLSIIHCPGHQKGNRAEARGNRMADQAAREVATRETPETSTLLAGKRTADGSEFEKRTADGSEFESPKKKAKVE

SEQ ID NO: 6693 - protein, 2087 aa, synthetic construct
MPAAKRVKLDGGDKKYSIGLDIGTNSVGWAVITDEYKVPSKKFKVLGNTDRHSIKKNLIGALLFDSGETAEATRLKRTARRRYTRRKNRICYLQEIFSNEMAKVDDSFFHRLEESFLVEEDKKHERHPIFGNIVDEVAYHEKYPTIYHLRKKLVDSTDKADLRLIYLALAHMIKFRGHFLIEGDLNPDNSDVDKLFIQLVQTYNQLFEENPINASGVDAKAILSARLSKSRRLENLIAQLPGEKKNGLFGNLIALSLGLTPNFKSNFDLAEDAKLQLSKDTYDDDLDNLLAQIGDQYADLFLAAKNLSDAILLSDILRVNTEITKAPLSASMIKRYDEHHQDLTLLKALVRQQLPEKYKEIFFDQSKNGYAGYIDGGASQEEFYKFIKPILEKMDGTEELLVKLNREDLLRKQRTFDNGSIPHQIHLGELHAILRRQEDFYPFLKDNREKIEKILTFRIPYYVGPLARGNSRFAWMTRKSEETITPWNFEEVVDKGASAQSFIERMTNFDKNLPNEKVLPKHSLLYEYFTVYNELTKVKYVTEGMRKPAFLSGEQKKAIVDLLFKTNRKVTVKQLKEDYFKKIECFDSVEISGVEDRFNASLGTYHDLLKIIKDKDFLDNEENEDILEDIVLTLTLFEDREMIEERLKTYAHLFDDKVMKQLKRRRYTGWGRLSRKLINGIRDKQSGKTILDFLKSDGFANRNFMQLIHDDSLTFKEDIQKAQVSGQGDSLHEHIANLAGSPAIKKGILQTVKVVDELVKVMGRHKPENIVIEMARENQTTQKGQKNSRERMKRIEEGIKELGSQILKEHPVENTQLQNEKLYLYYLQNGRDMYVDQELDINRLSDYDVDHIVPQSFLKDDSIDNKVLTRSDKARGKSDNVPSEEVVKKMKNYWRQLLNAKLITQRKFDNLTKAERGGLSELDKAGFIKRQLVETRQITKHVAQILDSRMNTKYDENDKLIREVKVITLKSKLVSDFRKDFQFYKVREINNYHHAHDAYLNAVVGTALIKKYPKLESEFVYGDYKVYDVRKMIAKSEQEIGKATAKYFFYSNIMNFFKTEITLANGEIRKRPLIETNGETGEIVWDKGRDFATVRKVLSMPQVNIVKKTEVQTGGFSKESILPKRNSDKLIARKKDWDPKKYGGFDSPTVAYSVLVVAKVEKGKSKKLKSVKELLGITIMERSSFEKNPIDFLEAKGYKEVKKDLIIKLPKYSLFELENGRKRMLASAGELQKGNELALPSKYVNFLYLASHYEKLKGSPEDNEQKQLFVEQHKHYLDEIIEQISEFSKRVILADANLDKVLSAYNKHRDKPIREQAENIIHLFTLTNLGAPAAFKYFDTTIDRKRYTSTKEVLDATLIHQSITGLYETRIDLSQLGGDGGGGGEAAAKGGTLQLDDEYRLYSPLVKPDQNIQFWLEQFPQAWAETAGMGLAKQVPPQVIQLKASATPVSVRQYPLSKEAQEGIRPHVQRLIQQGILVPVQSPWNTPLLPVRKPGTNDYRPVQDLREVNKRVQDIHPTVPNPYNLLCALPPQRSWYTVLDLKDAFFCLRLHPTSQPLFAFEWRDPGTGRTGQLTWTRLPQGFKNSPTIFDEALHRDLANFRIQHPQVTLLQYVDDLLLAGATKQDCLEGTKALLLELSDLGYRASAKKAQICRREVTYLGYSLRDGQRWLTEARKKTVVQIPAPTTAKQVREFLGTAGFCRLWIPGFATLAAPLYPLTKEKGEFSWAPEHQKAFDAIKKALLSAPALALPDVTKPFTLYVDERKGVARGVLTQTLGPWRRPVAYLSKKLDPVASGWPVCLKAIAAVAILVKDADKLTLGQNITVIAPHALENIVRQPPDRWMTNARMTHYQSLLLTERVTFAPPAALNPATLLPEETDEPVTHDCHQLLIEETGVRKDLTDIPLTGEVLTWFTDGSSYVVEGKRMAGAAVVDGTRTIWASSLPEGTSAQKAELMALTQALRLAEGKSINIYTDSRYAFATAHVHGAIYKQRGLLTSAGREIKNKEEILSLLEALHLPKRLAIIHCPGHQKAKDPISRGNQMADRVAKQAAQGVNLLAGKRTADGSEFEKRTADGSEFESPKKKAKVE

SEQ ID NO: 6694 - protein, 2173 aa, synthetic construct
MPAAKRVKLDGGDKKYSIGLDIGTNSVGWAVITDEYKVPSKKFKVLGNTDRHSIKKNLIGALLFDSGETAEATRLKRTARRRYTRRKNRICYLQEIFSNEMAKVDDSFFHRLEESFLVEEDKKHERHPIFGNIVDEVAYHEKYPTIYHLRKKLVDSTDKADLRLIYLALAHMIKFRGHFLIEGDLNPDNSDVDKLFIQLVQTYNQLFEENPINASGVDAKAILSARLSKSRRLENLIAQLPGEKKNGLFGNLIALSLGLTPNFKSNFDLAEDAKLQLSKDTYDDDLDNLLAQIGDQYADLFLAAKNLSDAILLSDILRVNTEITKAPLSASMIKRYDEHHQDLTLLKALVRQQLPEKYKEIFFDQSKNGYAGYIDGGASQEEFYKFIKPILEKMDGTEELLVKLNREDLLRKQRTFDNGSIPHQIHLGELHAILRRQEDFYPFLKDNREKIEKILTFRIPYYVGPLARGNSRFAWMTRKSEETITPWNFEEVVDKGASAQSFIERMTNFDKNLPNEKVLPKHSLLYEYFTVYNELTKVKYVTEGMRKPAFLSGEQKKAIVDLLFKTNRKVTVKQLKEDYFKKIECFDSVEISGVEDRFNASLGTYHDLLKIIKDKDFLDNEENEDILEDIVLTLTLFEDREMIEERLKTYAHLFDDKVMKQLKRRRYTGWGRLSRKLINGIRDKQSGKTILDFLKSDGFANRNFMQLIHDDSLTFKEDIQKAQVSGQGDSLHEHIANLAGSPAIKKGILQTVKVVDELVKVMGRHKPENIVIEMARENQTTQKGQKNSRERMKRIEEGIKELGSQILKEHPVENTQLQNEKLYLYYLQNGRDMYVDQELDINRLSDYDVDHIVPQSFLKDDSIDNKVLTRSDKARGKSDNVPSEEVVKKMKNYWRQLLNAKLITQRKFDNLTKAERGGLSELDKAGFIKRQLVETRQITKHVAQILDSRMNTKYDENDKLIREVKVITLKSKLVSDFRKDFQFYKVREINNYHHAHDAYLNAVVGTALIKKYPKLESEFVYGDYKVYDVRKMIAKSEQEIGKATAKYFFYSNIMNFFKTEITLANGEIRKRPLIETNGETGEIVWDKGRDFATVRKVLSMPQVNIVKKTEVQTGGFSKESILPKRNSDKLIARKKDWDPKKYGGFDSPTVAYSVLVVAKVEKGKSKKLKSVKELLGITIMERSSFEKNPIDFLEAKGYKEVKKDLIIKLPKYSLFELENGRKRMLASAGELQKGNELALPSKYVNFLYLASHYEKLKGSPEDNEQKQLFVEQHKHYLDEIIEQISEFSKRVILADANLDKVLSAYNKHRDKPIREQAENIIHLFTLTNLGAPAAFKYFDTTIDRKRYTSTKEVLDATLIHQSITGLYETRIDLSQLGGDGGGGGEAAAKGGMDPLQLLQPLEAEIKGTKLKAHWNSGATITCVPQAFLEEEVPIKNIWIKTIHGEKEQPVYYLTFKIQGRKVEAEVISSPYDYILVSPSDIPWLMKKPLQLTTLVPLQEYEERLLKQTMLTGSYKEKLQSLFLKYDALWQHWENQVGHRRIKPHHIATGTVNPRPQKQYPINPKAKASIQTVINDLLKQGVLIQQNSIMNTPVYPVPKPDGKWRMVLDYREVNKTIPLIAAQNQHSAGILSSIFRGKYKTTLDLSNGFWAHSITPESYWLTAFTWLGQQYCWTRLPQGFLNSPALFNADVVDLLKEVPNVQVYVDDIYISHDDPREHLEQLEKVFSLLLNAGYVVSLKKSEIAQHEVEFLGFNITKEGRGLTETFKQKLLNITPPRDLKQLQSILGKLNFARNFIPNFSELVKPLYNIIATAPGKYITWTTDNSQQLQNIISMLNSAENLEERNPEVRLIMKVNTSPSAGYIRFYNEFAKRPIMYLNYVYTKAEVKFTNTEKLLTTIHKGLIKALDLGMGQEILVYSPIVSMTKIQKTPLPERKALPIRWITWMSYLEDPRIQFHYDKTLPELQQVPTVTDDIIAKIKHPSEFSMVFYTDGSAIKHPNVNKSHNAGMGIAQVQFKPEFTVINTWSIPLGDHTAQLAEVAAVEFACKKALKIDGPVLIVTDSFYVAESVNKELPYWQSNGFFNNKKKPLKHVSKWKSIADCIQLKPDIIIIHEKGHQPTASTFHTEGNNLADKLATQGSYVVNAGKRTADGSEFEKRTADGSEFESPKKKAKVE

SEQ ID NO: 6695 - protein, 2093 aa, synthetic construct
MPAAKRVKLDGGDKKYSIGLDIGTNSVGWAVITDEYKVPSKKFKVLGNTDRHSIKKNLIGALLFDSGETAEATRLKRTARRRYTRRKNRICYLQEIFSNEMAKVDDSFFHRLEESFLVEEDKKHERHPIFGNIVDEVAYHEKYPTIYHLRKKLVDSTDKADLRLIYLALAHMIKFRGHFLIEGDLNPDNSDVDKLFIQLVQTYNQLFEENPINASGVDAKAILSARLSKSRRLENLIAQLPGEKKNGLFGNLIALSLGLTPNFKSNFDLAEDAKLQLSKDTYDDDLDNLLAQIGDQYADLFLAAKNLSDAILLSDILRVNTEITKAPLSASMIKRYDEHHQDLTLLKALVRQQLPEKYKEIFFDQSKNGYAGYIDGGASQEEFYKFIKPILEKMDGTEELLVKLNREDLLRKQRTFDNGSIPHQIHLGELHAILRRQEDFYPFLKDNREKIEKILTFRIPYYVGPLARGNSRFAWMTRKSEETITPWNFEEVVDKGASAQSFIERMTNFDKNLPNEKVLPKHSLLYEYFTVYNELTKVKYVTEGMRKPAFLSGEQKKAIVDLLFKTNRKVTVKQLKEDYFKKIECFDSVEISGVEDRFNASLGTYHDLLKIIKDKDFLDNEENEDILEDIVLTLTLFEDREMIEERLKTYAHLFDDKVMKQLKRRRYTGWGRLSRKLINGIRDKQSGKTILDFLKSDGFANRNFMQLIHDDSLTFKEDIQKAQVSGQGDSLHEHIANLAGSPAIKKGILQTVKVVDELVKVMGRHKPENIVIEMARENQTTQKGQKNSRERMKRIEEGIKELGSQILKEHPVENTQLQNEKLYLYYLQNGRDMYVDQELDINRLSDYDVDHIVPQSFLKDDSIDNKVLTRSDKARGKSDNVPSEEVVKKMKNYWRQLLNAKLITQRKFDNLTKAERGGLSELDKAGFIKRQLVETRQITKHVAQILDSRMNTKYDENDKLIREVKVITLKSKLVSDFRKDFQFYKVREINNYHHAHDAYLNAVVGTALIKKYPKLESEFVYGDYKVYDVRKMIAKSEQEIGKATAKYFFYSNIMNFFKTEITLANGEIRKRPLIETNGETGEIVWDKGRDFATVRKVLSMPQVNIVKKTEVQTGGFSKESILPKRNSDKLIARKKDWDPKKYGGFDSPTVAYSVLVVAKVEKGKSKKLKSVKELLGITIMERSSFEKNPIDFLEAKGYKEVKKDLIIKLPKYSLFELENGRKRMLASAGELQKGNELALPSKYVNFLYLASHYEKLKGSPEDNEQKQLFVEQHKHYLDEIIEQISEFSKRVILADANLDKVLSAYNKHRDKPIREQAENIIHLFTLTNLGAPAAFKYFDTTIDRKRYTSTKEVLDATLIHQSITGLYETRIDLSQLGGDGGGGGEAAAKGGTLNIEDEYRLHETSKEPDVPLGSTWLSDFPQAWAETGGMGLAVRQAPLIIPLKATSTPVSIKQYPMSQEARLGIKPHIQRLLDQGILVPCQSPWNTPLLPVKKPGTNDYRPVQDLREVNKRVEDIHPTVPNPYNLLSGLPPSHQWYTVLDLKDAFFCLRLHPTSQPLFAFEWRDPEMGISGQLTWTRLPQGFKNSPTLFNEALHRDLADFRIQHPDLILLQYVDDLLLAATSEQDCQRGTRALLQTLGNLGYRASAKKAQICQKQVKYLGYLLKEGQRWLTEARKETVMGQPTPKTPRQLREFLGTAGFCRLWIPGFAEMAAPLYPLTKPGTLFNWGPDQQKAYQEIKQALLTAPALGLPDLTKPFELFVDEKQGYAKGVLTQKLGPWRRPVAYLSKKLDPVAAGWPPCLRMVAAIAVLTKDAGKLTMGQPLVILAPHAVEALVKQPPDRWLSNARMTHYQAMLLDTDRVQFGPVVALNPATLLPLPEKEAPHDCLEILAETHGTRPDLTDQPIPDADYTWYTDGSSFLQEGQRRAGAAVTTETEVIWARALPAGTSAQRAELIALTQALKMAEGKKLNVYTDSRYAFATAHVHGEIYRRRGWLTSEGREIKNKNEILALLKALFLPKRLSIIHCPGHQKGNSAEARGNRMADQAAREAAMKAVLETSTLLAGKRTADGSEFEKRTADGSEFESPKKKAKVE

SEQ ID NO: 6696 - protein, 2091 aa, synthetic construct
MPAAKRVKLDGGDKKYSIGLDIGTNSVGWAVITDEYKVPSKKFKVLGNTDRHSIKKNLIGALLFDSGETAEATRLKRTARRRYTRRKNRICYLQEIFSNEMAKVDDSFFHRLEESFLVEEDKKHERHPIFGNIVDEVAYHEKYPTIYHLRKKLVDSTDKADLRLIYLALAHMIKFRGHFLIEGDLNPDNSDVDKLFIQLVQTYNQLFEENPINASGVDAKAILSARLSKSRRLENLIAQLPGEKKNGLFGNLIALSLGLTPNFKSNFDLAEDAKLQLSKDTYDDDLDNLLAQIGDQYADLFLAAKNLSDAILLSDILRVNTEITKAPLSASMIKRYDEHHQDLTLLKALVRQQLPEKYKEIFFDQSKNGYAGYIDGGASQEEFYKFIKPILEKMDGTEELLVKLNREDLLRKQRTFDNGSIPHQIHLGELHAILRRQEDFYPFLKDNREKIEKILTFRIPYYVGPLARGNSRFAWMTRKSEETITPWNFEEVVDKGASAQSFIERMTNFDKNLPNEKVLPKHSLLYEYFTVYNELTKVKYVTEGMRKPAFLSGEQKKAIVDLLFKTNRKVTVKQLKEDYFKKIECFDSVEISGVEDRFNASLGTYHDLLKIIKDKDFLDNEENEDILEDIVLTLTLFEDREMIEERLKTYAHLFDDKVMKQLKRRRYTGWGRLSRKLINGIRDKQSGKTILDFLKSDGFANRNFMQLIHDDSLTFKEDIQKAQVSGQGDSLHEHIANLAGSPAIKKGILQTVKVVDELVKVMGRHKPENIVIEMARENQTTQKGQKNSRERMKRIEEGIKELGSQILKEHPVENTQLQNEKLYLYYLQNGRDMYVDQELDINRLSDYDVDHIVPQSFLKDDSIDNKVLTRSDKARGKSDNVPSEEVVKKMKNYWRQLLNAKLITQRKFDNLTKAERGGLSELDKAGFIKRQLVETRQITKHVAQILDSRMNTKYDENDKLIREVKVITLKSKLVSDFRKDFQFYKVREINNYHHAHDAYLNAVVGTALIKKYPKLESEFVYGDYKVYDVRKMIAKSEQEIGKATAKYFFYSNIMNFFKTEITLANGEIRKRPLIETNGETGEIVWDKGRDFATVRKVLSMPQVNIVKKTEVQTGGFSKESILPKRNSDKLIARKKDWDPKKYGGFDSPTVAYSVLVVAKVEKGKSKKLKSVKELLGITIMERSSFEKNPIDFLEAKGYKEVKKDLIIKLPKYSLFELENGRKRMLASAGELQKGNELALPSKYVNFLYLASHYEKLKGSPEDNEQKQLFVEQHKHYLDEIIEQISEFSKRVILADANLDKVLSAYNKHRDKPIREQAENIIHLFTLTNLGAPAAFKYFDTTIDRKRYTSTKEVLDATLIHQSITGLYETRIDLSQLGGDGGEAAAKGGGGGVLNLEEEYRLHEKPVPSSIDPSWLQLFPTVWAERAGMGLANQVPPVVVELRSGASPVAVRQYPMSKEAREGIRPHIQKFLDLGVLVPCRSPWNTPLLPVKKPGTNDYRPVQDLREINKRVQDIHPTVPNPYNLLSSLPPSYTWYSVLDLKDAFFCLRLHPNSQPLFAFEWKDPEKGNTGQLTWTRLPQGFKNSPTLFNEALHRDLAPFRALNPQVVLLQYVDDLLVAAPTYEDCKKGTQKLLQELSKLGYRVSAKKAQLCQREVTYLGYLLKEGKRWLTPARKATVMKIPVPTTPRQVREFLGTAGFCRLWIPGFASLAAPLYPLTKPSIPFIWTEEHQQAFDHIKKALLSAPALALPDLTKPFTLYIDERAGVARGVLTQTLGPWRRPVAYLSKKLDPVASGWPTCLKAVAAVALLLKDADKLTLGQNVTVIASHSLESIVRQPPDRWMTNARMTHYQSLLLNERVSFAPPAVLNPATLLPVESEATPVHRCSEILAEETGTRRDLEDQPLPGVPTWYTDGSSFITEGKRRAGAPIVDGKRTVWASSLPEGTSAQKAELVALTQALRLAEGKNINIYTDSRYAFATAHIHGAIYKQRGWLTSAGKDIKNKEEILALLEAIHLPRRVAIIHCPGHQRGSNPVATGNRRADEAAKQAALSTRVLAGTTKPAGKRTADGSEFEKRTADGSEFESPKKKAKVE

SEQ ID NO: 6697 - protein, 2091 aa, synthetic construct
MPAAKRVKLDGGDKKYSIGLDIGTNSVGWAVITDEYKVPSKKFKVLGNTDRHSIKKNLIGALLFDSGETAEATRLKRTARRRYTRRKNRICYLQEIFSNEMAKVDDSFFHRLEESFLVEEDKKHERHPIFGNIVDEVAYHEKYPTIYHLRKKLVDSTDKADLRLIYLALAHMIKFRGHFLIEGDLNPDNSDVDKLFIQLVQTYNQLFEENPINASGVDAKAILSARLSKSRRLENLIAQLPGEKKNGLFGNLIALSLGLTPNFKSNFDLAEDAKLQLSKDTYDDDLDNLLAQIGDQYADLFLAAKNLSDAILLSDILRVNTEITKAPLSASMIKRYDEHHQDLTLLKALVRQQLPEKYKEIFFDQSKNGYAGYIDGGASQEEFYKFIKPILEKMDGTEELLVKLNREDLLRKQRTFDNGSIPHQIHLGELHAILRRQEDFYPFLKDNREKIEKILTFRIPYYVGPLARGNSRFAWMTRKSEETITPWNFEEVVDKGASAQSFIERMTNFDKNLPNEKVLPKHSLLYEYFTVYNELTKVKYVTEGMRKPAFLSGEQKKAIVDLLFKTNRKVTVKQLKEDYFKKIECFDSVEISGVEDRFNASLGTYHDLLKIIKDKDFLDNEENEDILEDIVLTLTLFEDREMIEERLKTYAHLFDDKVMKQLKRRRYTGWGRLSRKLINGIRDKQSGKTILDFLKSDGFANRNFMQLIHDDSLTFKEDIQKAQVSGQGDSLHEHIANLAGSPAIKKGILQTVKVVDELVKVMGRHKPENIVIEMARENQTTQKGQKNSRERMKRIEEGIKELGSQILKEHPVENTQLQNEKLYLYYLQNGRDMYVDQELDINRLSDYDVDHIVPQSFLKDDSIDNKVLTRSDKARGKSDNVPSEEVVKKMKNYWRQLLNAKLITQRKFDNLTKAERGGLSELDKAGFIKRQLVETRQITKHVAQILDSRMNTKYDENDKLIREVKVITLKSKLVSDFRKDFQFYKVREINNYHHAHDAYLNAVVGTALIKKYPKLESEFVYGDYKVYDVRKMIAKSEQEIGKATAKYFFYSNIMNFFKTEITLANGEIRKRPLIETNGETGEIVWDKGRDFATVRKVLSMPQVNIVKKTEVQTGGFSKESILPKRNSDKLIARKKDWDPKKYGGFDSPTVAYSVLVVAKVEKGKSKKLKSVKELLGITIMERSSFEKNPIDFLEAKGYKEVKKDLIIKLPKYSLFELENGRKRMLASAGELQKGNELALPSKYVNFLYLASHYEKLKGSPEDNEQKQLFVEQHKHYLDEIIEQISEFSKRVILADANLDKVLSAYNKHRDKPIREQAENIIHLFTLTNLGAPAAFKYFDTTIDRKRYTSTKEVLDATLIHQSITGLYETRIDLSQLGGDGGEAAAKGGGGGVLNLEEEYRLHEKPVPSSIDPSWLQLFPTVWAERAGMGLANQVPPVVVELRSGASPVAVRQYPMSKEAREGIRPHIQKFLDLGVLVPCRSPWNTPLLPVKKPGTNDYRPVQDLREINKRVQDIHPTVPNPYNLLSSLPPSYTWYSVLDLKDAFFCLRLHPNSQPLFAFEWKDPEKGNTGQLTWTRLPQGFKNSPTLFNEALHRDLAPFRALNPQVVLLQYVDDLLVAAPTYEDCKKGTQKLLQELSKLGYRVSAKKAQLCQREVTYLGYLLKEGKRWLTPARKATVMKIPVPTTPRQVREFLGKAGFCRLFIPGFASLAAPLYPLTKPSIPFIWTEEHQQAFDHIKKALLSAPALALPDLTKPFTLYIDERAGVARGVLTQTLGPWRRPVAYLSKKLDPVASGWPTCLKAVAAVALLLKDADKLTLGQNVTVIASHSLESIVRQPPDRWMTNARMTHYQSLLLNERVSFAPPAVLNPATLLPVESEATPVHRCSEILAEETGTRRDLEDQPLPGVPTWYTDGSSFITEGKRRAGAPIVDGKRTVWASSLPEGTSAQKAELVALTQALRLAEGKNINIYTDSRYAFATAHIHGAIYKQRGWLTSAGKDIKNKEEILALLEAIHLPRRVAIIHCPGHQRGSNPVATGNRRADEAAKQAALSTRVLAGTTKPAGKRTADGSEFEKRTADGSEFESPKKKAKVE

SEQ ID NO: 6698 - protein, 2124 aa, synthetic construct
MPAAKRVKLDGGDKKYSIGLDIGTNSVGWAVITDEYKVPSKKFKVLGNTDRHSIKKNLIGALLFDSGETAEATRLKRTARRRYTRRKNRICYLQEIFSNEMAKVDDSFFHRLEESFLVEEDKKHERHPIFGNIVDEVAYHEKYPTIYHLRKKLVDSTDKADLRLIYLALAHMIKFRGHFLIEGDLNPDNSDVDKLFIQLVQTYNQLFEENPINASGVDAKAILSARLSKSRRLENLIAQLPGEKKNGLFGNLIALSLGLTPNFKSNFDLAEDAKLQLSKDTYDDDLDNLLAQIGDQYADLFLAAKNLSDAILLSDILRVNTEITKAPLSASMIKRYDEHHQDLTLLKALVRQQLPEKYKEIFFDQSKNGYAGYIDGGASQEEFYKFIKPILEKMDGTEELLVKLNREDLLRKQRTFDNGSIPHQIHLGELHAILRRQEDFYPFLKDNREKIEKILTFRIPYYVGPLARGNSRFAWMTRKSEETITPWNFEEVVDKGASAQSFIERMTNFDKNLPNEKVLPKHSLLYEYFTVYNELTKVKYVTEGMRKPAFLSGEQKKAIVDLLFKTNRKVTVKQLKEDYFKKIECFDSVEISGVEDRFNASLGTYHDLLKIIKDKDFLDNEENEDILEDIVLTLTLFEDREMIEERLKTYAHLFDDKVMKQLKRRRYTGWGRLSRKLINGIRDKQSGKTILDFLKSDGFANRNFMQLIHDDSLTFKEDIQKAQVSGQGDSLHEHIANLAGSPAIKKGILQTVKVVDELVKVMGRHKPENIVIEMARENQTTQKGQKNSRERMKRIEEGIKELGSQILKEHPVENTQLQNEKLYLYYLQNGRDMYVDQELDINRLSDYDVDHIVPQSFLKDDSIDNKVLTRSDKARGKSDNVPSEEVVKKMKNYWRQLLNAKLITQRKFDNLTKAERGGLSELDKAGFIKRQLVETRQITKHVAQILDSRMNTKYDENDKLIREVKVITLKSKLVSDFRKDFQFYKVREINNYHHAHDAYLNAVVGTALIKKYPKLESEFVYGDYKVYDVRKMIAKSEQEIGKATAKYFFYSNIMNFFKTEITLANGEIRKRPLIETNGETGEIVWDKGRDFATVRKVLSMPQVNIVKKTEVQTGGFSKESILPKRNSDKLIARKKDWDPKKYGGFDSPTVAYSVLVVAKVEKGKSKKLKSVKELLGITIMERSSFEKNPIDFLEAKGYKEVKKDLIIKLPKYSLFELENGRKRMLASAGELQKGNELALPSKYVNFLYLASHYEKLKGSPEDNEQKQLFVEQHKHYLDEIIEQISEFSKRVILADANLDKVLSAYNKHRDKPIREQAENIIHLFTLTNLGAPAAFKYFDTTIDRKRYTSTKEVLDATLIHQSITGLYETRIDLSQLGGDGGEAAAKGGGGGLLGRDLLTKLKAQIQFSTEGPQVTWEDRPAMCLVLNLEEEYRLHEKPVPPSIDPSWLQLFPMVWAEKAGMGLANQVPPVVVELKSDASPVAVRQYPMSKEAREGIRPHIQRFLDLGILVPCQSPWNTPLLPVKKPGTNDYRPVQDLREVNKRVQDIHPTVPNPYNLLSSLPPSHTWYSVLDLKDAFFCLKLHPNSQPLFAFEWRDPEKGNTGQLTWTRLPQGFKNSPTLFNEALHRDLASFRALNPQVVMLQYVDDLLVAAPTYRDCKEGTRRLLQELSKLGYRVSAKKAQLCREEVTYLGYLLKGGKRWLTPARKATVMKIPTPTTPRQVREFLGTAGFCRLWIPGFASLAAPLYPLTRPKVPFTWTEAHQEAFGRIKEALLSAPALALPDLTKPFALYVDEKEGVARGVLTQTLGPWRRPVAYLSKKLDPVASGWPTCLKAIAAVALLLKDADKLTLGQNVLVIAPHNLESIVRQPPDRWMTNARMTHYQSLLLNERVSFAPPAILNPATLLPVESDDTPIHICSEILAEETGTRPDLRDQPLPGVPAWYTDGSSFIMDGRRQAGAAIVDNKRTVWASNLPEGTSAQKAELIALTQALRLAEGKSINIYTDSRYAFATAHVHGAIYKQRGWLTSAGKDIKNKEEILALLEAIHLPKRVAIIHCPGHQRGTDPVATGNRKADEAAKQAAQSTRILTETTKNAGKRTADGSEFEKRTADGSEFESPKKKAKVE

SEQ ID NO: 6699 - protein, 2093 aa, synthetic construct
MPAAKRVKLDGGDKKYSIGLDIGTNSVGWAVITDEYKVPSKKFKVLGNTDRHSIKKNLIGALLFDSGETAEATRLKRTARRRYTRRKNRICYLQEIFSNEMAKVDDSFFHRLEESFLVEEDKKHERHPIFGNIVDEVAYHEKYPTIYHLRKKLVDSTDKADLRLIYLALAHMIKFRGHFLIEGDLNPDNSDVDKLFIQLVQTYNQLFEENPINASGVDAKAILSARLSKSRRLENLIAQLPGEKKNGLFGNLIALSLGLTPNFKSNFDLAEDAKLQLSKDTYDDDLDNLLAQIGDQYADLFLAAKNLSDAILLSDILRVNTEITKAPLSASMIKRYDEHHQDLTLLKALVRQQLPEKYKEIFFDQSKNGYAGYIDGGASQEEFYKFIKPILEKMDGTEELLVKLNREDLLRKQRTFDNGSIPHQIHLGELHAILRRQEDFYPFLKDNREKIEKILTFRIPYYVGPLARGNSRFAWMTRKSEETITPWNFEEVVDKGASAQSFIERMTNFDKNLPNEKVLPKHSLLYEYFTVYNELTKVKYVTEGMRKPAFLSGEQKKAIVDLLFKTNRKVTVKQLKEDYFKKIECFDSVEISGVEDRFNASLGTYHDLLKIIKDKDFLDNEENEDILEDIVLTLTLFEDREMIEERLKTYAHLFDDKVMKQLKRRRYTGWGRLSRKLINGIRDKQSGKTILDFLKSDGFANRNFMQLIHDDSLTFKEDIQKAQVSGQGDSLHEHIANLAGSPAIKKGILQTVKVVDELVKVMGRHKPENIVIEMARENQTTQKGQKNSRERMKRIEEGIKELGSQILKEHPVENTQLQNEKLYLYYLQNGRDMYVDQELDINRLSDYDVDHIVPQSFLKDDSIDNKVLTRSDKARGKSDNVPSEEVVKKMKNYWRQLLNAKLITQRKFDNLTKAERGGLSELDKAGFIKRQLVETRQITKHVAQILDSRMNTKYDENDKLIREVKVITLKSKLVSDFRKDFQFYKVREINNYHHAHDAYLNAVVGTALIKKYPKLESEFVYGDYKVYDVRKMIAKSEQEIGKATAKYFFYSNIMNFFKTEITLANGEIRKRPLIETNGETGEIVWDKGRDFATVRKVLSMPQVNIVKKTEVQTGGFSKESILPKRNSDKLIARKKDWDPKKYGGFDSPTVAYSVLVVAKVEKGKSKKLKSVKELLGITIMERSSFEKNPIDFLEAKGYKEVKKDLIIKLPKYSLFELENGRKRMLASAGELQKGNELALPSKYVNFLYLASHYEKLKGSPEDNEQKQLFVEQHKHYLDEIIEQISEFSKRVILADANLDKVLSAYNKHRDKPIREQAENIIHLFTLTNLGAPAAFKYFDTTIDRKRYTSTKEVLDATLIHQSITGLYETRIDLSQLGGDGGEAAAKGGGGGTLNIEDEHRLHETSKEPDVSLGSTWLSDFPQAWAETGGMGLAVRQAPLIIPLKATSTPVSIKQYPMSQEARLGIKPHIQRLLDQGILVPCQSPWNTPLLPVKKPGTNDYRPVQDLREVNKRVEDIHPTVPNPYNLLSGLPPSHQWYTVLDLKDAFFCLRLHPTSQPLFAFEWRDPEMGISGQLTWTRLPQGFKNSPTLFDEALHRDLADFRIQHPDLILLQYVDDLLLAATSELDCQQGTRALLQTLGNLGYRASAKKAQICQKQVKYLGYLLKEGQRWLTEARKETVMGQPTPKTPRQLREFLGTAGFCRLWIPGFAEMAAPLYPLTKTGTLFNWGPDQQKAYQEIKQALLTAPALGLPDLTKPFELFVDEKQGYAKGVLTQKLGPWRRPVAYLSKKLDPVAAGWPPCLRMVAAIAVLTKDAGKLTMGQPLVILAPHAVEALVKQPPDRWLSNARMTHYQALLLDTDRVQFGPVVALNPATLLPLPEEGLQHNCLDILAEAHGTRPDLTDQPLPDADHTWYTDGSSLLQEGQRKAGAAVTTETEVIWAKALPAGTSAQRAELIALTQALKMAEGKKLNVYTDSRYAFATAHIHGEIYRRRGLLTSEGKEIKNKDEILALLKALFLPKRLSIIHCPGHQKGHSAEARGNRMADQAARKAAITETPDTSTLLAGKRTADGSEFEKRTADGSEFESPKKKAKVE

SEQ ID NO: 6700 - protein, 2084 aa, synthetic construct
MPAAKRVKLDGGDKKYSIGLDIGTNSVGWAVITDEYKVPSKKFKVLGNTDRHSIKKNLIGALLFDSGETAEATRLKRTARRRYTRRKNRICYLQEIFSNEMAKVDDSFFHRLEESFLVEEDKKHERHPIFGNIVDEVAYHEKYPTIYHLRKKLVDSTDKADLRLIYLALAHMIKFRGHFLIEGDLNPDNSDVDKLFIQLVQTYNQLFEENPINASGVDAKAILSARLSKSRRLENLIAQLPGEKKNGLFGNLIALSLGLTPNFKSNFDLAEDAKLQLSKDTYDDDLDNLLAQIGDQYADLFLAAKNLSDAILLSDILRVNTEITKAPLSASMIKRYDEHHQDLTLLKALVRQQLPEKYKEIFFDQSKNGYAGYIDGGASQEEFYKFIKPILEKMDGTEELLVKLNREDLLRKQRTFDNGSIPHQIHLGELHAILRRQEDFYPFLKDNREKIEKILTFRIPYYVGPLARGNSRFAWMTRKSEETITPWNFEEVVDKGASAQSFIERMTNFDKNLPNEKVLPKHSLLYEYFTVYNELTKVKYVTEGMRKPAFLSGEQKKAIVDLLFKTNRKVTVKQLKEDYFKKIECFDSVEISGVEDRFNASLGTYHDLLKIIKDKDFLDNEENEDILEDIVLTLTLFEDREMIEERLKTYAHLFDDKVMKQLKRRRYTGWGRLSRKLINGIRDKQSGKTILDFLKSDGFANRNFMQLIHDDSLTFKEDIQKAQVSGQGDSLHEHIANLAGSPAIKKGILQTVKVVDELVKVMGRHKPENIVIEMARENQTTQKGQKNSRERMKRIEEGIKELGSQILKEHPVENTQLQNEKLYLYYLQNGRDMYVDQELDINRLSDYDVDHIVPQSFLKDDSIDNKVLTRSDKARGKSDNVPSEEVVKKMKNYWRQLLNAKLITQRKFDNLTKAERGGLSELDKAGFIKRQLVETRQITKHVAQILDSRMNTKYDENDKLIREVKVITLKSKLVSDFRKDFQFYKVREINNYHHAHDAYLNAVVGTALIKKYPKLESEFVYGDYKVYDVRKMIAKSEQEIGKATAKYFFYSNIMNFFKTEITLANGEIRKRPLIETNGETGEIVWDKGRDFATVRKVLSMPQVNIVKKTEVQTGGFSKESILPKRNSDKLIARKKDWDPKKYGGFDSPTVAYSVLVVAKVEKGKSKKLKSVKELLGITIMERSSFEKNPIDFLEAKGYKEVKKDLIIKLPKYSLFELENGRKRMLASAGELQKGNELALPSKYVNFLYLASHYEKLKGSPEDNEQKQLFVEQHKHYLDEIIEQISEFSKRVILADANLDKVLSAYNKHRDKPIREQAENIIHLFTLTNLGAPAAFKYFDTTIDRKRYTSTKEVLDATLIHQSITGLYETRIDLSQLGGDGGEAAAKGGGGGVPWLMKKPLQLTVLVPLHEYQERLLQQTALPKEQKELLQKLFLKYDALWQHWENQVGHRRIKPHNIATGTLAPRPQKQYPINPKAKPSIQIVIDDLLKQGVLIQQNSTMNTPVYPVPKPDGKWRMVLDYREVNKTIPLIAAQNQHSAGILSSIYRGKYKTTLDLTNGFWAHPITPESYWLTAFTWQGKQYCWTRLPQGFLNSPALFTADVVDLLKEIPNVQAYVDDIYISHDDPQEHLEQLEKIFSILLNAGYVVSLKKSEIAQREVEFLGFNITKEGRGLTDTFKQKLLNITPPKDLKQLQSILGLLNFARNFIPNYSELVKPLYTIVANANGKFISWTEDNSNQLQHIISVLNQADNLEERNPETRLIIKVNSSPSAGYIRYYNEGSKRPIMYVNYIFSKAEAKFTQTEKLLTTMHKGLIKAMDLAMGQEILVYSPIVSMTKIQRTPLPERKALPVRWITWMTYLEDPRIQFHYDKSLPELQQIPNVTEDVIAKTKHPSEFAMVFYTDGSAIKHPDVNKSHSAGMGIAQVQFIPEYKIVHQWSIPLGDHTAQLAEIAAVEFACKKALKISGPVLIVTDSFYVAESANKELPYWKSNGFLNNKKKPLRHVSKWKSIAECLQLKPDIIIMHEKGHQQPMTTLHTEGNNLADKLATQGSYVVHAGKRTADGSEFEKRTADGSEFESPKKKAKVE

SEQ ID NO: 6701 - protein, 2173 aa, synthetic construct
MPAAKRVKLDGGDKKYSIGLDIGTNSVGWAVITDEYKVPSKKFKVLGNTDRHSIKKNLIGALLFDSGETAEATRLKRTARRRYTRRKNRICYLQEIFSNEMAKVDDSFFHRLEESFLVEEDKKHERHPIFGNIVDEVAYHEKYPTIYHLRKKLVDSTDKADLRLIYLALAHMIKFRGHFLIEGDLNPDNSDVDKLFIQLVQTYNQLFEENPINASGVDAKAILSARLSKSRRLENLIAQLPGEKKNGLFGNLIALSLGLTPNFKSNFDLAEDAKLQLSKDTYDDDLDNLLAQIGDQYADLFLAAKNLSDAILLSDILRVNTEITKAPLSASMIKRYDEHHQDLTLLKALVRQQLPEKYKEIFFDQSKNGYAGYIDGGASQEEFYKFIKPILEKMDGTEELLVKLNREDLLRKQRTFDNGSIPHQIHLGELHAILRRQEDFYPFLKDNREKIEKILTFRIPYYVGPLARGNSRFAWMTRKSEETITPWNFEEVVDKGASAQSFIERMTNFDKNLPNEKVLPKHSLLYEYFTVYNELTKVKYVTEGMRKPAFLSGEQKKAIVDLLFKTNRKVTVKQLKEDYFKKIECFDSVEISGVEDRFNASLGTYHDLLKIIKDKDFLDNEENEDILEDIVLTLTLFEDREMIEERLKTYAHLFDDKVMKQLKRRRYTGWGRLSRKLINGIRDKQSGKTILDFLKSDGFANRNFMQLIHDDSLTFKEDIQKAQVSGQGDSLHEHIANLAGSPAIKKGILQTVKVVDELVKVMGRHKPENIVIEMARENQTTQKGQKNSRERMKRIEEGIKELGSQILKEHPVENTQLQNEKLYLYYLQNGRDMYVDQELDINRLSDYDVDHIVPQSFLKDDSIDNKVLTRSDKARGKSDNVPSEEVVKKMKNYWRQLLNAKLITQRKFDNLTKAERGGLSELDKAGFIKRQLVETRQITKHVAQILDSRMNTKYDENDKLIREVKVITLKSKLVSDFRKDFQFYKVREINNYHHAHDAYLNAVVGTALIKKYPKLESEFVYGDYKVYDVRKMIAKSEQEIGKATAKYFFYSNIMNFFKTEITLANGEIRKRPLIETNGETGEIVWDKGRDFATVRKVLSMPQVNIVKKTEVQTGGFSKESILPKRNSDKLIARKKDWDPKKYGGFDSPTVAYSVLVVAKVEKGKSKKLKSVKELLGITIMERSSFEKNPIDFLEAKGYKEVKKDLIIKLPKYSLFELENGRKRMLASAGELQKGNELALPSKYVNFLYLASHYEKLKGSPEDNEQKQLFVEQHKHYLDEIIEQISEFSKRVILADANLDKVLSAYNKHRDKPIREQAENIIHLFTLTNLGAPAAFKYFDTTIDRKRYTSTKEVLDATLIHQSITGLYETRIDLSQLGGDGGEAAAKGGGGGMDPLQLLQPLEAEIKGTKLKAHWNSGATITCVPQAFLEEEVPIKNIWIKTIHGEKEQPVYYLTFKIQGRKVEAEVISSPYDYILVSPSDIPWLMKKPLQLTTLVPLQEYEERLLKQTMLTGSYKEKLQSLFLKYDALWQHWENQVGHRRIKPHHIATGTVNPRPQKQYPINPKAKASIQTVINDLLKQGVLIQQNSIMNTPVYPVPKPDGKWRMVLDYREVNKTIPLIAAQNQHSAGILSSIFRGKYKTTLDLSNGFWAHSITPESYWLTAFTWLGQQYCWTRLPQGFLNSPALFNADVVDLLKEVPNVQVYVDDIYISHDDPREHLEQLEKVFSLLLNAGYVVSLKKSEIAQHEVEFLGFNITKEGRGLTETFKQKLLNITPPRDLKQLQSILGKLNFARNFIPNFSELVKPLYNIIATAPGKYITWTTDNSQQLQNIISMLNSAENLEERNPEVRLIMKVNTSPSAGYIRFYNEFAKRPIMYLNYVYTKAEVKFTNTEKLLTTIHKGLIKALDLGMGQEILVYSPIVSMTKIQKTPLPERKALPIRWITWMSYLEDPRIQFHYDKTLPELQQVPTVTDDIIAKIKHPSEFSMVFYTDGSAIKHPNVNKSHNAGMGIAQVQFKPEFTVINTWSIPLGDHTAQLAEVAAVEFACKKALKIDGPVLIVTDSFYVAESVNKELPYWQSNGFFNNKKKPLKHVSKWKSIADCIQLKPDIIIIHEKGHQPTASTFHTEGNNLADKLATQGSYVVNAGKRTADGSEFEKRTADGSEFESPKKKAKVE

SEQ ID NO: 6702 - protein, 2091 aa, synthetic construct
MPAAKRVKLDGGDKKYSIGLDIGTNSVGWAVITDEYKVPSKKFKVLGNTDRHSIKKNLIGALLFDSGETAEATRLKRTARRRYTRRKNRICYLQEIFSNEMAKVDDSFFHRLEESFLVEEDKKHERHPIFGNIVDEVAYHEKYPTIYHLRKKLVDSTDKADLRLIYLALAHMIKFRGHFLIEGDLNPDNSDVDKLFIQLVQTYNQLFEENPINASGVDAKAILSARLSKSRRLENLIAQLPGEKKNGLFGNLIALSLGLTPNFKSNFDLAEDAKLQLSKDTYDDDLDNLLAQIGDQYADLFLAAKNLSDAILLSDILRVNTEITKAPLSASMIKRYDEHHQDLTLLKALVRQQLPEKYKEIFFDQSKNGYAGYIDGGASQEEFYKFIKPILEKMDGTEELLVKLNREDLLRKQRTFDNGSIPHQIHLGELHAILRRQEDFYPFLKDNREKIEKILTFRIPYYVGPLARGNSRFAWMTRKSEETITPWNFEEVVDKGASAQSFIERMTNFDKNLPNEKVLPKHSLLYEYFTVYNELTKVKYVTEGMRKPAFLSGEQKKAIVDLLFKTNRKVTVKQLKEDYFKKIECFDSVEISGVEDRFNASLGTYHDLLKIIKDKDFLDNEENEDILEDIVLTLTLFEDREMIEERLKTYAHLFDDKVMKQLKRRRYTGWGRLSRKLINGIRDKQSGKTILDFLKSDGFANRNFMQLIHDDSLTFKEDIQKAQVSGQGDSLHEHIANLAGSPAIKKGILQTVKVVDELVKVMGRHKPENIVIEMARENQTTQKGQKNSRERMKRIEEGIKELGSQILKEHPVENTQLQNEKLYLYYLQNGRDMYVDQELDINRLSDYDVDHIVPQSFLKDDSIDNKVLTRSDKARGKSDNVPSEEVVKKMKNYWRQLLNAKLITQRKFDNLTKAERGGLSELDKAGFIKRQLVETRQITKHVAQILDSRMNTKYDENDKLIREVKVITLKSKLVSDFRKDFQFYKVREINNYHHAHDAYLNAVVGTALIKKYPKLESEFVYGDYKVYDVRKMIAKSEQEIGKATAKYFFYSNIMNFFKTEITLANGEIRKRPLIETNGETGEIVWDKGRDFATVRKVLSMPQVNIVKKTEVQTGGFSKESILPKRNSDKLIARKKDWDPKKYGGFDSPTVAYSVLVVAKVEKGKSKKLKSVKELLGITIMERSSFEKNPIDFLEAKGYKEVKKDLIIKLPKYSLFELENGRKRMLASAGELQKGNELALPSKYVNFLYLASHYEKLKGSPEDNEQKQLFVEQHKHYLDEIIEQISEFSKRVILADANLDKVLSAYNKHRDKPIREQAENIIHLFTLTNLGAPAAFKYFDTTIDRKRYTSTKEVLDATLIHQSITGLYETRIDLSQLGGDGGEAAAKGGGGGVLNLEEEYRLHEKPVPSSIDPSWLQLFPTVWAERAGMGLANQVPPVVVELRSGASPVAVRQYPMSKEAREGIRPHIQRFLDLGVLVPCQSPWNTPLLPVKKPGTNDYRPVQDLREINKRVQDIHPTVPNPYNLLSSLPPSHTWYSVLDLKDAFFCLKLHPNSQPLFAFEWRDPEKGNTGQLTWTRLPQGFKNSPTLFDEALHRDLAPFRALNPQVVLLQYVDDLLVAAPTYRDCKEGTQKLLQELSKLGYRVSAKKAQLCQKEVTYLGYLLKEGKRWLTPARKATVMKIPPPTTPRQVREFLGTAGFCRLWIPGFASLAAPLYPLTKESIPFIWTEEHQKAFDRIKEALLSAPALALPDLTKPFTLYVDERAGVARGVLTQTLGPWRRPVAYLSKKLDPVASGWPTCLKAVAAVALLLKDADKLTLGQNVTVIASHSLESIVRQPPDRWMTNARMTHYQSLLLNERVSFAPPAVLNPATLLPVESEATPVHRCSEILAEETGTRRDLKDQPLPGVPAWYTDGSSFIAEGKRRAGAAIVDGKRTVWASSLPEGTSAQKAELVALTQALRLAEGKDINIYTDSRYAFATAHIHGAIYKQRGLLTSAGKDIKNKEEILALLEAIHLPKRVAIIHCPGHQKGNDPVATGNRRADEAAKQAALSTRVLAETTKPAGKRTADGSEFEKRTADGSEFESPKKKAKVE

SEQ ID NO: 6703 - protein, 2093 aa, synthetic construct
MPAAKRVKLDGGDKKYSIGLDIGTNSVGWAVITDEYKVPSKKFKVLGNTDRHSIKKNLIGALLFDSGETAEATRLKRTARRRYTRRKNRICYLQEIFSNEMAKVDDSFFHRLEESFLVEEDKKHERHPIFGNIVDEVAYHEKYPTIYHLRKKLVDSTDKADLRLIYLALAHMIKFRGHFLIEGDLNPDNSDVDKLFIQLVQTYNQLFEENPINASGVDAKAILSARLSKSRRLENLIAQLPGEKKNGLFGNLIALSLGLTPNFKSNFDLAEDAKLQLSKDTYDDDLDNLLAQIGDQYADLFLAAKNLSDAILLSDILRVNTEITKAPLSASMIKRYDEHHQDLTLLKALVRQQLPEKYKEIFFDQSKNGYAGYIDGGASQEEFYKFIKPILEKMDGTEELLVKLNREDLLRKQRTFDNGSIPHQIHLGELHAILRRQEDFYPFLKDNREKIEKILTFRIPYYVGPLARGNSRFAWMTRKSEETITPWNFEEVVDKGASAQSFIERMTNFDKNLPNEKVLPKHSLLYEYFTVYNELTKVKYVTEGMRKPAFLSGEQKKAIVDLLFKTNRKVTVKQLKEDYFKKIECFDSVEISGVEDRFNASLGTYHDLLKIIKDKDFLDNEENEDILEDIVLTLTLFEDREMIEERLKTYAHLFDDKVMKQLKRRRYTGWGRLSRKLINGIRDKQSGKTILDFLKSDGFANRNFMQLIHDDSLTFKEDIQKAQVSGQGDSLHEHIANLAGSPAIKKGILQTVKVVDELVKVMGRHKPENIVIEMARENQTTQKGQKNSRERMKRIEEGIKELGSQILKEHPVENTQLQNEKLYLYYLQNGRDMYVDQELDINRLSDYDVDHIVPQSFLKDDSIDNKVLTRSDKARGKSDNVPSEEVVKKMKNYWRQLLNAKLITQRKFDNLTKAERGGLSELDKAGFIKRQLVETRQITKHVAQILDSRMNTKYDENDKLIREVKVITLKSKLVSDFRKDFQFYKVREINNYHHAHDAYLNAVVGTALIKKYPKLESEFVYGDYKVYDVRKMIAKSEQEIGKATAKYFFYSNIMNFFKTEITLANGEIRKRPLIETNGETGEIVWDKGRDFATVRKVLSMPQVNIVKKTEVQTGGFSKESILPKRNSDKLIARKKDWDPKKYGGFDSPTVAYSVLVVAKVEKGKSKKLKSVKELLGITIMERSSFEKNPIDFLEAKGYKEVKKDLIIKLPKYSLFELENGRKRMLASAGELQKGNELALPSKYVNFLYLASHYEKLKGSPEDNEQKQLFVEQHKHYLDEIIEQISEFSKRVILADANLDKVLSAYNKHRDKPIREQAENIIHLFTLTNLGAPAAFKYFDTTIDRKRYTSTKEVLDATLIHQSITGLYETRIDLSQLGGDGGGGGPAPGGTAPLEEEYRLFLEAPIQNVTLLEQWKREIPKVWAEINPPGLASTQAPIHVQLLSTALPVRVRQYPITLEAKRSLRETIRKFRAAGILRPVHSPWNTPLLPVRKSGTSEYRMVQDLREVNKRVETIHPTVPNPYTLLSLLPPDRIWYSVLDLKDAFFCIPLAPESQLIFAFEWADAEEGESGQLTWTRLPQGFKNSPTLFNEALNRDLQGFRLDHPSVSLLQYVDDLLIAADTQAACLSATRDLLMTLAELGYRVSGKKAQLCQEEVTYLGFKIHKGSRSLSNSRTQAILQIPVPKTKRQVREFLGTIGYCRLWIPGFAELAQPLYAATRPGNDPLVWGEKEEEAFQSLKLALTQPPALALPSLDKPFQLFVEETSGAAKGVLTQALGPWKRPVAYLSKRLDPVAAGWPRCLRAIAAAALLTREASKLTFGQDIEITSSHNLESLLRSPPDKWLTNARITQYQVLLLDPPRVRFKQTAALNPATLLPETDDTLPIHHCLDTLDSLTSTRPDLTDQPLAQAEATLFTDGSSYIRDGKRYAGAAVVTLDSVIWAEPLPIGTSAQKAELIALTKALEWSKDKSVNIYTDSRYAFATLHVHGMIYRERGWLTAGGKAIKNAPEILALLTAVWLPKRVAVMHCKGHQKDDAPTSTGNRRADEVAREVAIRPLSTQATISAGKRTADGSEFEKRTADGSEFESPKKKAKVE

SEQ ID NO: 6704 - protein, 2082 aa, synthetic construct
MPAAKRVKLDGGDKKYSIGLDIGTNSVGWAVITDEYKVPSKKFKVLGNTDRHSIKKNLIGALLFDSGETAEATRLKRTARRRYTRRKNRICYLQEIFSNEMAKVDDSFFHRLEESFLVEEDKKHERHPIFGNIVDEVAYHEKYPTIYHLRKKLVDSTDKADLRLIYLALAHMIKFRGHFLIEGDLNPDNSDVDKLFIQLVQTYNQLFEENPINASGVDAKAILSARLSKSRRLENLIAQLPGEKKNGLFGNLIALSLGLTPNFKSNFDLAEDAKLQLSKDTYDDDLDNLLAQIGDQYADLFLAAKNLSDAILLSDILRVNTEITKAPLSASMIKRYDEHHQDLTLLKALVRQQLPEKYKEIFFDQSKNGYAGYIDGGASQEEFYKFIKPILEKMDGTEELLVKLNREDLLRKQRTFDNGSIPHQIHLGELHAILRRQEDFYPFLKDNREKIEKILTFRIPYYVGPLARGNSRFAWMTRKSEETITPWNFEEVVDKGASAQSFIERMTNFDKNLPNEKVLPKHSLLYEYFTVYNELTKVKYVTEGMRKPAFLSGEQKKAIVDLLFKTNRKVTVKQLKEDYFKKIECFDSVEISGVEDRFNASLGTYHDLLKIIKDKDFLDNEENEDILEDIVLTLTLFEDREMIEERLKTYAHLFDDKVMKQLKRRRYTGWGRLSRKLINGIRDKQSGKTILDFLKSDGFANRNFMQLIHDDSLTFKEDIQKAQVSGQGDSLHEHIANLAGSPAIKKGILQTVKVVDELVKVMGRHKPENIVIEMARENQTTQKGQKNSRERMKRIEEGIKELGSQILKEHPVENTQLQNEKLYLYYLQNGRDMYVDQELDINRLSDYDVDHIVPQSFLKDDSIDNKVLTRSDKARGKSDNVPSEEVVKKMKNYWRQLLNAKLITQRKFDNLTKAERGGLSELDKAGFIKRQLVETRQITKHVAQILDSRMNTKYDENDKLIREVKVITLKSKLVSDFRKDFQFYKVREINNYHHAHDAYLNAVVGTALIKKYPKLESEFVYGDYKVYDVRKMIAKSEQEIGKATAKYFFYSNIMNFFKTEITLANGEIRKRPLIETNGETGEIVWDKGRDFATVRKVLSMPQVNIVKKTEVQTGGFSKESILPKRNSDKLIARKKDWDPKKYGGFDSPTVAYSVLVVAKVEKGKSKKLKSVKELLGITIMERSSFEKNPIDFLEAKGYKEVKKDLIIKLPKYSLFELENGRKRMLASAGELQKGNELALPSKYVNFLYLASHYEKLKGSPEDNEQKQLFVEQHKHYLDEIIEQISEFSKRVILADANLDKVLSAYNKHRDKPIREQAENIIHLFTLTNLGAPAAFKYFDTTIDRKRYTSTKEVLDATLIHQSITGLYETRIDLSQLGGDGGGGGPAPGGVPWILKKPLELTIKLDLEEQQGTLLNNSILSKKGKEELKQLFEKYSALWQSWENQVGHRRIRPHKIATGTVKPTPQKQYHINPKAKPDIQIVINDLLKQGVLIQKESTMNTPVYPVPKPNGRWRMVLDYRAVNKVTPLIAVQNQHSYGILGSLFKGRYKTTIDLSNGFWAHPIVPEDYWITAFTWQGKQYCWTVLPQGFLNSPGLFTGDVVDLLQGIPNVEVYVDDVYISHDSEKEHLEYLDILFNRLKEAGYIISLKKSNIANSIVDFLGFQITNEGRGLTDTFKEKLENITAPTTLKQLQSILGLLNFARNFIPDFTELIAPLYALIPKSTKNYVPWQIEHSTTLETLITKLNGAEYLQGRKGDKTLIMKVNASYTTGYIRYYNEGEKKPISYVSIVFSKTELKFTELEKLLTTVHKGLLKALDLSMGQNIHVYSPIVSMQNIQKTPQTAKKALASRWLSWLSYLEDPRIRFFYDPQMPALKDLPAVDTGKDNKKHPSNFQHIFYTDGSAITSPTKEGHLNAGMGIVYFINKDGNLQKQQEWSISLGNHTAQFAEIAAFEFALKKCLPLGGNILVVTDSNYVAKAYNEELDVWASNGFVNNRKKPLKHISKWKSVADLKRLRPDVVVTHEPGHQKLDSSPHAYGNNLADQLATQASFKVHAGKRTADGSEFEKRTADGSEFESPKKKAKVE

SEQ ID NO: 6705 - protein, 2213 aa, synthetic construct
MPAAKRVKLDGGDKKYSIGLDIGTNSVGWAVITDEYKVPSKKFKVLGNTDRHSIKKNLIGALLFDSGETAEATRLKRTARRRYTRRKNRICYLQEIFSNEMAKVDDSFFHRLEESFLVEEDKKHERHPIFGNIVDEVAYHEKYPTIYHLRKKLVDSTDKADLRLIYLALAHMIKFRGHFLIEGDLNPDNSDVDKLFIQLVQTYNQLFEENPINASGVDAKAILSARLSKSRRLENLIAQLPGEKKNGLFGNLIALSLGLTPNFKSNFDLAEDAKLQLSKDTYDDDLDNLLAQIGDQYADLFLAAKNLSDAILLSDILRVNTEITKAPLSASMIKRYDEHHQDLTLLKALVRQQLPEKYKEIFFDQSKNGYAGYIDGGASQEEFYKFIKPILEKMDGTEELLVKLNREDLLRKQRTFDNGSIPHQIHLGELHAILRRQEDFYPFLKDNREKIEKILTFRIPYYVGPLARGNSRFAWMTRKSEETITPWNFEEVVDKGASAQSFIERMTNFDKNLPNEKVLPKHSLLYEYFTVYNELTKVKYVTEGMRKPAFLSGEQKKAIVDLLFKTNRKVTVKQLKEDYFKKIECFDSVEISGVEDRFNASLGTYHDLLKIIKDKDFLDNEENEDILEDIVLTLTLFEDREMIEERLKTYAHLFDDKVMKQLKRRRYTGWGRLSRKLINGIRDKQSGKTILDFLKSDGFANRNFMQLIHDDSLTFKEDIQKAQVSGQGDSLHEHIANLAGSPAIKKGILQTVKVVDELVKVMGRHKPENIVIEMARENQTTQKGQKNSRERMKRIEEGIKELGSQILKEHPVENTQLQNEKLYLYYLQNGRDMYVDQELDINRLSDYDVDHIVPQSFLKDDSIDNKVLTRSDKARGKSDNVPSEEVVKKMKNYWRQLLNAKLITQRKFDNLTKAERGGLSELDKAGFIKRQLVETRQITKHVAQILDSRMNTKYDENDKLIREVKVITLKSKLVSDFRKDFQFYKVREINNYHHAHDAYLNAVVGTALIKKYPKLESEFVYGDYKVYDVRKMIAKSEQEIGKATAKYFFYSNIMNFFKTEITLANGEIRKRPLIETNGETGEIVWDKGRDFATVRKVLSMPQVNIVKKTEVQTGGFSKESILPKRNSDKLIARKKDWDPKKYGGFDSPTVAYSVLVVAKVEKGKSKKLKSVKELLGITIMERSSFEKNPIDFLEAKGYKEVKKDLIIKLPKYSLFELENGRKRMLASAGELQKGNELALPSKYVNFLYLASHYEKLKGSPEDNEQKQLFVEQHKHYLDEIIEQISEFSKRVILADANLDKVLSAYNKHRDKPIREQAENIIHLFTLTNLGAPAAFKYFDTTIDRKRYTSTKEVLDATLIHQSITGLYETRIDLSQLGGDGGGGGPAPGGTLGDQGSRGSDPLPEPRVTLTVEGIPTEFLVNTGAEHSVLTKPMGKMGSKRTVVAGATGSKVYPWTTKRLLKIGQKQVTHSFLVIPECPAPLLGRDLLTKLKAQIQFSTEGPQVTWEDRPAMCLVLNLEEEYRLHEKPVPPSIDPSWLQLFPMVWAEKAGMGLANQVPPVVVELKSDASPVAVRQYPMSKEAREGIRPHIQRFLDLGILVPCQSPWNTPLLPVKKPGTNDYRPVQDLREVNKRVQDIHPTVPNPYNLLSSLPPSHTWYSVLDLKDAFFCLKLHPNSQPLFAFEWRDPEKGNTGQLTWTRLPQGFKNSPTLFNEALHRDLASFRALNPQVVMLQYVDDLLVAAPTYRDCKEGTRRLLQELSKLGYRVSAKKAQLCREEVTYLGYLLKGGKRWLTPARKATVMKIPTPTTPRQVREFLGTAGFCRLWIPGFASLAAPLYPLTRPKVPFTWTEAHQEAFGRIKEALLSAPALALPDLTKPFALYVDEKEGVARGVLTQTLGPWRRPVAYLSKKLDPVASGWPTCLKAIAAVALLLKDADKLTLGQNVLVIAPHNLESIVRQPPDRWMTNARMTHYQSLLLNERVSFAPPAILNPATLLPVESDDTPIHICSEILAEETGTRPDLRDQPLPGVPAWYTDGSSFIMDGRRQAGAAIVDNKRTVWASNLPEGTSAQKAELIALTQALRLAEGKSINIYTDSRYAFATAHVHGAIYKQRGWLTSAGKDIKNKEEILALLEAIHLPKRVAIIHCPGHQRGTDPVATGNRKADEAAKQAAQSTRILTETTKNAGKRTADGSEFEKRTADGSEFESPKKKAKVE

SEQ ID NO: 6706 - protein, 2091 aa, synthetic construct
MPAAKRVKLDGGDKKYSIGLDIGTNSVGWAVITDEYKVPSKKFKVLGNTDRHSIKKNLIGALLFDSGETAEATRLKRTARRRYTRRKNRICYLQEIFSNEMAKVDDSFFHRLEESFLVEEDKKHERHPIFGNIVDEVAYHEKYPTIYHLRKKLVDSTDKADLRLIYLALAHMIKFRGHFLIEGDLNPDNSDVDKLFIQLVQTYNQLFEENPINASGVDAKAILSARLSKSRRLENLIAQLPGEKKNGLFGNLIALSLGLTPNFKSNFDLAEDAKLQLSKDTYDDDLDNLLAQIGDQYADLFLAAKNLSDAILLSDILRVNTEITKAPLSASMIKRYDEHHQDLTLLKALVRQQLPEKYKEIFFDQSKNGYAGYIDGGASQEEFYKFIKPILEKMDGTEELLVKLNREDLLRKQRTFDNGSIPHQIHLGELHAILRRQEDFYPFLKDNREKIEKILTFRIPYYVGPLARGNSRFAWMTRKSEETITPWNFEEVVDKGASAQSFIERMTNFDKNLPNEKVLPKHSLLYEYFTVYNELTKVKYVTEGMRKPAFLSGEQKKAIVDLLFKTNRKVTVKQLKEDYFKKIECFDSVEISGVEDRFNASLGTYHDLLKIIKDKDFLDNEENEDILEDIVLTLTLFEDREMIEERLKTYAHLFDDKVMKQLKRRRYTGWGRLSRKLINGIRDKQSGKTILDFLKSDGFANRNFMQLIHDDSLTFKEDIQKAQVSGQGDSLHEHIANLAGSPAIKKGILQTVKVVDELVKVMGRHKPENIVIEMARENQTTQKGQKNSRERMKRIEEGIKELGSQILKEHPVENTQLQNEKLYLYYLQNGRDMYVDQELDINRLSDYDVDHIVPQSFLKDDSIDNKVLTRSDKARGKSDNVPSEEVVKKMKNYWRQLLNAKLITQRKFDNLTKAERGGLSELDKAGFIKRQLVETRQITKHVAQILDSRMNTKYDENDKLIREVKVITLKSKLVSDFRKDFQFYKVREINNYHHAHDAYLNAVVGTALIKKYPKLESEFVYGDYKVYDVRKMIAKSEQEIGKATAKYFFYSNIMNFFKTEITLANGEIRKRPLIETNGETGEIVWDKGRDFATVRKVLSMPQVNIVKKTEVQTGGFSKESILPKRNSDKLIARKKDWDPKKYGGFDSPTVAYSVLVVAKVEKGKSKKLKSVKELLGITIMERSSFEKNPIDFLEAKGYKEVKKDLIIKLPKYSLFELENGRKRMLASAGELQKGNELALPSKYVNFLYLASHYEKLKGSPEDNEQKQLFVEQHKHYLDEIIEQISEFSKRVILADANLDKVLSAYNKHRDKPIREQAENIIHLFTLTNLGAPAAFKYFDTTIDRKRYTSTKEVLDATLIHQSITGLYETRIDLSQLGGDGGGGGPAPGGTLNLEDEYRLYETSAEPEVSPGSTWLSDFPQAWAETGGMGLAVRQAPLIIPLKATSTPVSIKQYPMSQEAKLGIKPHIQRLLDQGILVPCQSPWNTPLLPVKKPGTNDYRPVQDLREVNKRVEDIHPTVPNPYNLLSGLPPSHRWYTVLDLKDAFFCLRLHPTSQPLFAFEWRDPGMGISGQLTWTRLPQGFKNSPTLFNEALHRDLADFRIQHPDLILLQYVDDILLAATSELDCQQGTRALLLTLGNLGYRASAKKAQLCQKQVKYLGYLLKEGQRWLTEARKETVMGQPTPKTPRQLREFLGKAGFCRLFIPGFAEMAAPLYPLTKPGTLFNWGPDQQKAYQEIKQALLTAPALGLPDLTKPFELFVDEKQGYAKGVLTQKLGPWRRPVAYLSKKLDPVAAGWPPCLRMVAAIAVLRKDAGKLTMGQPLVILAPHAVEALVKQPPDRWLSNARMTHYQAMLLDTDRVQFGPVVALNPATLLPLPEEGAPHDCLEILAETHGTRPDLTDQPIPDADHTWYTDGSSFLQEGQRKAGAAVTTETEVIWARALPAGTSAQRAELIALTQALKMAEGKRLNVYTDSRYAFATAHIHGEIYRRRGWLTSEGREIKNKSEILALLKALFLPKRLSIIHCLGHQKGDSAEARGNRLADQAAREAAIKTPPDTSTLLAGKRTADGSEFEKRTADGSEFESPKKKAKVE

SEQ ID NO: 6707 - protein, 2091 aa, synthetic construct
MPAAKRVKLDGGDKKYSIGLDIGTNSVGWAVITDEYKVPSKKFKVLGNTDRHSIKKNLIGALLFDSGETAEATRLKRTARRRYTRRKNRICYLQEIFSNEMAKVDDSFFHRLEESFLVEEDKKHERHPIFGNIVDEVAYHEKYPTIYHLRKKLVDSTDKADLRLIYLALAHMIKFRGHFLIEGDLNPDNSDVDKLFIQLVQTYNQLFEENPINASGVDAKAILSARLSKSRRLENLIAQLPGEKKNGLFGNLIALSLGLTPNFKSNFDLAEDAKLQLSKDTYDDDLDNLLAQIGDQYADLFLAAKNLSDAILLSDILRVNTEITKAPLSASMIKRYDEHHQDLTLLKALVRQQLPEKYKEIFFDQSKNGYAGYIDGGASQEEFYKFIKPILEKMDGTEELLVKLNREDLLRKQRTFDNGSIPHQIHLGELHAILRRQEDFYPFLKDNREKIEKILTFRIPYYVGPLARGNSRFAWMTRKSEETITPWNFEEVVDKGASAQSFIERMTNFDKNLPNEKVLPKHSLLYEYFTVYNELTKVKYVTEGMRKPAFLSGEQKKAIVDLLFKTNRKVTVKQLKEDYFKKIECFDSVEISGVEDRFNASLGTYHDLLKIIKDKDFLDNEENEDILEDIVLTLTLFEDREMIEERLKTYAHLFDDKVMKQLKRRRYTGWGRLSRKLINGIRDKQSGKTILDFLKSDGFANRNFMQLIHDDSLTFKEDIQKAQVSGQGDSLHEHIANLAGSPAIKKGILQTVKVVDELVKVMGRHKPENIVIEMARENQTTQKGQKNSRERMKRIEEGIKELGSQILKEHPVENTQLQNEKLYLYYLQNGRDMYVDQELDINRLSDYDVDHIVPQSFLKDDSIDNKVLTRSDKARGKSDNVPSEEVVKKMKNYWRQLLNAKLITQRKFDNLTKAERGGLSELDKAGFIKRQLVETRQITKHVAQILDSRMNTKYDENDKLIREVKVITLKSKLVSDFRKDFQFYKVREINNYHHAHDAYLNAVVGTALIKKYPKLESEFVYGDYKVYDVRKMIAKSEQEIGKATAKYFFYSNIMNFFKTEITLANGEIRKRPLIETNGETGEIVWDKGRDFATVRKVLSMPQVNIVKKTEVQTGGFSKESILPKRNSDKLIARKKDWDPKKYGGFDSPTVAYSVLVVAKVEKGKSKKLKSVKELLGITIMERSSFEKNPIDFLEAKGYKEVKKDLIIKLPKYSLFELENGRKRMLASAGELQKGNELALPSKYVNFLYLASHYEKLKGSPEDNEQKQLFVEQHKHYLDEIIEQISEFSKRVILADANLDKVLSAYNKHRDKPIREQAENIIHLFTLTNLGAPAAFKYFDTTIDRKRYTSTKEVLDATLIHQSITGLYETRIDLSQLGGDGGGGGPAPGGTLGIEDEYRLHETSTEPDVSLGSTWLSDFPQAWAETGGMGLAVRQAPLIIPLKATSTPVSIQQYPMSHEARLGIKPHIQRLLDQGILVPCQSPWNTPLLPVKKPGTNDYRPVQDLREVNKRVEDIHPTVPNPYNLLSGLPPSHQWYTVLDLKDAFFCLRLHPTSQPLFAFEWRDPGMGISGQLTWTRLPQGFKNSPTLFNEALHRDLADFRIQHPDLILLQYVDDILLAATSELDCQQGTRALLQTLGDLGYRASAKKAQICQKQVKYLGYLLREGQRWLTEARKETVMGQPVPKTPRQLREFLGTAGFCRLWIPGFAEMAAPLYPLTKPGTLFSWGPDQQKAYQEIKQALLTAPALGLPDLTKPFELFVDEKQGYAKGVLTQKLGPWRRPVAYLSKKLDPVAAGWPPCLRMVAAIAVLTKDAGKLTMGQPLVILAPHAVEALVKQPPDRWLSNARMTHYQAMLLDTDRVQFGPVVALNPATLLPLPEEGAPHDCLEILAETHGTRPDLTDQPIPDADHTWYTDGSSFLQEGQRKAGAAVTTETEVIWAGALPAGTSAQRAELIALTQALKMAEGKRLNVYTDSRYAFATAHIHGEIYRRRGWLTSEGREIKNKSEILALLKALFLPKRLSIIHCLGHQKGDSAEARGNRLADQAAREAAIKTPPDTSTLLAGKRTADGSEFEKRTADGSEFESPKKKAKVE

SEQ ID NO: 6708 - protein, 2091 aa, synthetic construct
MPAAKRVKLDGGDKKYSIGLDIGTNSVGWAVITDEYKVPSKKFKVLGNTDRHSIKKNLIGALLFDSGETAEATRLKRTARRRYTRRKNRICYLQEIFSNEMAKVDDSFFHRLEESFLVEEDKKHERHPIFGNIVDEVAYHEKYPTIYHLRKKLVDSTDKADLRLIYLALAHMIKFRGHFLIEGDLNPDNSDVDKLFIQLVQTYNQLFEENPINASGVDAKAILSARLSKSRRLENLIAQLPGEKKNGLFGNLIALSLGLTPNFKSNFDLAEDAKLQLSKDTYDDDLDNLLAQIGDQYADLFLAAKNLSDAILLSDILRVNTEITKAPLSASMIKRYDEHHQDLTLLKALVRQQLPEKYKEIFFDQSKNGYAGYIDGGASQEEFYKFIKPILEKMDGTEELLVKLNREDLLRKQRTFDNGSIPHQIHLGELHAILRRQEDFYPFLKDNREKIEKILTFRIPYYVGPLARGNSRFAWMTRKSEETITPWNFEEVVDKGASAQSFIERMTNFDKNLPNEKVLPKHSLLYEYFTVYNELTKVKYVTEGMRKPAFLSGEQKKAIVDLLFKTNRKVTVKQLKEDYFKKIECFDSVEISGVEDRFNASLGTYHDLLKIIKDKDFLDNEENEDILEDIVLTLTLFEDREMIEERLKTYAHLFDDKVMKQLKRRRYTGWGRLSRKLINGIRDKQSGKTILDFLKSDGFANRNFMQLIHDDSLTFKEDIQKAQVSGQGDSLHEHIANLAGSPAIKKGILQTVKVVDELVKVMGRHKPENIVIEMARENQTTQKGQKNSRERMKRIEEGIKELGSQILKEHPVENTQLQNEKLYLYYLQNGRDMYVDQELDINRLSDYDVDHIVPQSFLKDDSIDNKVLTRSDKARGKSDNVPSEEVVKKMKNYWRQLLNAKLITQRKFDNLTKAERGGLSELDKAGFIKRQLVETRQITKHVAQILDSRMNTKYDENDKLIREVKVITLKSKLVSDFRKDFQFYKVREINNYHHAHDAYLNAVVGTALIKKYPKLESEFVYGDYKVYDVRKMIAKSEQEIGKATAKYFFYSNIMNFFKTEITLANGEIRKRPLIETNGETGEIVWDKGRDFATVRKVLSMPQVNIVKKTEVQTGGFSKESILPKRNSDKLIARKKDWDPKKYGGFDSPTVAYSVLVVAKVEKGKSKKLKSVKELLGITIMERSSFEKNPIDFLEAKGYKEVKKDLIIKLPKYSLFELENGRKRMLASAGELQKGNELALPSKYVNFLYLASHYEKLKGSPEDNEQKQLFVEQHKHYLDEIIEQISEFSKRVILADANLDKVLSAYNKHRDKPIREQAENIIHLFTLTNLGAPAAFKYFDTTIDRKRYTSTKEVLDATLIHQSITGLYETRIDLSQLGGDGGGGGPAPGGTLNIEDEHRLHETSKEPDVSLGSTWLSDFPQAWAETGGMGLAVRQAPLIIPLKATSTPVSIKQYPMSQEARLGIKPHIQRLLDQGILVPCQSPWNTPLLPVKKPGTNDYRPVQDLREVNKRVEDIHPTVPNPYNLLSGLPPSHQWYTVLDLKDAFFCLRLHPTSQPLFAFEWRDPEMGISGQLTWTRLPQGFKNSPTLFNEALHRDLADFRIQHPDLILLQYVDDLLLAATSELDCQQGTRALLQTLGNLGYRASAKKAQICQKQVKYLGYLLKEGQRWLTEARKETVMGQPTPKTPRQLREFLGTAGFCRLWIPGFAEMAAPLYPLTKPGTLFNWGPDQQKAYQEIKQALLTAPALGLPDLTKPFELFVDEKQGYAKGVLTQKLGPWRRPVAYLSKKLDPVAAGWPPCLRMVAAIAVLTKDAGKLTMGQPLVILAPHAVEALVKQPPDRWLSNARMTHYQALLLDTDRVQFGPVVALNPATLLPLPEEGLQHNCLDILAEAHGTRPDLTDQPLPDADHTWYTDGSSLLQEGQRKAGAAVTTETEVIWAKALPAGTSAQRAELIALTQALKMAEGKKLNVYTDSRYAFATAHIHGEIYRRRGWLTSEGKEIKNKDEILALLKALFLPKRLSIIHCPGHQKGHSAEARGNRMADQAARKAAITETPDTSTLLAGKRTADGSEFEKRTADGSEFESPKKKAKVE

SEQ ID NO: 6709 - protein, 2091 aa, synthetic construct; identical to SEQ ID NO: 6708

SEQ ID NO: 6710 - protein, 2085 aa, synthetic construct
MPAAKRVKLDGGDKKYSIGLDIGTNSVGWAVITDEYKVPSKKFKVLGNTDRHSIKKNLIGALLFDSGETAEATRLKRTARRRYTRRKNRICYLQEIFSNEMAKVDDSFFHRLEESFLVEEDKKHERHPIFGNIVDEVAYHEKYPTIYHLRKKLVDSTDKADLRLIYLALAHMIKFRGHFLIEGDLNPDNSDVDKLFIQLVQTYNQLFEENPINASGVDAKAILSARLSKSRRLENLIAQLPGEKKNGLFGNLIALSLGLTPNFKSNFDLAEDAKLQLSKDTYDDDLDNLLAQIGDQYADLFLAAKNLSDAILLSDILRVNTEITKAPLSASMIKRYDEHHQDLTLLKALVRQQLPEKYKEIFFDQSKNGYAGYIDGGASQEEFYKFIKPILEKMDGTEELLVKLNREDLLRKQRTFDNGSIPHQIHLGELHAILRRQEDFYPFLKDNREKIEKILTFRIPYYVGPLARGNSRFAWMTRKSEETITPWNFEEVVDKGASAQSFIERMTNFDKNLPNEKVLPKHSLLYEYFTVYNELTKVKYVTEGMRKPAFLSGEQKKAIVDLLFKTNRKVTVKQLKEDYFKKIECFDSVEISGVEDRFNASLGTYHDLLKIIKDKDFLDNEENEDILEDIVLTLTLFEDREMIEERLKTYAHLFDDKVMKQLKRRRYTGWGRLSRKLINGIRDKQSGKTILDFLKSDGFANRNFMQLIHDDSLTFKEDIQKAQVSGQGDSLHEHIANLAGSPAIKKGILQTVKVVDELVKVMGRHKPENIVIEMARENQTTQKGQKNSRERMKRIEEGIKELGSQILKEHPVENTQLQNEKLYLYYLQNGRDMYVDQELDINRLSDYDVDHIVPQSFLKDDSIDNKVLTRSDKARGKSDNVPSEEVVKKMKNYWRQLLNAKLITQRKFDNLTKAERGGLSELDKAGFIKRQLVETRQITKHVAQILDSRMNTKYDENDKLIREVKVITLKSKLVSDFRKDFQFYKVREINNYHHAHDAYLNAVVGTALIKKYPKLESEFVYGDYKVYDVRKMIAKSEQEIGKATAKYFFYSNIMNFFKTEITLANGEIRKRPLIETNGETGEIVWDKGRDFATVRKVLSMPQVNIVKKTEVQTGGFSKESILPKRNSDKLIARKKDWDPKKYGGFDSPTVAYSVLVVAKVEKGKSKKLKSVKELLGITIMERSSFEKNPIDFLEAKGYKEVKKDLIIKLPKYSLFELENGRKRMLASAGELQKGNELALPSKYVNFLYLASHYEKLKGSPEDNEQKQLFVEQHKHYLDEIIEQISEFSKRVILADANLDKVLSAYNKHRDKPIREQAENIIHLFTLTNLGAPAAFKYFDTTIDRKRYTSTKEVLDATLIHQSITGLYETRIDLSQLGGDGGGGGPAPGGTLQLDDEYRLYSPLVKPDQNIQFWLEQFPQAWAETAGMGLAKQVPPQVIQLKASATPVSVRQYPLSKEAQEGIRPHVQRLIQQGILVPVQSPWNTPLLPVRKPGTNDYRPVQDLREVNKRVQDIHPTVPNPYNLLCALPPQRSWYTVLDLKDAFFCLRLHPTSQPLFAFEWRDPGTGRTGQLTWTRLPQGFKNSPTIFDEALHRDLANFRIQHPQVTLLQYVDDLLLAGATKQDCLEGTKALLLELSDLGYRASAKKAQICRREVTYLGYSLRDGQRWLTEARKKTVVQIPAPTTAKQVREFLGTAGFCRLWIPGFATLAAPLYPLTKEKGEFSWAPEHQKAFDAIKKALLSAPALALPDVTKPFTLYVDERKGVARGVLTQTLGPWRRPVAYLSKKLDPVASGWPVCLKAIAAVAILVKDADKLTLGQNITVIAPHALENIVRQPPDRWMTNARMTHYQSLLLTERVTFAPPAALNPATLLPEETDEPVTHDCHQLLIEETGVRKDLTDIPLTGEVLTWFTDGSSYVVEGKRMAGAAVVDGTRTIWASSLPEGTSAQKAELMALTQALRLAEGKSINIYTDSRYAFATAHVHGAIYKQRGLLTSAGREIKNKEEILSLLEALHLPKRLAIIHCPGHQKAKDPISRGNQMADRVAKQAAQGVNLLAGKRTADGSEFEKRTADGSEFESPKKKAKVE

SEQ ID NO: 6711 - protein, 2085 aa, synthetic construct; identical to SEQ ID NO: 6710

SEQ ID NO: 6712 - protein, 2171 aa, synthetic construct
MPAAKRVKLDGGDKKYSIGLDIGTNSVGWAVITDEYKVPSKKFKVLGNTDRHSIKKNLIGALLFDSGETAEATRLKRTARRRYTRRKNRICYLQEIFSNEMAKVDDSFFHRLEESFLVEEDKKHERHPIFGNIVDEVAYHEKYPTIYHLRKKLVDSTDKADLRLIYLALAHMIKFRGHFLIEGDLNPDNSDVDKLFIQLVQTYNQLFEENPINASGVDAKAILSARLSKSRRLENLIAQLPGEKKNGLFGNLIALSLGLTPNFKSNFDLAEDAKLQLSKDTYDDDLDNLLAQIGDQYADLFLAAKNLSDAILLSDILRVNTEITKAPLSASMIKRYDEHHQDLTLLKALVRQQLPEKYKEIFFDQSKNGYAGYIDGGASQEEFYKFIKPILEKMDGTEELLVKLNREDLLRKQRTFDNGSIPHQIHLGELHAILRRQEDFYPFLKDNREKIEKILTFRIPYYVGPLARGNSRFAWMTRKSEETITPWNFEEVVDKGASAQSFIERMTNFDKNLPNEKVLPKHSLLYEYFTVYNELTKVKYVTEGMRKPAFLSGEQKKAIVDLLFKTNRKVTVKQLKEDYFKKIECFDSVEISGVEDRFNASLGTYHDLLKIIKDKDFLDNEENEDILEDIVLTLTLFEDREMIEERLKTYAHLFDDKVMKQLKRRRYTGWGRLSRKLINGIRDKQSGKTILDFLKSDGFANRNFMQLIHDDSLTFKEDIQKAQVSGQGDSLHEHIANLAGSPAIKKGILQTVKVVDELVKVMGRHKPENIVIEMARENQTTQKGQKNSRERMKRIEEGIKELGSQILKEHPVENTQLQNEKLYLYYLQNGRDMYVDQELDINRLSDYDVDHIVPQSFLKDDSIDNKVLTRSDKARGKSDNVPSEEVVKKMKNYWRQLLNAKLITQRKFDNLTKAERGGLSELDKAGFIKRQLVETRQITKHVAQILDSRMNTKYDENDKLIREVKVITLKSKLVSDFRKDFQFYKVREINNYHHAHDAYLNAVVGTALIKKYPKLESEFVYGDYKVYDVRKMIAKSEQEIGKATAKYFFYSNIMNFFKTEITLANGEIRKRPLIETNGETGEIVWDKGRDFATVRKVLSMPQVNIVKKTEVQTGGFSKESILPKRNSDKLIARKKDWDPKKYGGFDSPTVAYSVLVVAKVEKGKSKKLKSVKELLGITIMERSSFEKNPIDFLEAKGYKEVKKDLIIKLPKYSLFELENGRKRMLASAGELQKGNELALPSKYVNFLYLASHYEKLKGSPEDNEQKQLFVEQHKHYLDEIIEQISEFSKRVILADANLDKVLSAYNKHRDKPIREQAENIIHLFTLTNLGAPAAFKYFDTTIDRKRYTSTKEVLDATLIHQSITGLYETRIDLSQLGGDGGGGGPAPGGMDPLQLLQPLEAEIKGTKLKAHWNSGATITCVPEAFLEDERPIQTMLIKTIHGEKQQDVYYLTFKVQGRKVEAEVLASPYDYILLNPSDVPWLMKKPLQLTVLVPLHEYQERLLQQTALPKEQKELLQKLFLKYDALWQHWENQVGHRRIKPHNIATGTLAPRPQKQYPINPKAKPSIQIVIDDLLKQGVLIQQNSTMNTPVYPVPKPDGKWRMVLDYREVNKTIPLIAAQNQHSAGILSSIYRGKYKTTLDLTNGFWAHPITPESYWLTAFTWQGKQYCWTRLPQGFLNSPALFNADVVDLLKEIPNVQAYVDDIYISHDDPQEHLEQLEKIFSILLNAGYVVSLKKSEIAQREVEFLGFNITKEGRGLTDTFKQKLLNITPPKDLKQLQSILGKLNFARNFIPNYSELVKPLYTIVAPANGKFISWTEDNSNQLQHIISVLNQADNLEERNPETRLIIKVNSSPSAGYIRYYNEGSKRPIMYVNYIFSKAEAKFTQTEKLLTTMHKGLIKAMDLAMGQEILVYSPIVSMTKIQRTPLPERKALPVRWITWMTYLEDPRIQFHYDKSLPELQQIPNVTEDVIAKTKHPSEFAMVFYTDGSAIKHPDVNKSHSAGMGIAQVQFIPEYKIVHQWSIPLGDHTAQLAEIAAVEFACKKALKISGPVLIVTDSFYVAESANKELPYWKSNGFLNNKKKPLRHVSKWKSIAECLQLKPDIIIMHEKGHQQPMTTLHTEGNNLADKLATQGSYVVHAGKRTADGSEFEKRTADGSEFESPKKKAKVE

SEQ ID NO: 6713 - protein, 2082 aa, synthetic construct
MPAAKRVKLDGGDKKYSIGLDIGTNSVGWAVITDEYKVPSKKFKVLGNTDRHSIKKNLIGALLFDSGETAEATRLKRTARRRYTRRKNRICYLQEIFSNEMAKVDDSFFHRLEESFLVEEDKKHERHPIFGNIVDEVAYHEKYPTIYHLRKKLVDSTDKADLRLIYLALAHMIKFRGHFLIEGDLNPDNSDVDKLFIQLVQTYNQLFEENPINASGVDAKAILSARLSKSRRLENLIAQLPGEKKNGLFGNLIALSLGLTPNFKSNFDLAEDAKLQLSKDTYDDDLDNLLAQIGDQYADLFLAAKNLSDAILLSDILRVNTEITKAPLSASMIKRYDEHHQDLTLLKALVRQQLPEKYKEIFFDQSKNGYAGYIDGGASQEEFYKFIKPILEKMDGTEELLVKLNREDLLRKQRTFDNGSIPHQIHLGELHAILRRQEDFYPFLKDNREKIEKILTFRIPYYVGPLARGNSRFAWMTRKSEETITPWNFEEVVDKGASAQSFIERMTNFDKNLPNEKVLPKHSLLYEYFTVYNELTKVKYVTEGMRKPAFLSGEQKKAIVDLLFKTNRKVTVKQLKEDYFKKIECFDSVEISGVEDRFNASLGTYHDLLKIIKDKDFLDNEENEDILEDIVLTLTLFEDREMIEERLKTYAHLFDDKVMKQLKRRRYTGWGRLSRKLINGIRDKQSGKTILDFLKSDGFANRNFMQLIHDDSLTFKEDIQKAQVSGQGDSLHEHIANLAGSPAIKKGILQTVKVVDELVKVMGRHKPENIVIEMARENQTTQKGQKNSRERMKRIEEGIKELGSQILKEHPVENTQLQNEKLYLYYLQNGRDMYVDQELDINRLSDYDVDHIVPQSFLKDDSIDNKVLTRSDKARGKSDNVPSEEVVKKMKNYWRQLLNAKLITQRKFDNLTKAERGGLSELDKAGFIKRQLVETRQITKHVAQILDSRMNTKYDENDKLIREVKVITLKSKLVSDFRKDFQFYKVREINNYHHAHDAYLNAVVGTALIKKYPKLESEFVYGDYKVYDVRKMIAKSEQEIGKATAKYFFYSNIMNFFKTEITLANGEIRKRPLIETNGETGEIVWDKGRDFATVRKVLSMPQVNIVKKTEVQTGGFSKESILPKRNSDKLIARKKDWDPKKYGGFDSPTVAYSVLVVAKVEKGKSKKLKSVKELLGITIMERSSFEKNPIDFLEAKGYKEVKKDLIIKLPKYSLFELENGRKRMLASAGELQKGNELALPSKYVNFLYLASHYEKLKGSPEDNEQKQLFVEQHKHYLDEIIEQISEFSKRVILADANLDKVLSAYNKHRDKPIREQAENIIHLFTLTNLGAPAAFKYFDTTIDRKRYTSTKEVLDATLIHQSITGLYETRIDLSQLGGDGGGGGPAPGGIPWLMKKPLQLTTLVPLQEYEERLLKQTMLTGSYKEKLQSLFLKYDALWQHWENQVGHRRIKPHHIATGTVNPRPQKQYPINPKAKASIQTVINDLLKQGVLIQQNSIMNTPVYPVPKPDGKWRMVLDYREVNKTIPLIAAQNQHSAGILSSIFRGKYKTTLDLSNGFWAHSITPESYWLTAFTWLGQQYCWTRLPQGFLNSPALFNADVVDLLKEVPNVQVYVDDIYISHDDPREHLEQLEKVFSLLLNAGYVVSLKKSEIAQHEVEFLGFNITKEGRGLTETFKQKLLNITPPRDLKQLQSILGLLNFARNFIPNFSELVKPLYNIIATAPGKYITWTTDNSQQLQNIISMLNSAENLEERNPEVRLIMKVNTSPSAGYIRFYNEFAKRPIMYLNYVYTKAEVKFTNTEKLLTTIHKGLIKALDLGMGQEILVYSPIVSMTKIQKTPLPERKALPIRWITWMSYLEDPRIQFHYDKTLPELQQVPTVTDDIIAKIKHPSEFSMVFYTDGSAIKHPNVNKSHNAGMGIAQVQFKPEFTVINTWSIPLGDHTAQLAEVAAVEFACKKALKIDGPVLIVTDSFYVAESVNKELPYWQSNGFFNNKKKPLKHVSKWKSIADCIQLKPDIIIIHEKGHQPTASTFHTEGNNLADKLATQGSYVVNAGKRTADGSEFEKRTADGSEFESPKKKAKVE

SEQ ID NO: 6714 - protein, 2171 aa, synthetic construct
MPAAKRVKLDGGDKKYSIGLDIGTNSVGWAVITDEYKVPSKKFKVLGNTDRHSIKKNLIGALLFDSGETAEATRLKRTARRRYTRRKNRICYLQEIFSNEMAKVDDSFFHRLEESFLVEEDKKHERHPIFGNIVDEVAYHEKYPTIYHLRKKLVDSTDKADLRLIYLALAHMIKFRGHFLIEGDLNPDNSDVDKLFIQLVQTYNQLFEENPINASGVDAKAILSARLSKSRRLENLIAQLPGEKKNGLFGNLIALSLGLTPNFKSNFDLAEDAKLQLSKDTYDDDLDNLLAQIGDQYADLFLAAKNLSDAILLSDILRVNTEITKAPLSASMIKRYDEHHQDLTLLKALVRQQLPEKYKEIFFDQSKNGYAGYIDGGASQEEFYKFIKPILEKMDGTEELLVKLNREDLLRKQRTFDNGSIPHQIHLGELHAILRRQEDFYPFLKDNREKIEKILTFRIPYYVGPLARGNSRFAWMTRKSEETITPWNFEEVVDKGASAQSFIERMTNFDKNLPNEKVLPKHSLLYEYFTVYNELTKVKYVTEGMRKPAFLSGEQKKAIVDLLFKTNRKVTVKQLKEDYFKKIECFDSVEISGVEDRFNASLGTYHDLLKIIKDKDFLDNEENEDILEDIVLTLTLFEDREMIEERLKTYAHLFDDKVMKQLKRRRYTGWGRLSRKLINGIRDKQSGKTILDFLKSDGFANRNFMQLIHDDSLTFKEDIQKAQVSGQGDSLHEHIANLAGSPAIKKGILQTVKVVDELVKVMGRHKPENIVIEMARENQTTQKGQKNSRERMKRIEEGIKELGSQILKEHPVENTQLQNEKLYLYYLQNGRDMYVDQELDINRLSDYDVDHIVPQSFLKDDSIDNKVLTRSDKARGKSDNVPSEEVVKKMKNYWRQLLNAKLITQRKFDNLTKAERGGLSELDKAGFIKRQLVETRQITKHVAQILDSRMNTKYDENDKLIREVKVITLKSKLVSDFRKDFQFYKVREINNYHHAHDAYLNAVVGTALIKKYPKLESEFVYGDYKVYDVRKMIAKSEQEIGKATAKYFFYSNIMNFFKTEITLANGEIRKRPLIETNGETGEIVWDKGRDFATVRKVLSMPQVNIVKKTEVQTGGFSKESILPKRNSDKLIARKKDWDPKKYGGFDSPTVAYSVLVVAKVEKGKSKKLKSVKELLGITIMERSSFEKNPIDFLEAKGYKEVKKDLIIKLPKYSLFELENGRKRMLASAGELQKGNELALPSKYVNFLYLASHYEKLKGSPEDNEQKQLFVEQHKHYLDEIIEQISEFSKRVILADANLDKVLSAYNKHRDKPIREQAENIIHLFTLTNLGAPAAFKYFDTTIDRKRYTSTKEVLDATLIHQSITGLYETRIDLSQLGGDGGGGGPAPGGMNPLQLLQPLPAEVKGTKLLAHWNSGATITCIPESFLEDEQPIKQTLIKTIHGEKQQNVYYLTFKVKGRKVEAEVIASPYEYILLSPTDVPWLTQQPLQLTILVPLQEYQDRILNKTALPEEQKQQLKALFTKYDNLWQHWENQVGHRKIRPHNIATGDYPPRPQKQYPINPKAKPSIQIVIDDLLKQGVLTPQNSTMNTPVYPVPKPDGRWRMVLDYREVNKTIPLTAAQNQHSAGILATIVRQKYKTTLDLANGFWAHPITPDSYWLTAFTWQGKQYCWTRLPQGFLNSPALFTADAVDLLKEVPNVQVYVDDIYLSHDNPHEHIQQLEKVFQILLQAGYVVSLKKSEIGQRTVEFLGFNITKEGRGLTDTFKTKLLNVTPPKDLKQLQSILGLLNFARNFIPNFAELVQTLYNLIASSKGKYIEWTEDNTKQLNKVIEALNTASNLEERLPDQRLVIKVNTSPSAGYVRYYNESGKKPIMYLNYVFSKAELKFSMLEKLLTTMHKALIKAMDLAMGQEILVYSPIVSMTKIQKTPLPERKALPIRWITWMTYLEDPRIQFHYDKTLPELKHIPDVYTSSIPPLKHPSQYEGVFCTDGSAIKSPDPTKSNNAGMGIVHAIYNPEYKILNQWSIPLGHHTAQMAEIAAVEFACKKALKVPGPVLVITDSFYVAESANKELPYWKSNGFVNNKKEPLKHISKWKSIAECLSIKPDITIQHEKGHQPINTSIHTEGNALADKLATQGSYVVNAGKRTADGSEFEKRTADGSEFESPKKKAKVE

SEQ ID NO: 6715 - protein, 2089 aa, synthetic construct
MPAAKRVKLDGGDKKYSIGLDIGTNSVGWAVITDEYKVPSKKFKVLGNTDRHSIKKNLIGALLFDSGETAEATRLKRTARRRYTRRKNRICYLQEIFSNEMAKVDDSFFHRLEESFLVEEDKKHERHPIFGNIVDEVAYHEKYPTIYHLRKKLVDSTDKADLRLIYLALAHMIKFRGHFLIEGDLNPDNSDVDKLFIQLVQTYNQLFEENPINASGVDAKAILSARLSKSRRLENLIAQLPGEKKNGLFGNLIALSLGLTPNFKSNFDLAEDAKLQLSKDTYDDDLDNLLAQIGDQYADLFLAAKNLSDAILLSDILRVNTEITKAPLSASMIKRYDEHHQDLTLLKALVRQQLPEKYKEIFFDQSKNGYAGYIDGGASQEEFYKFIKPILEKMDGTEELLVKLNREDLLRKQRTFDNGSIPHQIHLGELHAILRRQEDFYPFLKDNREKIEKILTFRIPYYVGPLARGNSRFAWMTRKSEETITPWNFEEVVDKGASAQSFIERMTNFDKNLPNEKVLPKHSLLYEYFTVYNELTKVKYVTEGMRKPAFLSGEQKKAIVDLLFKTNRKVTVKQLKEDYFKKIECFDSVEISGVEDRFNASLGTYHDLLKIIKDKDFLDNEENEDILEDIVLTLTLFEDREMIEERLKTYAHLFDDKVMKQLKRRRYTGWGRLSRKLINGIRDKQSGKTILDFLKSDGFANRNFMQLIHDDSLTFKEDIQKAQVSGQGDSLHEHIANLAGSPAIKKGILQTVKVVDELVKVMGRHKPENIVIEMARENQTTQKGQKNSRERMKRIEEGIKELGSQILKEHPVENTQLQNEKLYLYYLQNGRDMYVDQELDINRLSDYDVDHIVPQSFLKDDSIDNKVLTRSDKARGKSDNVPSEEVVKKMKNYWRQLLNAKLITQRKFDNLTKAERGGLSELDKAGFIKRQLVETRQITKHVAQILDSRMNTKYDENDKLIREVKVITLKSKLVSDFRKDFQFYKVREINNYHHAHDAYLNAVVGTALIKKYPKLESEFVYGDYKVYDVRKMIAKSEQEIGKATAKYFFYSNIMNFFKTEITLANGEIRKRPLIETNGETGEIVWDKGRDFATVRKVLSMPQVNIVKKTEVQTGGFSKESILPKRNSDKLIARKKDWDPKKYGGFDSPTVAYSVLVVAKVEKGKSKKLKSVKELLGITIMERSSFEKNPIDFLEAKGYKEVKKDLIIKLPKYSLFELENGRKRMLASAGELQKGNELALPSKYVNFLYLASHYEKLKGSPEDNEQKQLFVEQHKHYLDEIIEQISEFSKRVILADANLDKVLSAYNKHRDKPIREQAENIIHLFTLTNLGAPAAFKYFDTTIDRKRYTSTKEVLDATLIHQSITGLYETRIDLSQLGGDGGGGGPAPGGVLNLEEEYRLHEKPVPSSIDPSWLQLFPTVWAERAGMGLANQVPPVVVELRSGASPVAVRQYPMSKEAREGIRPHIQRFLDLGVLVPCQSPWNTPLLPVKKPGTNDYRPVQDLREINKRVQDIHPTVPNPYNLLSSLPPSHTWYSVLDLKDAFFCLKLHPNSQPLFAFEWRDPEKGNTGQLTWTRLPQGFKNSPTLFNEALHRDLAPFRALNPQVVLLQYVDDLLVAAPTYRDCKEGTQKLLQELSKLGYRVSAKKAQLCQKEVTYLGYLLKEGKRWLTPARKATVMKIPPPTTPRQVREFLGTAGFCRLWIPGFASLAAPLYPLTKPSIPFIWTEEHQKAFDRIKEALLSAPALALPDLTKPFTLYVDERAGVARGVLTQTLGPWRRPVAYLSKKLDPVASGWPTCLKAVAAVALLLKDADKLTLGQNVTVIASHSLESIVRQPPDRWMTNARMTHYQSLLLNERVSFAPPAVLNPATLLPVESEATPVHRCSEILAEETGTRRDLKDQPLPGVPAWYTDGSSFIAEGKRRAGAAIVDGKRTVWASSLPEGTSAQKAELVALTQALRLAEGKDINIYTDSRYAFATAHIHGAIYKQRGWLTSAGKDIKNKEEILALLEAIHLPKRVAIIHCPGHQKGNDPVATGNRRADEAAKQAALSTRVLAETTKPAGKRTADGSEFEKRTADGSEFESPKKKAKVE

SEQ ID NO: 6716 - protein, 2091 aa, synthetic construct
MPAAKRVKLDGGDKKYSIGLDIGTNSVGWAVITDEYKVPSKKFKVLGNTDRHSIKKNLIGALLFDSGETAEATRLKRTARRRYTRRKNRICYLQEIFSNEMAKVDDSFFHRLEESFLVEEDKKHERHPIFGNIVDEVAYHEKYPTIYHLRKKLVDSTDKADLRLIYLALAHMIKFRGHFLIEGDLNPDNSDVDKLFIQLVQTYNQLFEENPINASGVDAKAILSARLSKSRRLENLIAQLPGEKKNGLFGNLIALSLGLTPNFKSNFDLAEDAKLQLSKDTYDDDLDNLLAQIGDQYADLFLAAKNLSDAILLSDILRVNTEITKAPLSASMIKRYDEHHQDLTLLKALVRQQLPEKYKEIFFDQSKNGYAGYIDGGASQEEFYKFIKPILEKMDGTEELLVKLNREDLLRKQRTFDNGSIPHQIHLGELHAILRRQEDFYPFLKDNREKIEKILTFRIPYYVGPLARGNSRFAWMTRKSEETITPWNFEEVVDKGASAQSFIERMTNFDKNLPNEKVLPKHSLLYEYFTVYNELTKVKYVTEGMRKPAFLSGEQKKAIVDLLFKTNRKVTVKQLKEDYFKKIECFDSVEISGVEDRFNASLGTYHDLLKIIKDKDFLDNEENEDILEDIVLTLTLFEDREMIEERLKTYAHLFDDKVMKQLKRRRYTGWGRLSRKLINGIRDKQSGKTILDFLKSDGFANRNFMQLIHDDSLTFKEDIQKAQVSGQGDSLHEHIANLAGSPAIKKGILQTVKVVDELVKVMGRHKPENIVIEMARENQTTQKGQKNSRERMKRIEEGIKELGSQILKEHPVENTQLQNEKLYLYYLQNGRDMYVDQELDINRLSDYDVDHIVPQSFLKDDSIDNKVLTRSDKARGKSDNVPSEEVVKKMKNYWRQLLNAKLITQRKFDNLTKAERGGLSELDKAGFIKRQLVETRQITKHVAQILDSRMNTKYDENDKLIREVKVITLKSKLVSDFRKDFQFYKVREINNYHHAHDAYLNAVVGTALIKKYPKLESEFVYGDYKVYDVRKMIAKSEQEIGKATAKYFFYSNIMNFFKTEITLANGEIRKRPLIETNGETGEIVWDKGRDFATVRKVLSMPQVNIVKKTEVQTGGFSKESILPKRNSDKLIARKKDWDPKKYGGFDSPTVAYSVLVVAKVEKGKSKKLKSVKELLGITIMERSSFEKNPIDFLEAKGYKEVKKDLIIKLPKYSLFELENGRKRMLASAGELQKGNELALPSKYVNFLYLASHYEKLKGSPEDNEQKQLFVEQHKHYLDEIIEQISEFSKRVILADANLDKVLSAYNKHRDKPIREQAENIIHLFTLTNLGAPAAFKYFDTTIDRKRYTSTKEVLDATLIHQSITGLYETRIDLSQLGGDGGGGGPAPGGTLNIEDEYRLHETSKEPDVPLGSTWLSDFPQAWAETGGMGLAVRQAPLIIPLKATSTPVSIKQYPMSQEARLGIKPHIQRLLDQGILVPCQSPWNTPLLPVKKPGTNDYRPVQDLREVNKRVEDIHPTVPNPYNLLSGLPPSHQWYTVLDLKDAFFCLRLHPTSQPLFAFEWRDPEMGISGQLTWTRLPQGFKNSPTLFNEALHRDLADFRIQHPDLILLQYVDDLLLAATSEQDCQRGTRALLQTLGNLGYRASAKKAQICQKQVKYLGYLLKEGQRWLTEARKETVMGQPTPKTPRQLREFLGTAGFCRLWIPGFAEMAAPLYPLTKPGTLFNWGPDQQKAYQEIKQALLTAPALGLPDLTKPFELFVDEKQGYAKGVLTQKLGPWRRPVAYLSKKLDPVAAGWPPCLRMVAAIAVLTKDAGKLTMGQPLVILAPHAVEALVKQPPDRWLSNARMTHYQAMLLDTDRVQFGPVVALNPATLLPLPEKEAPHDCLEILAETHGTRPDLTDQPIPDADYTWYTDGSSFLQEGQRRAGAAVTTETEVIWARALPAGTSAQRAELIALTQALKMAEGKKLNVYTDSRYAFATAHVHGEIYRRRGWLTSEGREIKNKNEILALLKALFLPKRLSIIHCPGHQKGNSAEARGNRMADQAAREAAMKAVLETSTLLAGKRTADGSEFEKRTADGSEFESPKKKAKVE

SEQ ID NO: 6717 - protein, 2091 aa, synthetic construct
MPAAKRVKLDGGDKKYSIGLDIGTNSVGWAVITDEYKVPSKKFKVLGNTDRHSIKKNLIGALLFDSGETAEATRLKRTARRRYTRRKNRICYLQEIFSNEMAKVDDSFFHRLEESFLVEEDKKHERHPIFGNIVDEVAYHEKYPTIYHLRKKLVDSTDKADLRLIYLALAHMIKFRGHFLIEGDLNPDNSDVDKLFIQLVQTYNQLFEENPINASGVDAKAILSARLSKSRRLENLIAQLPGEKKNGLFGNLIALSLGLTPNFKSNFDLAEDAKLQLSKDTYDDDLDNLLAQIGDQYADLFLAAKNLSDAILLSDILRVNTEITKAPLSASMIKRYDEHHQDLTLLKALVRQQLPEKYKEIFFDQSKNGYAGYIDGGASQEEFYKFIKPILEKMDGTEELLVKLNREDLLRKQRTFDNGSIPHQIHLGELHAILRRQEDFYPFLKDNREKIEKILTFRIPYYVGPLARGNSRFAWMTRKSEETITPWNFEEVVDKGASAQSFIERMTNFDKNLPNEKVLPKHSLLYEYFTVYNELTKVKYVTEGMRKPAFLSGEQKKAIVDLLFKTNRKVTVKQLKEDYFKKIECFDSVEISGVEDRFNASLGTYHDLLKIIKDKDFLDNEENEDILEDIVLTLTLFEDREMIEERLKTYAHLFDDKVMKQLKRRRYTGWGRLSRKLINGIRDKQSGKTILDFLKSDGFANRNFMQLIHDDSLTFKEDIQKAQVSGQGDSLHEHIANLAGSPAIKKGILQTVKVVDELVKVMGRHKPENIVIEMARENQTTQKGQKNSRERMKRIEEGIKELGSQILKEHPVENTQLQNEKLYLYYLQNGRDMYVDQELDINRLSDYDVDHIVPQSFLKDDSIDNKVLTRSDKARGKSDNVPSEEVVKKMKNYWRQLLNAKLITQRKFDNLTKAERGGLSELDKAGFIKRQLVETRQITKHVAQILDSRMNTKYDENDKLIREVKVITLKSKLVSDFRKDFQFYKVREINNYHHAHDAYLNAVVGTALIKKYPKLESEFVYGDYKVYDVRKMIAKSEQEIGKATAKYFFYSNIMNFFKTEITLANGEIRKRPLIETNGETGEIVWDKGRDFATVRKVLSMPQVNIVKKTEVQTGGFSKESILPKRNSDKLIARKKDWDPKKYGGFDSPTVAYSVLVVAKVEKGKSKKLKSVKELLGITIMERSSFEKNPIDFLEAKGYKEVKKDLIIKLPKYSLFELENGRKRMLASAGELQKGNELALPSKYVNFLYLASHYEKLKGSPEDNEQKQLFVEQHKHYLDEIIEQISEFSKRVILADANLDKVLSAYNKHRDKPIREQAENIIHLFTLTNLGAPAAFKYFDTTIDRKRYTSTKEVLDATLIHQSITGLYETRIDLSQLGGDGGGGGPAPGGTLNIEDEYRLHETSKEPDVPLGSTWLSDFPQAWAETGGMGLAVRQAPLIIPLKATSTPVSIKQYPMSQEARLGIKPHIQRLLDQGILVPCQSPWNTPLLPVKKPGTNDYRPVQDLREVNKRVEDIHPTVPNPYNLLSGLPPSHQWYTVLDLKDAFFCLRLHPTSQPLFAFEWRDPEMGISGQLTWTRLPQGFKNSPTLFNEALHRDLADFRIQHPDLILLQYVDDLLLAATSEQDCQRGTRALLQTLGNLGYRASAKKAQICQKQVKYLGYLLKEGQRWLTEARKETVMGQPTPKTPRQLREFLGKAGFCRLFIPGFAEMAAPLYPLTKPGTLFNWGPDQQKAYQEIKQALLTAPALGLPDLTKPFELFVDEKQGYAKGVLTQKLGPWRRPVAYLSKKLDPVAAGWPPCLRMVAAIAVLTKDAGKLTMGQPLVILAPHAVEALVKQPPDRWLSNARMTHYQAMLLDTDRVQFGPVVALNPATLLPLPEKEAPHDCLEILAETHGTRPDLTDQPIPDADYTWYTDGSSFLQEGQRRAGAAVTTETEVIWARALPAGTSAQRAELIALTQALKMAEGKKLNVYTDSRYAFATAHVHGEIYRRRGWLTSEGREIKNKNEILALLKALFLPKRLSIIHCPGHQKGNSAEARGNRMADQAAREAAMKAVLETSTLLAGKRTADGSEFEKRTADGSEFESPKKKAKVE

SEQ ID NO: 6718 - protein, 2122 aa, synthetic construct
MPAAKRVKLDGGDKKYSIGLDIGTNSVGWAVITDEYKVPSKKFKVLGNTDRHSIKKNLIGALLFDSGETAEATRLKRTARRRYTRRKNRICYLQEIFSNEMAKVDDSFFHRLEESFLVEEDKKHERHPIFGNIVDEVAYHEKYPTIYHLRKKLVDSTDKADLRLIYLALAHMIKFRGHFLIEGDLNPDNSDVDKLFIQLVQTYNQLFEENPINASGVDAKAILSARLSKSRRLENLIAQLPGEKKNGLFGNLIALSLGLTPNFKSNFDLAEDAKLQLSKDTYDDDLDNLLAQIGDQYADLFLAAKNLSDAILLSDILRVNTEITKAPLSASMIKRYDEHHQDLTLLKALVRQQLPEKYKEIFFDQSKNGYAGYIDGGASQEEFYKFIKPILEKMDGTEELLVKLNREDLLRKQRTFDNGSIPHQIHLGELHAILRRQEDFYPFLKDNREKIEKILTFRIPYYVGPLARGNSRFAWMTRKSEETITPWNFEEVVDKGASAQSFIERMTNFDKNLPNEKVLPKHSLLYEYFTVYNELTKVKYVTEGMRKPAFLSGEQKKAIVDLLFKTNRKVTVKQLKEDYFKKIECFDSVEISGVEDRFNASLGTYHDLLKIIKDKDFLDNEENEDILEDIVLTLTLFEDREMIEERLKTYAHLFDDKVMKQLKRRRYTGWGRLSRKLINGIRDKQSGKTILDFLKSDGFANRNFMQLIHDDSLTFKEDIQKAQVSGQGDSLHEHIANLAGSPAIKKGILQTVKVVDELVKVMGRHKPENIVIEMARENQTTQKGQKNSRERMKRIEEGIKELGSQILKEHPVENTQLQNEKLYLYYLQNGRDMYVDQELDINRLSDYDVDHIVPQSFLKDDSIDNKVLTRSDKARGKSDNVPSEEVVKKMKNYWRQLLNAKLITQRKFDNLTKAERGGLSELDKAGFIKRQLVETRQITKHVAQILDSRMNTKYDENDKLIREVKVITLKSKLVSDFRKDFQFYKVREINNYHHAHDAYLNAVVGTALIKKYPKLESEFVYGDYKVYDVRKMIAKSEQEIGKATAKYFFYSNIMNFFKTEITLANGEIRKRPLIETNGETGEIVWDKGRDFATVRKVLSMPQVNIVKKTEVQTGGFSKESILPKRNSDKLIARKKDWDPKKYGGFDSPTVAYSVLVVAKVEKGKSKKLKSVKELLGITIMERSSFEKNPIDFLEAKGYKEVKKDLIIKLPKYSLFELENGRKRMLASAGELQKGNELALPSKYVNFLYLASHYEKLKGSPEDNEQKQLFVEQHKHYLDEIIEQISEFSKRVILADANLDKVLSAYNKHRDKPIREQAENIIHLFTLTNLGAPAAFKYFDTTIDRKRYTSTKEVLDATLIHQSITGLYETRIDLSQLGGDGGPAPGGGGGLLGRDLLTKLKAQIQFSTEGPQVTWEDRPAMCLVLNLEEEYRLHEKPVPPSIDPSWLQLFPMVWAEKAGMGLANQVPPVVVELKSDASPVAVRQYPMSKEAREGIRPHIQRFLDLGILVPCQSPWNTPLLPVKKPGTNDYRPVQDLREVNKRVQDIHPTVPNPYNLLSSLPPSHTWYSVLDLKDAFFCLKLHPNSQPLFAFEWRDPEKGNTGQLTWTRLPQGFKNSPTLFNEALHRDLASFRALNPQVVMLQYVDDLLVAAPTYRDCKEGTRRLLQELSKLGYRVSAKKAQLCREEVTYLGYLLKGGKRWLTPARKATVMKIPTPTTPRQVREFLGTAGFCRLWIPGFASLAAPLYPLTRPKVPFTWTEAHQEAFGRIKEALLSAPALALPDLTKPFALYVDEKEGVARGVLTQTLGPWRRPVAYLSKKLDPVASGWPTCLKAIAAVALLLKDADKLTLGQNVLVIAPHNLESIVRQPPDRWMTNARMTHYQSLLLNERVSFAPPAILNPATLLPVESDDTPIHICSEILAEETGTRPDLRDQPLPGVPAWYTDGSSFIMDGRRQAGAAIVDNKRTVWASNLPEGTSAQKAELIALTQALRLAEGKSINIYTDSRYAFATAHVHGAIYKQRGWLTSAGKDIKNKEEILALLEAIHLPKRVAIIHCPGHQRGTDPVATGNRKADEAAKQAAQSTRILTETTKNAGKRTADGSEFEKRTADGSEFESPKKKAKVE

SEQ ID NO: 6719 - protein, 2122 aa, synthetic construct
MPAAKRVKLDGGDKKYSIGLDIGTNSVGWAVITDEYKVPSKKFKVLGNTDRHSIKKNLIGALLFDSGETAEATRLKRTARRRYTRRKNRICYLQEIFSNEMAKVDDSFFHRLEESFLVEEDKKHERHPIFGNIVDEVAYHEKYPTIYHLRKKLVDSTDKADLRLIYLALAHMIKFRGHFLIEGDLNPDNSDVDKLFIQLVQTYNQLFEENPINASGVDAKAILSARLSKSRRLENLIAQLPGEKKNGLFGNLIALSLGLTPNFKSNFDLAEDAKLQLSKDTYDDDLDNLLAQIGDQYADLFLAAKNLSDAILLSDILRVNTEITKAPLSASMIKRYDEHHQDLTLLKALVRQQLPEKYKEIFFDQSKNGYAGYIDGGASQEEFYKFIKPILEKMDGTEELLVKLNREDLLRKQRTFDNGSIPHQIHLGELHAILRRQEDFYPFLKDNREKIEKILTFRIPYYVGPLARGNSRFAWMTRKSEETITPWNFEEVVDKGASAQSFIERMTNFDKNLPNEKVLPKHSLLYEYFTVYNELTKVKYVTEGMRKPAFLSGEQKKAIVDLLFKTNRKVTVKQLKEDYFKKIECFDSVEISGVEDRFNASLGTYHDLLKIIKDKDFLDNEENEDILEDIVLTLTLFEDREMIEERLKTYAHLFDDKVMKQLKRRRYTGWGRLSRKLINGIRDKQSGKTILDFLKSDGFANRNFMQLIHDDSLTFKEDIQKAQVSGQGDSLHEHIANLAGSPAIKKGILQTVKVVDELVKVMGRHKPENIVIEMARENQTTQKGQKNSRERMKRIEEGIKELGSQILKEHPVENTQLQNEKLYLYYLQNGRDMYVDQELDINRLSDYDVDHIVPQSFLKDDSIDNKVLTRSDKARGKSDNVPSEEVVKKMKNYWRQLLNAKLITQRKFDNLTKAERGGLSELDKAGFIKRQLVETRQITKHVAQILDSRMNTKYDENDKLIREVKVITLKSKLVSDFRKDFQFYKVREINNYHHAHDAYLNAVVGTALIKKYPKLESEFVYGDYKVYDVRKMIAKSEQEIGKATAKYFFYSNIMNFFKTEITLANGEIRKRPLIETNGETGEIVWDKGRDFATVRKVLSMPQVNIVKKTEVQTGGFSKESILPKRNSDKLIARKKDWDPKKYGGFDSPTVAYSVLVVAKVEKGKSKKLKSVKELLGITIMERSSFEKNPIDFLEAKGYKEVKKDLIIKLPKYSLFELENGRKRMLASAGELQKGNELALPSKYVNFLYLASHYEKLKGSPEDNEQKQLFVEQHKHYLDEIIEQISEFSKRVILADANLDKVLSAYNKHRDKPIREQAENIIHLFTLTNLGAPAAFKYFDTTIDRKRYTSTKEVLDATLIHQSITGLYETRIDLSQLGGDGGPAPGGGGGLLGRDLLTKLKAQIQFSTEGPQVTWEDRPAMCLVLNLEEEYRLHEKPVPPSIDPSWLQLFPMVWAEKAGMGLANQVPPVVVELKSDASPVAVRQYPMSKEAREGIRPHIQRFLDLGILVPCQSPWNTPLLPVKKPGTNDYRPVQDLREVNKRVQDIHPTVPNPYNLLSSLPPSHTWYSVLDLKDAFFCLKLHPNSQPLFAFEWRDPEKGNTGQLTWTRLPQGFKNSPTLFNEALHRDLASFRALNPQVVMLQYVDDLLVAAPTYRDCKEGTRRLLQELSKLGYRVSAKKAQLCREEVTYLGYLLKGGKRWLTPARKATVMKIPTPTTPRQVREFLGKAGFCRLFIPGFASLAAPLYPLTRPKVPFTWTEAHQEAFGRIKEALLSAPALALPDLTKPFALYVDEKEGVARGVLTQTLGPWRRPVAYLSKKLDPVASGWPTCLKAIAAVALLLKDADKLTLGQNVLVIAPHNLESIVRQPPDRWMTNARMTHYQSLLLNERVSFAPPAILNPATLLPVESDDTPIHICSEILAEETGTRPDLRDQPLPGVPAWYTDGSSFIMDGRRQAGAAIVDNKRTVWASNLPEGTSAQKAELIALTQALRLAEGKSINIYTDSRYAFATAHVHGAIYKQRGWLTSAGKDIKNKEEILALLEAIHLPKRVAIIHCPGHQRGTDPVATGNRKADEAAKQAAQSTRILTETTKNAGKRTADGSEFEKRTADGSEFESPKKKAKVE

SEQ ID NO: 6720 - protein, 2213 aa, synthetic construct
MPAAKRVKLDGGDKKYSIGLDIGTNSVGWAVITDEYKVPSKKFKVLGNTDRHSIKKNLIGALLFDSGETAEATRLKRTARRRYTRRKNRICYLQEIFSNEMAKVDDSFFHRLEESFLVEEDKKHERHPIFGNIVDEVAYHEKYPTIYHLRKKLVDSTDKADLRLIYLALAHMIKFRGHFLIEGDLNPDNSDVDKLFIQLVQTYNQLFEENPINASGVDAKAILSARLSKSRRLENLIAQLPGEKKNGLFGNLIALSLGLTPNFKSNFDLAEDAKLQLSKDTYDDDLDNLLAQIGDQYADLFLAAKNLSDAILLSDILRVNTEITKAPLSASMIKRYDEHHQDLTLLKALVRQQLPEKYKEIFFDQSKNGYAGYIDGGASQEEFYKFIKPILEKMDGTEELLVKLNREDLLRKQRTFDNGSIPHQIHLGELHAILRRQEDFYPFLKDNREKIEKILTFRIPYYVGPLARGNSRFAWMTRKSEETITPWNFEEVVDKGASAQSFIERMTNFDKNLPNEKVLPKHSLLYEYFTVYNELTKVKYVTEGMRKPAFLSGEQKKAIVDLLFKTNRKVTVKQLKEDYFKKIECFDSVEISGVEDRFNASLGTYHDLLKIIKDKDFLDNEENEDILEDIVLTLTLFEDREMIEERLKTYAHLFDDKVMKQLKRRRYTGWGRLSRKLINGIRDKQSGKTILDFLKSDGFANRNFMQLIHDDSLTFKEDIQKAQVSGQGDSLHEHIANLAGSPAIKKGILQTVKVVDELVKVMGRHKPENIVIEMARENQTTQKGQKNSRERMKRIEEGIKELGSQILKEHPVENTQLQNEKLYLYYLQNGRDMYVDQELDINRLSDYDVDHIVPQSFLKDDSIDNKVLTRSDKARGKSDNVPSEEVVKKMKNYWRQLLNAKLITQRKFDNLTKAERGGLSELDKAGFIKRQLVETRQITKHVAQILDSRMNTKYDENDKLIREVKVITLKSKLVSDFRKDFQFYKVREINNYHHAHDAYLNAVVGTALIKKYPKLESEFVYGDYKVYDVRKMIAKSEQEIGKATAKYFFYSNIMNFFKTEITLANGEIRKRPLIETNGETGEIVWDKGRDFATVRKVLSMPQVNIVKKTEVQTGGFSKESILPKRNSDKLIARKKDWDPKKYGGFDSPTVAYSVLVVAKVEKGKSKKLKSVKELLGITIMERSSFEKNPIDFLEAKGYKEVKKDLIIKLPKYSLFELENGRKRMLASAGELQKGNELALPSKYVNFLYLASHYEKLKGSPEDNEQKQLFVEQHKHYLDEIIEQISEFSKRVILADANLDKVLSAYNKHRDKPIREQAENIIHLFTLTNLGAPAAFKYFDTTIDRKRYTSTKEVLDATLIHQSITGLYETRIDLSQLGGDGGPAPGGGGGTLGDQGSRGSDPLPEPRVTLTVEGIPTEFLVNTGAEHSVLTKPMGKMGSKRTVVAGATGSKVYPWTTKRLLKIGQKQVTHSFLVIPECPAPLLGRDLLTKLKAQIQFSTEGPQVTWEDRPAMCLVLNLEEEYRLHEKPVPPSIDPSWLQLFPMVWAEKAGMGLANQVPPVVVELKSDASPVAVRQYPMSKEAREGIRPHIQRFLDLGILVPCQSPWNTPLLPVKKPGTNDYRPVQDLREVNKRVQDIHPTVPNPYNLLSSLPPSHTWYSVLDLKDAFFCLKLHPNSQPLFAFEWRDPEKGNTGQLTWTRLPQGFKNSPTLFNEALHRDLASFRALNPQVVMLQYVDDLLVAAPTYRDCKEGTRRLLQELSKLGYRVSAKKAQLCREEVTYLGYLLKGGKRWLTPARKATVMKIPTPTTPRQVREFLGTAGFCRLWIPGFASLAAPLYPLTRPKVPFTWTEAHQEAFGRIKEALLSAPALALPDLTKPFALYVDEKEGVARGVLTQTLGPWRRPVAYLSKKLDPVASGWPTCLKAIAAVALLLKDADKLTLGQNVLVIAPHNLESIVRQPPDRWMTNARMTHYQSLLLNERVSFAPPAILNPATLLPVESDDTPIHICSEILAEETGTRPDLRDQPLPGVPAWYTDGSSFIMDGRRQAGAAIVDNKRTVWASNLPEGTSAQKAELIALTQALRLAEGKSINIYTDSRYAFATAHVHGAIYKQRGWLTSAGKDIKNKEEILALLEAIHLPKRVAIIHCPGHQRGTDPVATGNRKADEAAKQAAQSTRILTETTKNAGKRTADGSEFEKRTADGSEFESPKKKAKVE

SEQ ID NO: 6721 - protein, 2091 aa, synthetic construct
MPAAKRVKLDGGDKKYSIGLDIGTNSVGWAVITDEYKVPSKKFKVLGNTDRHSIKKNLIGALLFDSGETAEATRLKRTARRRYTRRKNRICYLQEIFSNEMAKVDDSFFHRLEESFLVEEDKKHERHPIFGNIVDEVAYHEKYPTIYHLRKKLVDSTDKADLRLIYLALAHMIKFRGHFLIEGDLNPDNSDVDKLFIQLVQTYNQLFEENPINASGVDAKAILSARLSKSRRLENLIAQLPGEKKNGLFGNLIALSLGLTPNFKSNFDLAEDAKLQLSKDTYDDDLDNLLAQIGDQYADLFLAAKNLSDAILLSDILRVNTEITKAPLSASMIKRYDEHHQDLTLLKALVRQQLPEKYKEIFFDQSKNGYAGYIDGGASQEEFYKFIKPILEKMDGTEELLVKLNREDLLRKQRTFDNGSIPHQIHLGELHAILRRQEDFYPFLKDNREKIEKILTFRIPYYVGPLARGNSRFAWMTRKSEETITPWNFEEVVDKGASAQSFIERMTNFDKNLPNEKVLPKHSLLYEYFTVYNELTKVKYVTEGMRKPAFLSGEQKKAIVDLLFKTNRKVTVKQLKEDYFKKIECFDSVEISGVEDRFNASLGTYHDLLKIIKDKDFLDNEENEDILEDIVLTLTLFEDREMIEERLKTYAHLFDDKVMKQLKRRRYTGWGRLSRKLINGIRDKQSGKTILDFLKSDGFANRNFMQLIHDDSLTFKEDIQKAQVSGQGDSLHEHIANLAGSPAIKKGILQTVKVVDELVKVMGRHKPENIVIEMARENQTTQKGQKNSRERMKRIEEGIKELGSQILKEHPVENTQLQNEKLYLYYLQNGRDMYVDQELDINRLSDYDVDHIVPQSFLKDDSIDNKVLTRSDKARGKSDNVPSEEVVKKMKNYWRQLLNAKLITQRKFDNLTKAERGGLSELDKAGFIKRQLVETRQITKHVAQILDSRMNTKYDENDKLIREVKVITLKSKLVSDFRKDFQFYKVREINNYHHAHDAYLNAVVGTALIKKYPKLESEFVYGDYKVYDVRKMIAKSEQEIGKATAKYFFYSNIMNFFKTEITLANGEIRKRPLIETNGETGEIVWDKGRDFATVRKVLSMPQVNIVKKTEVQTGGFSKESILPKRNSDKLIARKKDWDPKKYGGFDSPTVAYSVLVVAKVEKGKSKKLKSVKELLGITIMERSSFEKNPIDFLEAKGYKEVKKDLIIKLPKYSLFELENGRKRMLASAGELQKGNELALPSKYVNFLYLASHYEKLKGSPEDNEQKQLFVEQHKHYLDEIIEQISEFSKRVILADANLDKVLSAYNKHRDKPIREQAENIIHLFTLTNLGAPAAFKYFDTTIDRKRYTSTKEVLDATLIHQSITGLYETRIDLSQLGGDGGPAPGGGGGTLGIEDEYRLHETSTEPDVSLGSTWLSDFPQAWAETGGMGLAVRQAPLIIPLKATSTPVSIQQYPMSHEARLGIKPHIQRLLDQGILVPCQSPWNTPLLPVKKPGTNDYRPVQDLREVNKRVEDIHPTVPNPYNLLSGLPPSHQWYTVLDLKDAFFCLRLHPTSQPLFAFEWRDPGMGISGQLTWTRLPQGFKNSPTLFNEALHRDLADFRIQHPDLILLQYVDDILLAATSELDCQQGTRALLQTLGDLGYRASAKKAQICQKQVKYLGYLLREGQRWLTEARKETVMGQPVPKTPRQLREFLGTAGFCRLWIPGFAEMAAPLYPLTKPGTLFSWGPDQQKAYQEIKQALLTAPALGLPDLTKPFELFVDEKQGYAKGVLTQKLGPWRRPVAYLSKKLDPVAAGWPPCLRMVAAIAVLTKDAGKLTMGQPLVILAPHAVEALVKQPPDRWLSNARMTHYQAMLLDTDRVQFGPVVALNPATLLPLPEEGAPHDCLEILAETHGTRPDLTDQPIPDADHTWYTDGSSFLQEGQRKAGAAVTTETEVIWAGALPAGTSAQRAELIALTQALKMAEGKRLNVYTDSRYAFATAHIHGEIYRRRGWLTSEGREIKNKSEILALLKALFLPKRLSIIHCLGHQKGDSAEARGNRLADQAAREAAIKTPPDTSTLLAGKRTADGSEFEKRTADGSEFESPKKKAKVE

SEQ ID NO: 6722 - protein, 2085 aa, synthetic construct
MPAAKRVKLDGGDKKYSIGLDIGTNSVGWAVITDEYKVPSKKFKVLGNTDRHSIKKNLIGALLFDSGETAEATRLKRTARRRYTRRKNRICYLQEIFSNEMAKVDDSFFHRLEESFLVEEDKKHERHPIFGNIVDEVAYHEKYPTIYHLRKKLVDSTDKADLRLIYLALAHMIKFRGHFLIEGDLNPDNSDVDKLFIQLVQTYNQLFEENPINASGVDAKAILSARLSKSRRLENLIAQLPGEKKNGLFGNLIALSLGLTPNFKSNFDLAEDAKLQLSKDTYDDDLDNLLAQIGDQYADLFLAAKNLSDAILLSDILRVNTEITKAPLSASMIKRYDEHHQDLTLLKALVRQQLPEKYKEIFFDQSKNGYAGYIDGGASQEEFYKFIKPILEKMDGTEELLVKLNREDLLRKQRTFDNGSIPHQIHLGELHAILRRQEDFYPFLKDNREKIEKILTFRIPYYVGPLARGNSRFAWMTRKSEETITPWNFEEVVDKGASAQSFIERMTNFDKNLPNEKVLPKHSLLYEYFTVYNELTKVKYVTEGMRKPAFLSGEQKKAIVDLLFKTNRKVTVKQLKEDYFKKIECFDSVEISGVEDRFNASLGTYHDLLKIIKDKDFLDNEENEDILEDIVLTLTLFEDREMIEERLKTYAHLFDDKVMKQLKRRRYTGWGRLSRKLINGIRDKQSGKTILDFLKSDGFANRNFMQLIHDDSLTFKEDIQKAQVSGQGDSLHEHIANLAGSPAIKKGILQTVKVVDELVKVMGRHKPENIVIEMARENQTTQKGQKNSRERMKRIEEGIKELGSQILKEHPVENTQLQNEKLYLYYLQNGRDMYVDQELDINRLSDYDVDHIVPQSFLKDDSIDNKVLTRSDKARGKSDNVPSEEVVKKMKNYWRQLLNAKLITQRKFDNLTKAERGGLSELDKAGFIKRQLVETRQITKHVAQILDSRMNTKYDENDKLIREVKVITLKSKLVSDFRKDFQFYKVREINNYHHAHDAYLNAVVGTALIKKYPKLESEFVYGDYKVYDVRKMIAKSEQEIGKATAKYFFYSNIMNFFKTEITLANGEIRKRPLIETNGETGEIVWDKGRDFATVRKVLSMPQVNIVKKTEVQTGGFSKESILPKRNSDKLIARKKDWDPKKYGGFDSPTVAYSVLVVAKVEKGKSKKLKSVKELLGITIMERSSFEKNPIDFLEAKGYKEVKKDLIIKLPKYSLFELENGRKRMLASAGELQKGNELALPSKYVNFLYLASHYEKLKGSPEDNEQKQLFVEQHKHYLDEIIEQISEFSKRVILADANLDKVLSAYNKHRDKPIREQAENIIHLFTLTNLGAPAAFKYFDTTIDRKRYTSTKEVLDATLIHQSITGLYETRIDLSQLGGDGGPAPGGGGGTLQLDDEYRLYSPLVKPDQNIQFWLEQFPQAWAETAGMGLAKQVPPQVIQLKASATPVSVRQYPLSKEAQEGIRPHVQRLIQQGILVPVQSPWNTPLLPVRKPGTNDYRPVQDLREVNKRVQDIHPTVPNPYNLLCALPPQRSWYTVLDLKDAFFCLRLHPTSQPLFAFEWRDPGTGRTGQLTWTRLPQGFKNSPTIFDEALHRDLANFRIQHPQVTLLQYVDDLLLAGATKQDCLEGTKALLLELSDLGYRASAKKAQICRREVTYLGYSLRDGQRWLTEARKKTVVQIPAPTTAKQVREFLGTAGFCRLWIPGFATLAAPLYPLTKEKGEFSWAPEHQKAFDAIKKALLSAPALALPDVTKPFTLYVDERKGVARGVLTQTLGPWRRPVAYLSKKLDPVASGWPVCLKAIAAVAILVKDADKLTLGQNITVIAPHALENIVRQPPDRWMTNARMTHYQSLLLTERVTFAPPAALNPATLLPEETDEPVTHDCHQLLIEETGVRKDLTDIPLTGEVLTWFTDGSSYVVEGKRMAGAAVVDGTRTIWASSLPEGTSAQKAELMALTQALRLAEGKSINIYTDSRYAFATAHVHGAIYKQRGLLTSAGREIKNKEEILSLLEALHLPKRLAIIHCPGHQKAKDPISRGNQMADRVAKQAAQGVNLLAGKRTADGSEFEKRTADGSEFESPKKKAKVE

SEQ ID NO: 6723 - protein, 2082 aa, synthetic construct
MPAAKRVKLDGGDKKYSIGLDIGTNSVGWAVITDEYKVPSKKFKVLGNTDRHSIKKNLIGALLFDSGETAEATRLKRTARRRYTRRKNRICYLQEIFSNEMAKVDDSFFHRLEESFLVEEDKKHERHPIFGNIVDEVAYHEKYPTIYHLRKKLVDSTDKADLRLIYLALAHMIKFRGHFLIEGDLNPDNSDVDKLFIQLVQTYNQLFEENPINASGVDAKAILSARLSKSRRLENLIAQLPGEKKNGLFGNLIALSLGLTPNFKSNFDLAEDAKLQLSKDTYDDDLDNLLAQIGDQYADLFLAAKNLSDAILLSDILRVNTEITKAPLSASMIKRYDEHHQDLTLLKALVRQQLPEKYKEIFFDQSKNGYAGYIDGGASQEEFYKFIKPILEKMDGTEELLVKLNREDLLRKQRTFDNGSIPHQIHLGELHAILRRQEDFYPFLKDNREKIEKILTFRIPYYVGPLARGNSRFAWMTRKSEETITPWNFEEVVDKGASAQSFIERMTNFDKNLPNEKVLPKHSLLYEYFTVYNELTKVKYVTEGMRKPAFLSGEQKKAIVDLLFKTNRKVTVKQLKEDYFKKIECFDSVEISGVEDRFNASLGTYHDLLKIIKDKDFLDNEENEDILEDIVLTLTLFEDREMIEERLKTYAHLFDDKVMKQLKRRRYTGWGRLSRKLINGIRDKQSGKTILDFLKSDGFANRNFMQLIHDDSLTFKEDIQKAQVSGQGDSLHEHIANLAGSPAIKKGILQTVKVVDELVKVMGRHKPENIVIEMARENQTTQKGQKNSRERMKRIEEGIKELGSQILKEHPVENTQLQNEKLYLYYLQNGRDMYVDQELDINRLSDYDVDHIVPQSFLKDDSIDNKVLTRSDKARGKSDNVPSEEVVKKMKNYWRQLLNAKLITQRKFDNLTKAERGGLSELDKAGFIKRQLVETRQITKHVAQILDSRMNTKYDENDKLIREVKVITLKSKLVSDFRKDFQFYKVREINNYHHAHDAYLNAVVGTALIKKYPKLESEFVYGDYKVYDVRKMIAKSEQEIGKATAKYFFYSNIMNFFKTEITLANGEIRKRPLIETNGETGEIVWDKGRDFATVRKVLSMPQVNIVKKTEVQTGGFSKESILPKRNSDKLIARKKDWDPKKYGGFDSPTVAYSVLVVAKVEKGKSKKLKSVKELLGITIMERSSFEKNPIDFLEAKGYKEVKKDLIIKLPKYSLFELENGRKRMLASAGELQKGNELALPSKYVNFLYLASHYEKLKGSPEDNEQKQLFVEQHKHYLDEIIEQISEFSKRVILADANLDKVLSAYNKHRDKPIREQAENIIHLFTLTNLGAPAAFKYFDTTIDRKRYTSTKEVLDATLIHQSITGLYETRIDLSQLGGDGGPAPGGGGGIPWLMKKPLQLTTLVPLQEYEERLLKQTMLTGSYKEKLQSLFLKYDALWQHWENQVGHRRIKPHHIATGTVNPRPQKQYPINPKAKASIQTVINDLLKQGVLIQQNSIMNTPVYPVPKPDGKWRMVLDYREVNKTIPLIAAQNQHSAGILSSIFRGKYKTTLDLSNGFWAHSITPESYWLTAFTWLGQQYCWTRLPQGFLNSPALFNADVVDLLKEVPNVQVYVDDIYISHDDPREHLEQLEKVFSLLLNAGYVVSLKKSEIAQHEVEFLGFNITKEGRGLTETFKQKLLNITPPRDLKQLQSILGLLNFARNFIPNFSELVKPLYNIIATAPGKYITWTTDNSQQLQNIISMLNSAENLEERNPEVRLIMKVNTSPSAGYIRFYNEFAKRPIMYLNYVYTKAEVKFTNTEKLLTTIHKGLIKALDLGMGQEILVYSPIVSMTKIQKTPLPERKALPIRWITWMSYLEDPRIQFHYDKTLPELQQVPTVTDDIIAKIKHPSEFSMVFYTDGSAIKHPNVNKSHNAGMGIAQVQFKPEFTVINTWSIPLGDHTAQLAEVAAVEFACKKALKIDGPVLIVTDSFYVAESVNKELPYWQSNGFFNNKKKPLKHVSKWKSIADCIQLKPDIIIIHEKGHQPTASTFHTEGNNLADKLATQGSYVVNAGKRTADGSEFEKRTADGSEFESPKKKAKVE

SEQ ID NO: 6724 - protein, 2082 aa, synthetic construct
MPAAKRVKLDGGDKKYSIGLDIGTNSVGWAVITDEYKVPSKKFKVLGNTDRHSIKKNLIGALLFDSGETAEATRLKRTARRRYTRRKNRICYLQEIFSNEMAKVDDSFFHRLEESFLVEEDKKHERHPIFGNIVDEVAYHEKYPTIYHLRKKLVDSTDKADLRLIYLALAHMIKFRGHFLIEGDLNPDNSDVDKLFIQLVQTYNQLFEENPINASGVDAKAILSARLSKSRRLENLIAQLPGEKKNGLFGNLIALSLGLTPNFKSNFDLAEDAKLQLSKDTYDDDLDNLLAQIGDQYADLFLAAKNLSDAILLSDILRVNTEITKAPLSASMIKRYDEHHQDLTLLKALVRQQLPEKYKEIFFDQSKNGYAGYIDGGASQEEFYKFIKPILEKMDGTEELLVKLNREDLLRKQRTFDNGSIPHQIHLGELHAILRRQEDFYPFLKDNREKIEKILTFRIPYYVGPLARGNSRFAWMTRKSEETITPWNFEEVVDKGASAQSFIERMTNFDKNLPNEKVLPKHSLLYEYFTVYNELTKVKYVTEGMRKPAFLSGEQKKAIVDLLFKTNRKVTVKQLKEDYFKKIECFDSVEISGVEDRFNASLGTYHDLLKIIKDKDFLDNEENEDILEDIVLTLTLFEDREMIEERLKTYAHLFDDKVMKQLKRRRYTGWGRLSRKLINGIRDKQSGKTILDFLKSDGFANRNFMQLIHDDSLTFKEDIQKAQVSGQGDSLHEHIANLAGSPAIKKGILQTVKVVDELVKVMGRHKPENIVIEMARENQTTQKGQKNSRERMKRIEEGIKELGSQILKEHPVENTQLQNEKLYLYYLQNGRDMYVDQELDINRLSDYDVDHIVPQSFLKDDSIDNKVLTRSDKARGKSDNVPSEEVVKKMKNYWRQLLNAKLITQRKFDNLTKAERGGLSELDKAGFIKRQLVETRQITKHVAQILDSRMNTKYDENDKLIREVKVITLKSKLVSDFRKDFQFYKVREINNYHHAHDAYLNAVVGTALIKKYPKLESEFVYGDYKVYDVRKMIAKSEQEIGKATAKYFFYSNIMNFFKTEITLANGEIRKRPLIETNGETGEIVWDKGRDFATVRKVLSMPQVNIVKKTEVQTGGFSKESILPKRNSDKLIARKKDWDPKKYGGFDSPTVAYSVLVVAKVEKGKSKKLKSVKELLGITIMERSSFEKNPIDFLEAKGYKEVKKDLIIKLPKYSLFELENGRKRMLASAGELQKGNELALPSKYVNFLYLASHYEKLKGSPEDNEQKQLFVEQHKHYLDEIIEQISEFSKRVILADANLDKVLSAYNKHRDKPIREQAENIIHLFTLTNLGAPAAFKYFDTTIDRKRYTSTKEVLDATLIHQSITGLYETRIDLSQLGGDGGPAPGGGGGIPWLMKKPLQLTTLVPLQEYEERLLKQTMLTGSYKEKLQSLFLKYDALWQHWENQVGHRRIKPHHIATGTVNPRPQKQYPINPKAKASIQTVINDLLKQGVLIQQNSIMNTPVYPVPKPDGKWRMVLDYREVNKTIPLIAAQNQHSAGILSSIFRGKYKTTLDLSNGFWAHSITPESYWLTAFTWLGQQYCWTRLPQGFLNSPALFNADVVDLLKEVPNVQVYVDDIYISHDDPREHLEQLEKVFSLLLNAGYVVSLKKSEIAQHEVEFLGFNITKEGRGLTETFKQKLLNITPPRDLKQLQSILGKLNFARNFIPNFSELVKPLYNIIATAPGKYITWTTDNSQQLQNIISMLNSAENLEERNPEVRLIMKVNTSPSAGYIRFYNEFAKRPIMYLNYVYTKAEVKFTNTEKLLTTIHKGLIKALDLGMGQEILVYSPIVSMTKIQKTPLPERKALPIRWITWMSYLEDPRIQFHYDKTLPELQQVPTVTDDIIAKIKHPSEFSMVFYTDGSAIKHPNVNKSHNAGMGIAQVQFKPEFTVINTWSIPLGDHTAQLAEVAAVEFACKKALKIDGPVLIVTDSFYVAESVNKELPYWQSNGFFNNKKKPLKHVSKWKSIADCIQLKPDIIIIHEKGHQPTASTFHTEGNNLADKLATQGSYVVNAGKRTADGSEFEKRTADGSEFESPKKKAKVE

SEQ ID NO: 6725 - protein, 2091 aa, synthetic construct
MPAAKRVKLDGGDKKYSIGLDIGTNSVGWAVITDEYKVPSKKFKVLGNTDRHSIKKNLIGALLFDSGETAEATRLKRTARRRYTRRKNRICYLQEIFSNEMAKVDDSFFHRLEESFLVEEDKKHERHPIFGNIVDEVAYHEKYPTIYHLRKKLVDSTDKADLRLIYLALAHMIKFRGHFLIEGDLNPDNSDVDKLFIQLVQTYNQLFEENPINASGVDAKAILSARLSKSRRLENLIAQLPGEKKNGLFGNLIALSLGLTPNFKSNFDLAEDAKLQLSKDTYDDDLDNLLAQIGDQYADLFLAAKNLSDAILLSDILRVNTEITKAPLSASMIKRYDEHHQDLTLLKALVRQQLPEKYKEIFFDQSKNGYAGYIDGGASQEEFYKFIKPILEKMDGTEELLVKLNREDLLRKQRTFDNGSIPHQIHLGELHAILRRQEDFYPFLKDNREKIEKILTFRIPYYVGPLARGNSRFAWMTRKSEETITPWNFEEVVDKGASAQSFIERMTNFDKNLPNEKVLPKHSLLYEYFTVYNELTKVKYVTEGMRKPAFLSGEQKKAIVDLLFKTNRKVTVKQLKEDYFKKIECFDSVEISGVEDRFNASLGTYHDLLKIIKDKDFLDNEENEDILEDIVLTLTLFEDREMIEERLKTYAHLFDDKVMKQLKRRRYTGWGRLSRKLINGIRDKQSGKTILDFLKSDGFANRNFMQLIHDDSLTFKEDIQKAQVSGQGDSLHEHIANLAGSPAIKKGILQTVKVVDELVKVMGRHKPENIVIEMARENQTTQKGQKNSRERMKRIEEGIKELGSQILKEHPVENTQLQNEKLYLYYLQNGRDMYVDQELDINRLSDYDVDHIVPQSFLKDDSIDNKVLTRSDKARGKSDNVPSEEVVKKMKNYWRQLLNAKLITQRKFDNLTKAERGGLSELDKAGFIKRQLVETRQITKHVAQILDSRMNTKYDENDKLIREVKVITLKSKLVSDFRKDFQFYKVREINNYHHAHDAYLNAVVGTALIKKYPKLESEFVYGDYKVYDVRKMIAKSEQEIGKATAKYFFYSNIMNFFKTEITLANGEIRKRPLIETNGETGEIVWDKGRDFATVRKVLSMPQVNIVKKTEVQTGGFSKESILPKRNSDKLIARKKDWDPKKYGGFDSPTVAYSVLVVAKVEKGKSKKLKSVKELLGITIMERSSFEKNPIDFLEAKGYKEVKKDLIIKLPKYSLFELENGRKRMLASAGELQKGNELALPSKYVNFLYLASHYEKLKGSPEDNEQKQLFVEQHKHYLDEIIEQISEFSKRVILADANLDKVLSAYNKHRDKPIREQAENIIHLFTLTNLGAPAAFKYFDTTIDRKRYTSTKEVLDATLIHQSITGLYETRIDLSQLGGDGGPAPGGGGGTLNIEDEYRLHETSKEPDVPLGSTWLSDFPQAWAETGGMGLAVRQAPLIIPLKATSTPVSIKQYPMSQEARLGIKPHIQRLLDQGILVPCQSPWNTPLLPVKKPGTNDYRPVQDLREVNKRVEDIHPTVPNPYNLLSGLPPSHQWYTVLDLKDAFFCLRLHPTSQPLFAFEWRDPEMGISGQLTWTRLPQGFKNSPTLFNEALHRDLADFRIQHPDLILLQYVDDLLLAATSEQDCQRGTRALLQTLGNLGYRASAKKAQICQKQVKYLGYLLKEGQRWLTEARKETVMGQPTPKTPRQLREFLGTAGFCRLWIPGFAEMAAPLYPLTKPGTLFNWGPDQQKAYQEIKQALLTAPALGLPDLTKPFELFVDEKQGYAKGVLTQKLGPWRRPVAYLSKKLDPVAAGWPPCLRMVAAIAVLTKDAGKLTMGQPLVILAPHAVEALVKQPPDRWLSNARMTHYQAMLLDTDRVQFGPVVALNPATLLPLPEKEAPHDCLEILAETHGTRPDLTDQPIPDADYTWYTDGSSFLQEGQRRAGAAVTTETEVIWARALPAGTSAQRAELIALTQALKMAEGKKLNVYTDSRYAFATAHVHGEIYRRRGWLTSEGREIKNKNEILALLKALFLPKRLSIIHCPGHQKGNSAEARGNRMADQAAREAAMKAVLETSTLLAGKRTADGSEFEKRTADGSEFESPKKKAKVE

SEQ ID NO: 6726 - protein, 2091 aa, synthetic construct
MPAAKRVKLDGGDKKYSIGLDIGTNSVGWAVITDEYKVPSKKFKVLGNTDRHSIKKNLIGALLFDSGETAEATRLKRTARRRYTRRKNRICYLQEIFSNEMAKVDDSFFHRLEESFLVEEDKKHERHPIFGNIVDEVAYHEKYPTIYHLRKKLVDSTDKADLRLIYLALAHMIKFRGHFLIEGDLNPDNSDVDKLFIQLVQTYNQLFEENPINASGVDAKAILSARLSKSRRLENLIAQLPGEKKNGLFGNLIALSLGLTPNFKSNFDLAEDAKLQLSKDTYDDDLDNLLAQIGDQYADLFLAAKNLSDAILLSDILRVNTEITKAPLSASMIKRYDEHHQDLTLLKALVRQQLPEKYKEIFFDQSKNGYAGYIDGGASQEEFYKFIKPILEKMDGTEELLVKLNREDLLRKQRTFDNGSIPHQIHLGELHAILRRQEDFYPFLKDNREKIEKILTFRIPYYVGPLARGNSRFAWMTRKSEETITPWNFEEVVDKGASAQSFIERMTNFDKNLPNEKVLPKHSLLYEYFTVYNELTKVKYVTEGMRKPAFLSGEQKKAIVDLLFKTNRKVTVKQLKEDYFKKIECFDSVEISGVEDRFNASLGTYHDLLKIIKDKDFLDNEENEDILEDIVLTLTLFEDREMIEERLKTYAHLFDDKVMKQLKRRRYTGWGRLSRKLINGIRDKQSGKTILDFLKSDGFANRNFMQLIHDDSLTFKEDIQKAQVSGQGDSLHEHIANLAGSPAIKKGILQTVKVVDELVKVMGRHKPENIVIEMARENQTTQKGQKNSRERMKRIEEGIKELGSQILKEHPVENTQLQNEKLYLYYLQNGRDMYVDQELDINRLSDYDVDHIVPQSFLKDDSIDNKVLTRSDKARGKSDNVPSEEVVKKMKNYWRQLLNAKLITQRKFDNLTKAERGGLSELDKAGFIKRQLVETRQITKHVAQILDSRMNTKYDENDKLIREVKVITLKSKLVSDFRKDFQFYKVREINNYHHAHDAYLNAVVGTALIKKYPKLESEFVYGDYKVYDVRKMIAKSEQEIGKATAKYFFYSNIMNFFKTEITLANGEIRKRPLIETNGETGEIVWDKGRDFATVRKVLSMPQVNIVKKTEVQTGGFSKESILPKRNSDKLIARKKDWDPKKYGGFDSPTVAYSVLVVAKVEKGKSKKLKSVKELLGITIMERSSFEKNPIDFLEAKGYKEVKKDLIIKLPKYSLFELENGRKRMLASAGELQKGNELALPSKYVNFLYLASHYEKLKGSPEDNEQKQLFVEQHKHYLDEIIEQISEFSKRVILADANLDKVLSAYNKHRDKPIREQAENIIHLFTLTNLGAPAAFKYFDTTIDRKRYTSTKEVLDATLIHQSITGLYETRIDLSQLGGDGGPAPGGGGGTLNIEDEYRLHETSKEPDVPLGSTWLSDFPQAWAETGGMGLAVRQAPLIIPLKATSTPVSIKQYPMSQEARLGIKPHIQRLLDQGILVPCQSPWNTPLLPVKKPGTNDYRPVQDLREVNKRVEDIHPTVPNPYNLLSGLPPSHQWYTVLDLKDAFFCLRLHPTSQPLFAFEWRDPEMGISGQLTWTRLPQGFKNSPTLFNEALHRDLADFRIQHPDLILLQYVDDLLLAATSEQDCQRGTRALLQTLGNLGYRASAKKAQICQKQVKYLGYLLKEGQRWLTEARKETVMGQPTPKTPRQLREFLGKAGFCRLFIPGFAEMAAPLYPLTKPGTLFNWGPDQQKAYQEIKQALLTAPALGLPDLTKPFELFVDEKQGYAKGVLTQKLGPWRRPVAYLSKKLDPVAAGWPPCLRMVAAIAVLTKDAGKLTMGQPLVILAPHAVEALVKQPPDRWLSNARMTHYQAMLLDTDRVQFGPVVALNPATLLPLPEKEAPHDCLEILAETHGTRPDLTDQPIPDADYTWYTDGSSFLQEGQRRAGAAVTTETEVIWARALPAGTSAQRAELIALTQALKMAEGKKLNVYTDSRYAFATAHVHGEIYRRRGWLTSEGREIKNKNEILALLKALFLPKRLSIIHCPGHQKGNSAEARGNRMADQAAREAAMKAVLETSTLLAGKRTADGSEFEKRTADGSEFESPKKKAKVE

SEQ ID NO: 6727 - protein, 2095 aa, synthetic construct
MPAAKRVKLDGGDKKYSIGLDIGTNSVGWAVITDEYKVPSKKFKVLGNTDRHSIKKNLIGALLFDSGETAEATRLKRTARRRYTRRKNRICYLQEIFSNEMAKVDDSFFHRLEESFLVEEDKKHERHPIFGNIVDEVAYHEKYPTIYHLRKKLVDSTDKADLRLIYLALAHMIKFRGHFLIEGDLNPDNSDVDKLFIQLVQTYNQLFEENPINASGVDAKAILSARLSKSRRLENLIAQLPGEKKNGLFGNLIALSLGLTPNFKSNFDLAEDAKLQLSKDTYDDDLDNLLAQIGDQYADLFLAAKNLSDAILLSDILRVNTEITKAPLSASMIKRYDEHHQDLTLLKALVRQQLPEKYKEIFFDQSKNGYAGYIDGGASQEEFYKFIKPILEKMDGTEELLVKLNREDLLRKQRTFDNGSIPHQIHLGELHAILRRQEDFYPFLKDNREKIEKILTFRIPYYVGPLARGNSRFAWMTRKSEETITPWNFEEVVDKGASAQSFIERMTNFDKNLPNEKVLPKHSLLYEYFTVYNELTKVKYVTEGMRKPAFLSGEQKKAIVDLLFKTNRKVTVKQLKEDYFKKIECFDSVEISGVEDRFNASLGTYHDLLKIIKDKDFLDNEENEDILEDIVLTLTLFEDREMIEERLKTYAHLFDDKVMKQLKRRRYTGWGRLSRKLINGIRDKQSGKTILDFLKSDGFANRNFMQLIHDDSLTFKEDIQKAQVSGQGDSLHEHIANLAGSPAIKKGILQTVKVVDELVKVMGRHKPENIVIEMARENQTTQKGQKNSRERMKRIEEGIKELGSQILKEHPVENTQLQNEKLYLYYLQNGRDMYVDQELDINRLSDYDVDHIVPQSFLKDDSIDNKVLTRSDKARGKSDNVPSEEVVKKMKNYWRQLLNAKLITQRKFDNLTKAERGGLSELDKAGFIKRQLVETRQITKHVAQILDSRMNTKYDENDKLIREVKVITLKSKLVSDFRKDFQFYKVREINNYHHAHDAYLNAVVGTALIKKYPKLESEFVYGDYKVYDVRKMIAKSEQEIGKATAKYFFYSNIMNFFKTEITLANGEIRKRPLIETNGETGEIVWDKGRDFATVRKVLSMPQVNIVKKTEVQTGGFSKESILPKRNSDKLIARKKDWDPKKYGGFDSPTVAYSVLVVAKVEKGKSKKLKSVKELLGITIMERSSFEKNPIDFLEAKGYKEVKKDLIIKLPKYSLFELENGRKRMLASAGELQKGNELALPSKYVNFLYLASHYEKLKGSPEDNEQKQLFVEQHKHYLDEIIEQISEFSKRVILADANLDKVLSAYNKHRDKPIREQAENIIHLFTLTNLGAPAAFKYFDTTIDRKRYTSTKEVLDATLIHQSITGLYETRIDLSQLGGDGGGSSEAAAKGGTAPLEEEYRLFLEAPIQNVTLLEQWKREIPKVWAEINPPGLASTQAPIHVQLLSTALPVRVRQYPITLEAKRSLRETIRKFRAAGILRPVHSPWNTPLLPVRKSGTSEYRMVQDLREVNKRVETIHPTVPNPYTLLSLLPPDRIWYSVLDLKDAFFCIPLAPESQLIFAFEWADAEEGESGQLTWTRLPQGFKNSPTLFNEALNRDLQGFRLDHPSVSLLQYVDDLLIAADTQAACLSATRDLLMTLAELGYRVSGKKAQLCQEEVTYLGFKIHKGSRSLSNSRTQAILQIPVPKTKRQVREFLGTIGYCRLWIPGFAELAQPLYAATRPGNDPLVWGEKEEEAFQSLKLALTQPPALALPSLDKPFQLFVEETSGAAKGVLTQALGPWKRPVAYLSKRLDPVAAGWPRCLRAIAAAALLTREASKLTFGQDIEITSSHNLESLLRSPPDKWLTNARITQYQVLLLDPPRVRFKQTAALNPATLLPETDDTLPIHHCLDTLDSLTSTRPDLTDQPLAQAEATLFTDGSSYIRDGKRYAGAAVVTLDSVIWAEPLPIGTSAQKAELIALTKALEWSKDKSVNIYTDSRYAFATLHVHGMIYRERGWLTAGGKAIKNAPEILALLTAVWLPKRVAVMHCKGHQKDDAPTSTGNRRADEVAREVAIRPLSTQATISAGKRTADGSEFEKRTADGSEFESPKKKAKVE

SEQ ID NO: 6728 - protein, 2099 aa, synthetic construct
MPAAKRVKLDGGDKKYSIGLDIGTNSVGWAVITDEYKVPSKKFKVLGNTDRHSIKKNLIGALLFDSGETAEATRLKRTARRRYTRRKNRICYLQEIFSNEMAKVDDSFFHRLEESFLVEEDKKHERHPIFGNIVDEVAYHEKYPTIYHLRKKLVDSTDKADLRLIYLALAHMIKFRGHFLIEGDLNPDNSDVDKLFIQLVQTYNQLFEENPINASGVDAKAILSARLSKSRRLENLIAQLPGEKKNGLFGNLIALSLGLTPNFKSNFDLAEDAKLQLSKDTYDDDLDNLLAQIGDQYADLFLAAKNLSDAILLSDILRVNTEITKAPLSASMIKRYDEHHQDLTLLKALVRQQLPEKYKEIFFDQSKNGYAGYIDGGASQEEFYKFIKPILEKMDGTEELLVKLNREDLLRKQRTFDNGSIPHQIHLGELHAILRRQEDFYPFLKDNREKIEKILTFRIPYYVGPLARGNSRFAWMTRKSEETITPWNFEEVVDKGASAQSFIERMTNFDKNLPNEKVLPKHSLLYEYFTVYNELTKVKYVTEGMRKPAFLSGEQKKAIVDLLFKTNRKVTVKQLKEDYFKKIECFDSVEISGVEDRFNASLGTYHDLLKIIKDKDFLDNEENEDILEDIVLTLTLFEDREMIEERLKTYAHLFDDKVMKQLKRRRYTGWGRLSRKLINGIRDKQSGKTILDFLKSDGFANRNFMQLIHDDSLTFKEDIQKAQVSGQGDSLHEHIANLAGSPAIKKGILQTVKVVDELVKVMGRHKPENIVIEMARENQTTQKGQKNSRERMKRIEEGIKELGSQILKEHPVENTQLQNEKLYLYYLQNGRDMYVDQELDINRLSDYDVDHIVPQSFLKDDSIDNKVLTRSDKARGKSDNVPSEEVVKKMKNYWRQLLNAKLITQRKFDNLTKAERGGLSELDKAGFIKRQLVETRQITKHVAQILDSRMNTKYDENDKLIREVKVITLKSKLVSDFRKDFQFYKVREINNYHHAHDAYLNAVVGTALIKKYPKLESEFVYGDYKVYDVRKMIAKSEQEIGKATAKYFFYSNIMNFFKTEITLANGEIRKRPLIETNGETGEIVWDKGRDFATVRKVLSMPQVNIVKKTEVQTGGFSKESILPKRNSDKLIARKKDWDPKKYGGFDSPTVAYSVLVVAKVEKGKSKKLKSVKELLGITIMERSSFEKNPIDFLEAKGYKEVKKDLIIKLPKYSLFELENGRKRMLASAGELQKGNELALPSKYVNFLYLASHYEKLKGSPEDNEQKQLFVEQHKHYLDEIIEQISEFSKRVILADANLDKVLSAYNKHRDKPIREQAENIIHLFTLTNLGAPAAFKYFDTTIDRKRYTSTKEVLDATLIHQSITGLYETRIDLSQLGGDGGGSSEAAAKGGTVSLQDEHRLFDIPVTTSLPDVWLQDFPQAWAETGGLGRAKCQAPIIIDLKPTAVPVSIKQYPMSLEAHMGIRQHIIKFLELGVLRPCRSPWNTPLLPVKKPGTQDYRPVQDLREINKRTVDIHPTVPNPYNLLSTLKPDYSWYTVLDLKDAFFCLPLAPQSQELFAFEWKDPERGISGQLTWTRLPQGFKNSPTLFNEALHRDLTDFRTQHPEVTLLQYVDDLLLAAPTKKACTQGTRHLLQELGEKGYRASAKKAQICQTKVTYLGYILSEGKRWLTPGRIETVARIPPPRNPREVREFLGTAGFCRLWIPGFAELAAPLYALTKPSTPFTWQTEHQLAFEALKKALLSAPALGLPDTSKPFTLFLDERQGIAKGVLTQKLGPWKRPVAYLSKKLDPVAAGWPPCLRIMAATAMLVKDSAKLTLGQPLTVITPHTLEAIVRQPPDRWITNARLTHYQALLLDTDRVQFGPPVTLNPATLLPVPENQPSPHDCRQVLAETHGTREDLKDQELPDADHTWYTDGSSYLDSGTRRAGAAVVDGHNTIWAQSLPPGTSAQKAELIALTKALELSKGKKANIYTDSRYAFATAHTHGSIYERRGWLTSEGKEIKNKAEIIALLKALFLPQEVAIIHCPGHQKGQDPVAVGNRQADRVARQAAMAEVLTLATEPDNTSHITAGKRTADGSEFEKRTADGSEFESPKKKAKVE

SEQ ID NO: 6729 - protein, 2124 aa, synthetic construct
MPAAKRVKLDGGDKKYSIGLDIGTNSVGWAVITDEYKVPSKKFKVLGNTDRHSIKKNLIGALLFDSGETAEATRLKRTARRRYTRRKNRICYLQEIFSNEMAKVDDSFFHRLEESFLVEEDKKHERHPIFGNIVDEVAYHEKYPTIYHLRKKLVDSTDKADLRLIYLALAHMIKFRGHFLIEGDLNPDNSDVDKLFIQLVQTYNQLFEENPINASGVDAKAILSARLSKSRRLENLIAQLPGEKKNGLFGNLIALSLGLTPNFKSNFDLAEDAKLQLSKDTYDDDLDNLLAQIGDQYADLFLAAKNLSDAILLSDILRVNTEITKAPLSASMIKRYDEHHQDLTLLKALVRQQLPEKYKEIFFDQSKNGYAGYIDGGASQEEFYKFIKPILEKMDGTEELLVKLNREDLLRKQRTFDNGSIPHQIHLGELHAILRRQEDFYPFLKDNREKIEKILTFRIPYYVGPLARGNSRFAWMTRKSEETITPWNFEEVVDKGASAQSFIERMTNFDKNLPNEKVLPKHSLLYEYFTVYNELTKVKYVTEGMRKPAFLSGEQKKAIVDLLFKTNRKVTVKQLKEDYFKKIECFDSVEISGVEDRFNASLGTYHDLLKIIKDKDFLDNEENEDILEDIVLTLTLFEDREMIEERLKTYAHLFDDKVMKQLKRRRYTGWGRLSRKLINGIRDKQSGKTILDFLKSDGFANRNFMQLIHDDSLTFKEDIQKAQVSGQGDSLHEHIANLAGSPAIKKGILQTVKVVDELVKVMGRHKPENIVIEMARENQTTQKGQKNSRERMKRIEEGIKELGSQILKEHPVENTQLQNEKLYLYYLQNGRDMYVDQELDINRLSDYDVDHIVPQSFLKDDSIDNKVLTRSDKARGKSDNVPSEEVVKKMKNYWRQLLNAKLITQRKFDNLTKAERGGLSELDKAGFIKRQLVETRQITKHVAQILDSRMNTKYDENDKLIREVKVITLKSKLVSDFRKDFQFYKVREINNYHHAHDAYLNAVVGTALIKKYPKLESEFVYGDYKVYDVRKMIAKSEQEIGKATAKYFFYSNIMNFFKTEITLANGEIRKRPLIETNGETGEIVWDKGRDFATVRKVLSMPQVNIVKKTEVQTGGFSKESILPKRNSDKLIARKKDWDPKKYGGFDSPTVAYSVLVVAKVEKGKSKKLKSVKELLGITIMERSSFEKNPIDFLEAKGYKEVKKDLIIKLPKYSLFELENGRKRMLASAGELQKGNELALPSKYVNFLYLASHYEKLKGSPEDNEQKQLFVEQHKHYLDEIIEQISEFSKRVILADANLDKVLSAYNKHRDKPIREQAENIIHLFTLTNLGAPAAFKYFDTTIDRKRYTSTKEVLDATLIHQSITGLYETRIDLSQLGGDGGGSSEAAAKGGLLGRDLLTKLKAQIQFSTEGPQVTWEDRPAMCLVLNLEEEYRLHEKPVPPSIDPSWLQLFPMVWAEKAGMGLANQVPPVVVELKSDASPVAVRQYPMSKEAREGIRPHIQRFLDLGILVPCQSPWNTPLLPVKKPGTNDYRPVQDLREVNKRVQDIHPTVPNPYNLLSSLPPSHTWYSVLDLKDAFFCLKLHPNSQPLFAFEWRDPEKGNTGQLTWTRLPQGFKNSPTLFNEALHRDLASFRALNPQVVMLQYVDDLLVAAPTYRDCKEGTRRLLQELSKLGYRVSAKKAQLCREEVTYLGYLLKGGKRWLTPARKATVMKIPTPTTPRQVREFLGTAGFCRLWIPGFASLAAPLYPLTRPKVPFTWTEAHQEAFGRIKEALLSAPALALPDLTKPFALYVDEKEGVARGVLTQTLGPWRRPVAYLSKKLDPVASGWPTCLKAIAAVALLLKDADKLTLGQNVLVIAPHNLESIVRQPPDRWMTNARMTHYQSLLLNERVSFAPPAILNPATLLPVESDDTPIHICSEILAEETGTRPDLRDQPLPGVPAWYTDGSSFIMDGRRQAGAAIVDNKRTVWASNLPEGTSAQKAELIALTQALRLAEGKSINIYTDSRYAFATAHVHGAIYKQRGWLTSAGKDIKNKEEILALLEAIHLPKRVAIIHCPGHQRGTDPVATGNRKADEAAKQAAQSTRILTETTKNAGKRTADGSEFEKRTADGSEFESPKKKAKVE

SEQ ID NO: 6730 - protein, 2093 aa, synthetic construct
MPAAKRVKLDGGDKKYSIGLDIGTNSVGWAVITDEYKVPSKKFKVLGNTDRHSIKKNLIGALLFDSGETAEATRLKRTARRRYTRRKNRICYLQEIFSNEMAKVDDSFFHRLEESFLVEEDKKHERHPIFGNIVDEVAYHEKYPTIYHLRKKLVDSTDKADLRLIYLALAHMIKFRGHFLIEGDLNPDNSDVDKLFIQLVQTYNQLFEENPINASGVDAKAILSARLSKSRRLENLIAQLPGEKKNGLFGNLIALSLGLTPNFKSNFDLAEDAKLQLSKDTYDDDLDNLLAQIGDQYADLFLAAKNLSDAILLSDILRVNTEITKAPLSASMIKRYDEHHQDLTLLKALVRQQLPEKYKEIFFDQSKNGYAGYIDGGASQEEFYKFIKPILEKMDGTEELLVKLNREDLLRKQRTFDNGSIPHQIHLGELHAILRRQEDFYPFLKDNREKIEKILTFRIPYYVGPLARGNSRFAWMTRKSEETITPWNFEEVVDKGASAQSFIERMTNFDKNLPNEKVLPKHSLLYEYFTVYNELTKVKYVTEGMRKPAFLSGEQKKAIVDLLFKTNRKVTVKQLKEDYFKKIECFDSVEISGVEDRFNASLGTYHDLLKIIKDKDFLDNEENEDILEDIVLTLTLFEDREMIEERLKTYAHLFDDKVMKQLKRRRYTGWGRLSRKLINGIRDKQSGKTILDFLKSDGFANRNFMQLIHDDSLTFKEDIQKAQVSGQGDSLHEHIANLAGSPAIKKGILQTVKVVDELVKVMGRHKPENIVIEMARENQTTQKGQKNSRERMKRIEEGIKELGSQILKEHPVENTQLQNEKLYLYYLQNGRDMYVDQELDINRLSDYDVDHIVPQSFLKDDSIDNKVLTRSDKARGKSDNVPSEEVVKKMKNYWRQLLNAKLITQRKFDNLTKAERGGLSELDKAGFIKRQLVETRQITKHVAQILDSRMNTKYDENDKLIREVKVITLKSKLVSDFRKDFQFYKVREINNYHHAHDAYLNAVVGTALIKKYPKLESEFVYGDYKVYDVRKMIAKSEQEIGKATAKYFFYSNIMNFFKTEITLANGEIRKRPLIETNGETGEIVWDKGRDFATVRKVLSMPQVNIVKKTEVQTGGFSKESILPKRNSDKLIARKKDWDPKKYGGFDSPTVAYSVLVVAKVEKGKSKKLKSVKELLGITIMERSSFEKNPIDFLEAKGYKEVKKDLIIKLPKYSLFELENGRKRMLASAGELQKGNELALPSKYVNFLYLASHYEKLKGSPEDNEQKQLFVEQHKHYLDEIIEQISEFSKRVILADANLDKVLSAYNKHRDKPIREQAENIIHLFTLTNLGAPAAFKYFDTTIDRKRYTSTKEVLDATLIHQSITGLYETRIDLSQLGGDGGGSSEAAAKGGTLNLEDEYRLYETSAEPEVSPGSTWLSDFPQAWAETGGMGLAVRQAPLIIPLKATSTPVSIKQYPMSQEAKLGIKPHIQRLLDQGILVPCQSPWNTPLLPVKKPGTNDYRPVQDLREVNKRVEDIHPTVPNPYNLLSGLPPSHRWYTVLDLKDAFFCLRLHPTSQPLFAFEWRDPGMGISGQLTWTRLPQGFKNSPTLFNEALHRDLADFRIQHPDLILLQYVDDILLAATSELDCQQGTRALLLTLGNLGYRASAKKAQLCQKQVKYLGYLLKEGQRWLTEARKETVMGQPTPKTPRQLREFLGTAGFCRLWIPGFAEMAAPLYPLTKPGTLFNWGPDQQKAYQEIKQALLTAPALGLPDLTKPFELFVDEKQGYAKGVLTQKLGPWRRPVAYLSKKLDPVAAGWPPCLRMVAAIAVLRKDAGKLTMGQPLVILAPHAVEALVKQPPDRWLSNARMTHYQAMLLDTDRVQFGPVVALNPATLLPLPEEGAPHDCLEILAETHGTRPDLTDQPIPDADHTWYTDGSSFLQEGQRKAGAAVTTETEVIWARALPAGTSAQRAELIALTQALKMAEGKRLNVYTDSRYAFATAHIHGEIYRRRGWLTSEGREIKNKSEILALLKALFLPKRLSIIHCLGHQKGDSAEARGNRLADQAAREAAIKTPPDTSTLLAGKRTADGSEFEKRTADGSEFESPKKKAKVE

SEQ ID NO: 6731 - protein, 2093 aa, synthetic construct
MPAAKRVKLDGGDKKYSIGLDIGTNSVGWAVITDEYKVPSKKFKVLGNTDRHSIKKNLIGALLFDSGETAEATRLKRTARRRYTRRKNRICYLQEIFSNEMAKVDDSFFHRLEESFLVEEDKKHERHPIFGNIVDEVAYHEKYPTIYHLRKKLVDSTDKADLRLIYLALAHMIKFRGHFLIEGDLNPDNSDVDKLFIQLVQTYNQLFEENPINASGVDAKAILSARLSKSRRLENLIAQLPGEKKNGLFGNLIALSLGLTPNFKSNFDLAEDAKLQLSKDTYDDDLDNLLAQIGDQYADLFLAAKNLSDAILLSDILRVNTEITKAPLSASMIKRYDEHHQDLTLLKALVRQQLPEKYKEIFFDQSKNGYAGYIDGGASQEEFYKFIKPILEKMDGTEELLVKLNREDLLRKQRTFDNGSIPHQIHLGELHAILRRQEDFYPFLKDNREKIEKILTFRIPYYVGPLARGNSRFAWMTRKSEETITPWNFEEVVDKGASAQSFIERMTNFDKNLPNEKVLPKHSLLYEYFTVYNELTKVKYVTEGMRKPAFLSGEQKKAIVDLLFKTNRKVTVKQLKEDYFKKIECFDSVEISGVEDRFNASLGTYHDLLKIIKDKDFLDNEENEDILEDIVLTLTLFEDREMIEERLKTYAHLFDDKVMKQLKRRRYTGWGRLSRKLINGIRDKQSGKTILDFLKSDGFANRNFMQLIHDDSLTFKEDIQKAQVSGQGDSLHEHIANLAGSPAIKKGILQTVKVVDELVKVMGRHKPENIVIEMARENQTTQKGQKNSRERMKRIEEGIKELGSQILKEHPVENTQLQNEKLYLYYLQNGRDMYVDQELDINRLSDYDVDHIVPQSFLKDDSIDNKVLTRSDKARGKSDNVPSEEVVKKMKNYWRQLLNAKLITQRKFDNLTKAERGGLSELDKAGFIKRQLVETRQITKHVAQILDSRMNTKYDENDKLIREVKVITLKSKLVSDFRKDFQFYKVREINNYHHAHDAYLNAVVGTALIKKYPKLESEFVYGDYKVYDVRKMIAKSEQEIGKATAKYFFYSNIMNFFKTEITLANGEIRKRPLIETNGETGEIVWDKGRDFATVRKVLSMPQVNIVKKTEVQTGGFSKESILPKRNSDKLIARKKDWDPKKYGGFDSPTVAYSVLVVAKVEKGKSKKLKSVKELLGITIMERSSFEKNPIDFLEAKGYKEVKKDLIIKLPKYSLFELENGRKRMLASAGELQKGNELALPSKYVNFLYLASHYEKLKGSPEDNEQKQLFVEQHKHYLDEIIEQISEFSKRVILADANLDKVLSAYNKHRDKPIREQAENIIHLFTLTNLGAPAAFKYFDTTIDRKRYTSTKEVLDATLIHQSITGLYETRIDLSQLGGDGGGSSEAAAKGGTLNIEDEYRLHETSKEPDVPLGSTWLSDFPQAWAETGGMGLAVRQAPLIIPLKATSTPVSIKQYPMSQEARLGIKPHIQRLLDQGILVPCQSPWNTPLLPVKKPGTNDYRPVQDLREVNKRVEDIHPTVPNPYNLLSGLPPSHQWYTVLDLKDAFFCLRLHPTSQPLFAFEWRDPEMGISGQLTWTRLPQGFKNSPTLFNEALHRDLADFRIQHPDLILLQYVDDLLLAATSEQDCQRGTRALLQTLGNLGYRASAKKAQICQKQVKYLGYLLKEGQRWLTEARKETVMGQPTPKTPRQLREFLGKAGFCRLFIPGFAEMAAPLYPLTKPGTLFNWGPDQQKAYQEIKQALLTAPALGLPDLTKPFELFVDEKQGYAKGVLTQKLGPWRRPVAYLSKKLDPVAAGWPPCLRMVAAIAVLTKDAGKLTMGQPLVILAPHAVEALVKQPPDRWLSNARMTHYQAMLLDTDRVQFGPVVALNPATLLPLPEKEAPHDCLEILAETHGTRPDLTDQPIPDADYTWYTDGSSFLQEGQRRAGAAVTTETEVIWARALPAGTSAQRAELIALTQALKMAEGKKLNVYTDSRYAFATAHVHGEIYRRRGWLTSEGREIKNKNEILALLKALFLPKRLSIIHCPGHQKGNSAEARGNRMADQAAREAAMKAVLETSTLLAGKRTADGSEFEKRTADGSEFESPKKKAKVE

SEQ ID NO: 6732 - protein, 2095 aa, synthetic construct
MPAAKRVKLDGGDKKYSIGLDIGTNSVGWAVITDEYKVPSKKFKVLGNTDRHSIKKNLIGALLFDSGETAEATRLKRTARRRYTRRKNRICYLQEIFSNEMAKVDDSFFHRLEESFLVEEDKKHERHPIFGNIVDEVAYHEKYPTIYHLRKKLVDSTDKADLRLIYLALAHMIKFRGHFLIEGDLNPDNSDVDKLFIQLVQTYNQLFEENPINASGVDAKAILSARLSKSRRLENLIAQLPGEKKNGLFGNLIALSLGLTPNFKSNFDLAEDAKLQLSKDTYDDDLDNLLAQIGDQYADLFLAAKNLSDAILLSDILRVNTEITKAPLSASMIKRYDEHHQDLTLLKALVRQQLPEKYKEIFFDQSKNGYAGYIDGGASQEEFYKFIKPILEKMDGTEELLVKLNREDLLRKQRTFDNGSIPHQIHLGELHAILRRQEDFYPFLKDNREKIEKILTFRIPYYVGPLARGNSRFAWMTRKSEETITPWNFEEVVDKGASAQSFIERMTNFDKNLPNEKVLPKHSLLYEYFTVYNELTKVKYVTEGMRKPAFLSGEQKKAIVDLLFKTNRKVTVKQLKEDYFKKIECFDSVEISGVEDRFNASLGTYHDLLKIIKDKDFLDNEENEDILEDIVLTLTLFEDREMIEERLKTYAHLFDDKVMKQLKRRRYTGWGRLSRKLINGIRDKQSGKTILDFLKSDGFANRNFMQLIHDDSLTFKEDIQKAQVSGQGDSLHEHIANLAGSPAIKKGILQTVKVVDELVKVMGRHKPENIVIEMARENQTTQKGQKNSRERMKRIEEGIKELGSQILKEHPVENTQLQNEKLYLYYLQNGRDMYVDQELDINRLSDYDVDHIVPQSFLKDDSIDNKVLTRSDKARGKSDNVPSEEVVKKMKNYWRQLLNAKLITQRKFDNLTKAERGGLSELDKAGFIKRQLVETRQITKHVAQILDSRMNTKYDENDKLIREVKVITLKSKLVSDFRKDFQFYKVREINNYHHAHDAYLNAVVGTALIKKYPKLESEFVYGDYKVYDVRKMIAKSEQEIGKATAKYFFYSNIMNFFKTEITLANGEIRKRPLIETNGETGEIVWDKGRDFATVRKVLSMPQVNIVKKTEVQTGGFSKESILPKRNSDKLIARKKDWDPKKYGGFDSPTVAYSVLVVAKVEKGKSKKLKSVKELLGITIMERSSFEKNPIDFLEAKGYKEVKKDLIIKLPKYSLFELENGRKRMLASAGELQKGNELALPSKYVNFLYLASHYEKLKGSPEDNEQKQLFVEQHKHYLDEIIEQISEFSKRVILADANLDKVLSAYNKHRDKPIREQAENIIHLFTLTNLGAPAAFKYFDTTIDRKRYTSTKEVLDATLIHQSITGLYETRIDLSQLGGDGGEAAAKGSSGGTAPLEEEYRLFLEAPIQNVTLLEQWKREIPKVWAEINPPGLASTQAPIHVQLLSTALPVRVRQYPITLEAKRSLRETIRKFRAAGILRPVHSPWNTPLLPVRKSGTSEYRMVQDLREVNKRVETIHPTVPNPYTLLSLLPPDRIWYSVLDLKDAFFCIPLAPESQLIFAFEWADAEEGESGQLTWTRLPQGFKNSPTLFNEALNRDLQGFRLDHPSVSLLQYVDDLLIAADTQAACLSATRDLLMTLAELGYRVSGKKAQLCQEEVTYLGFKIHKGSRSLSNSRTQAILQIPVPKTKRQVREFLGTIGYCRLWIPGFAELAQPLYAATRPGNDPLVWGEKEEEAFQSLKLALTQPPALALPSLDKPFQLFVEETSGAAKGVLTQALGPWKRPVAYLSKRLDPVAAGWPRCLRAIAAAALLTREASKLTFGQDIEITSSHNLESLLRSPPDKWLTNARITQYQVLLLDPPRVRFKQTAALNPATLLPETDDTLPIHHCLDTLDSLTSTRPDLTDQPLAQAEATLFTDGSSYIRDGKRYAGAAVVTLDSVIWAEPLPIGTSAQKAELIALTKALEWSKDKSVNIYTDSRYAFATLHVHGMIYRERGWLTAGGKAIKNAPEILALLTAVWLPKRVAVMHCKGHQKDDAPTSTGNRRADEVAREVAIRPLSTQATISAGKRTADGSEFEKRTADGSEFESPKKKAKVE

SEQ ID NO: 6733 - protein, 2095 aa, synthetic construct
MPAAKRVKLDGGDKKYSIGLDIGTNSVGWAVITDEYKVPSKKFKVLGNTDRHSIKKNLIGALLFDSGETAEATRLKRTARRRYTRRKNRICYLQEIFSNEMAKVDDSFFHRLEESFLVEEDKKHERHPIFGNIVDEVAYHEKYPTIYHLRKKLVDSTDKADLRLIYLALAHMIKFRGHFLIEGDLNPDNSDVDKLFIQLVQTYNQLFEENPINASGVDAKAILSARLSKSRRLENLIAQLPGEKKNGLFGNLIALSLGLTPNFKSNFDLAEDAKLQLSKDTYDDDLDNLLAQIGDQYADLFLAAKNLSDAILLSDILRVNTEITKAPLSASMIKRYDEHHQDLTLLKALVRQQLPEKYKEIFFDQSKNGYAGYIDGGASQEEFYKFIKPILEKMDGTEELLVKLNREDLLRKQRTFDNGSIPHQIHLGELHAILRRQEDFYPFLKDNREKIEKILTFRIPYYVGPLARGNSRFAWMTRKSEETITPWNFEEVVDKGASAQSFIERMTNFDKNLPNEKVLPKHSLLYEYFTVYNELTKVKYVTEGMRKPAFLSGEQKKAIVDLLFKTNRKVTVKQLKEDYFKKIECFDSVEISGVEDRFNASLGTYHDLLKIIKDKDFLDNEENEDILEDIVLTLTLFEDREMIEERLKTYAHLFDDKVMKQLKRRRYTGWGRLSRKLINGIRDKQSGKTILDFLKSDGFANRNFMQLIHDDSLTFKEDIQKAQVSGQGDSLHEHIANLAGSPAIKKGILQTVKVVDELVKVMGRHKPENIVIEMARENQTTQKGQKNSRERMKRIEEGIKELGSQILKEHPVENTQLQNEKLYLYYLQNGRDMYVDQELDINRLSDYDVDHIVPQSFLKDDSIDNKVLTRSDKARGKSDNVPSEEVVKKMKNYWRQLLNAKLITQRKFDNLTKAERGGLSELDKAGFIKRQLVETRQITKHVAQILDSRMNTKYDENDKLIREVKVITLKSKLVSDFRKDFQFYKVREINNYHHAHDAYLNAVVGTALIKKYPKLESEFVYGDYKVYDVRKMIAKSEQEIGKATAKYFFYSNIMNFFKTEITLANGEIRKRPLIETNGETGEIVWDKGRDFATVRKVLSMPQVNIVKKTEVQTGGFSKESILPKRNSDKLIARKKDWDPKKYGGFDSPTVAYSVLVVAKVEKGKSKKLKSVKELLGITIMERSSFEKNPIDFLEAKGYKEVKKDLIIKLPKYSLFELENGRKRMLASAGELQKGNELALPSKYVNFLYLASHYEKLKGSPEDNEQKQLFVEQHKHYLDEIIEQISEFSKRVILADANLDKVLSAYNKHRDKPIREQAENIIHLFTLTNLGAPAAFKYFDTTIDRKRYTSTKEVLDATLIHQSITGLYETRIDLSQLGGDGGEAAAKGSSGGTAPLEEEYRLFLEAPIQNVTLLEQWKREIPKVWAEINPPGLASTQAPIHVQLLSTALPVRVRQYPITLEAKRSLRETIRKFRAAGILRPVHSPWNTPLLPVRKSGTSEYRMVQDLREVNKRVETIHPTVPNPYTLLSLLPPDRIWYSVLDLKDAFFCIPLAPESQLIFAFEWADAEEGESGQLTWTRLPQGFKNSPTLFNEALNRDLQGFRLDHPSVSLLQYVDDLLIAADTQAACLSATRDLLMTLAELGYRVSGKKAQLCQEEVTYLGFKIHKGSRSLSNSRTQAILQIPVPKTKRQVREFLGKIGYCRLFIPGFAELAQPLYAATRPGNDPLVWGEKEEEAFQSLKLALTQPPALALPSLDKPFQLFVEETSGAAKGVLTQALGPWKRPVAYLSKRLDPVAAGWPRCLRAIAAAALLTREASKLTFGQDIEITSSHNLESLLRSPPDKWLTNARITQYQVLLLDPPRVRFKQTAALNPATLLPETDDTLPIHHCLDTLDSLTSTRPDLTDQPLAQAEATLFTDGSSYIRDGKRYAGAAVVTLDSVIWAEPLPIGTSAQKAELIALTKALEWSKDKSVNIYTDSRYAFATLHVHGMIYRERGWLTAGGKAIKNAPEILALLTAVWLPKRVAVMHCKGHQKDDAPTSTGNRRADEVAREVAIRPLSTQATISAGKRTADGSEFEKRTADGSEFESPKKKAKVE

SEQ ID NO: 6734 - protein, 2092 aa, synthetic construct
MPAAKRVKLDGGDKKYSIGLDIGTNSVGWAVITDEYKVPSKKFKVLGNTDRHSIKKNLIGALLFDSGETAEATRLKRTARRRYTRRKNRICYLQEIFSNEMAKVDDSFFHRLEESFLVEEDKKHERHPIFGNIVDEVAYHEKYPTIYHLRKKLVDSTDKADLRLIYLALAHMIKFRGHFLIEGDLNPDNSDVDKLFIQLVQTYNQLFEENPINASGVDAKAILSARLSKSRRLENLIAQLPGEKKNGLFGNLIALSLGLTPNFKSNFDLAEDAKLQLSKDTYDDDLDNLLAQIGDQYADLFLAAKNLSDAILLSDILRVNTEITKAPLSASMIKRYDEHHQDLTLLKALVRQQLPEKYKEIFFDQSKNGYAGYIDGGASQEEFYKFIKPILEKMDGTEELLVKLNREDLLRKQRTFDNGSIPHQIHLGELHAILRRQEDFYPFLKDNREKIEKILTFRIPYYVGPLARGNSRFAWMTRKSEETITPWNFEEVVDKGASAQSFIERMTNFDKNLPNEKVLPKHSLLYEYFTVYNELTKVKYVTEGMRKPAFLSGEQKKAIVDLLFKTNRKVTVKQLKEDYFKKIECFDSVEISGVEDRFNASLGTYHDLLKIIKDKDFLDNEENEDILEDIVLTLTLFEDREMIEERLKTYAHLFDDKVMKQLKRRRYTGWGRLSRKLINGIRDKQSGKTILDFLKSDGFANRNFMQLIHDDSLTFKEDIQKAQVSGQGDSLHEHIANLAGSPAIKKGILQTVKVVDELVKVMGRHKPENIVIEMARENQTTQKGQKNSRERMKRIEEGIKELGSQILKEHPVENTQLQNEKLYLYYLQNGRDMYVDQELDINRLSDYDVDHIVPQSFLKDDSIDNKVLTRSDKARGKSDNVPSEEVVKKMKNYWRQLLNAKLITQRKFDNLTKAERGGLSELDKAGFIKRQLVETRQITKHVAQILDSRMNTKYDENDKLIREVKVITLKSKLVSDFRKDFQFYKVREINNYHHAHDAYLNAVVGTALIKKYPKLESEFVYGDYKVYDVRKMIAKSEQEIGKATAKYFFYSNIMNFFKTEITLANGEIRKRPLIETNGETGEIVWDKGRDFATVRKVLSMPQVNIVKKTEVQTGGFSKESILPKRNSDKLIARKKDWDPKKYGGFDSPTVAYSVLVVAKVEKGKSKKLKSVKELLGITIMERSSFEKNPIDFLEAKGYKEVKKDLIIKLPKYSLFELENGRKRMLASAGELQKGNELALPSKYVNFLYLASHYEKLKGSPEDNEQKQLFVEQHKHYLDEIIEQISEFSKRVILADANLDKVLSAYNKHRDKPIREQAENIIHLFTLTNLGAPAAFKYFDTTIDRKRYTSTKEVLDATLIHQSITGLYETRIDLSQLGGDGGEAAAKGSSGGTLQLEEEYRLFEPESTQKQEMDIWLKNFPQAWAETGGMGTAHCQAPVLIQLKATATPISIRQYPMPHEAYQGIKPHIRRMLDQGILKPCQSPWNTPLLPVKKPGTEDYRPVQDLREVNKRVEDIHPTVPNPYNLLSTLPPSHPWYTVLDLKDAFFCLRLHSESQLLFAFEWRDPEIGLSGQLTWTRLPQGFKNSPTLFNEALHSDLADFRVRYPALVLLQYVDDLLLAAATRTECLEGTKALLETLGNKGYRASAKKAQICLQEVTYLGYSLKDGQRWLTKARKEAILSIPVPKNSRQVREFLGKAGYCRLFIPGFAELAAPLYPLTRPGTLFQWGTEQQLAFEDIKKALLSSPALGLPDITKPFELFIDENSGFAKGVLVQKLGPWKRPVAYLSKKLDTVASGWPPCLRMVAAIAILVKDAGKLTLGQPLTILTSHPVEALVRQPPNKWLSNARMTHYQAMLLDAERVHFGPTVSLNPATLLPLPSGGNHHDCLQILAETHGTRPDLTDQPLPDADLTWYTDGSSFIRNGEREAGAAVTTESEVIWAAPLPPGTSAQRAELIALTQALKMAEGKKLTVYTDSRYAFATTHVHGEIYRRRGWLTSEGKEIKNKNEILALLEALFLPKRLSIIHCPGHQKGDSPQAKGNRLADDTAKKAATETHSSLTVLPAGKRTADGSEFEKRTADGSEFESPKKKAKVE

SEQ ID NO: 6735 - protein, 2091 aa, synthetic construct
MPAAKRVKLDGGDKKYSIGLDIGTNSVGWAVITDEYKVPSKKFKVLGNTDRHSIKKNLIGALLFDSGETAEATRLKRTARRRYTRRKNRICYLQEIFSNEMAKVDDSFFHRLEESFLVEEDKKHERHPIFGNIVDEVAYHEKYPTIYHLRKKLVDSTDKADLRLIYLALAHMIKFRGHFLIEGDLNPDNSDVDKLFIQLVQTYNQLFEENPINASGVDAKAILSARLSKSRRLENLIAQLPGEKKNGLFGNLIALSLGLTPNFKSNFDLAEDAKLQLSKDTYDDDLDNLLAQIGDQYADLFLAAKNLSDAILLSDILRVNTEITKAPLSASMIKRYDEHHQDLTLLKALVRQQLPEKYKEIFFDQSKNGYAGYIDGGASQEEFYKFIKPILEKMDGTEELLVKLNREDLLRKQRTFDNGSIPHQIHLGELHAILRRQEDFYPFLKDNREKIEKILTFRIPYYVGPLARGNSRFAWMTRKSEETITPWNFEEVVDKGASAQSFIERMTNFDKNLPNEKVLPKHSLLYEYFTVYNELTKVKYVTEGMRKPAFLSGEQKKAIVDLLFKTNRKVTVKQLKEDYFKKIECFDSVEISGVEDRFNASLGTYHDLLKIIKDKDFLDNEENEDILEDIVLTLTLFEDREMIEERLKTYAHLFDDKVMKQLKRRRYTGWGRLSRKLINGIRDKQSGKTILDFLKSDGFANRNFMQLIHDDSLTFKEDIQKAQVSGQGDSLHEHIANLAGSPAIKKGILQTVKVVDELVKVMGRHKPENIVIEMARENQTTQKGQKNSRERMKRIEEGIKELGSQILKEHPVENTQLQNEKLYLYYLQNGRDMYVDQELDINRLSDYDVDHIVPQSFLKDDSIDNKVLTRSDKARGKSDNVPSEEVVKKMKNYWRQLLNAKLITQRKFDNLTKAERGGLSELDKAGFIKRQLVETRQITKHVAQILDSRMNTKYDENDKLIREVKVITLKSKLVSDFRKDFQFYKVREINNYHHAHDAYLNAVVGTALIKKYPKLESEFVYGDYKVYDVRKMIAKSEQEIGKATAKYFFYSNIMNFFKTEITLANGEIRKRPLIETNGETGEIVWDKGRDFATVRKVLSMPQVNIVKKTEVQTGGFSKESILPKRNSDKLIARKKDWDPKKYGGFDSPTVAYSVLVVAKVEKGKSKKLKSVKELLGITIMERSSFEKNPIDFLEAKGYKEVKKDLIIKLPKYSLFELENGRKRMLASAGELQKGNELALPSKYVNFLYLASHYEKLKGSPEDNEQKQLFVEQHKHYLDEIIEQISEFSKRVILADANLDKVLSAYNKHRDKPIREQAENIIHLFTLTNLGAPAAFKYFDTTIDRKRYTSTKEVLDATLIHQSITGLYETRIDLSQLGGDGGEAAAKGSSGGVLNLEEEYRLHEKPVPSSIDPSWLQLFPTVWAERAGMGLANQVPPVVVELRSGASPVAVRQYPMSKEAREGIRPHIQKFLDLGVLVPCRSPWNTPLLPVKKPGTNDYRPVQDLREINKRVQDIHPTVPNPYNLLSSLPPSYTWYSVLDLKDAFFCLRLHPNSQPLFAFEWKDPEKGNTGQLTWTRLPQGFKNSPTLFNEALHRDLAPFRALNPQVVLLQYVDDLLVAAPTYEDCKKGTQKLLQELSKLGYRVSAKKAQLCQREVTYLGYLLKEGKRWLTPARKATVMKIPVPTTPRQVREFLGKAGFCRLFIPGFASLAAPLYPLTKPSIPFIWTEEHQQAFDHIKKALLSAPALALPDLTKPFTLYIDERAGVARGVLTQTLGPWRRPVAYLSKKLDPVASGWPTCLKAVAAVALLLKDADKLTLGQNVTVIASHSLESIVRQPPDRWMTNARMTHYQSLLLNERVSFAPPAVLNPATLLPVESEATPVHRCSEILAEETGTRRDLEDQPLPGVPTWYTDGSSFITEGKRRAGAPIVDGKRTVWASSLPEGTSAQKAELVALTQALRLAEGKNINIYTDSRYAFATAHIHGAIYKQRGWLTSAGKDIKNKEEILALLEAIHLPRRVAIIHCPGHQRGSNPVATGNRRADEAAKQAALSTRVLAGTTKPAGKRTADGSEFEKRTADGSEFESPKKKAKVE

SEQ ID NO: 6736 - protein, 2215 aa, synthetic construct
MPAAKRVKLDGGDKKYSIGLDIGTNSVGWAVITDEYKVPSKKFKVLGNTDRHSIKKNLIGALLFDSGETAEATRLKRTARRRYTRRKNRICYLQEIFSNEMAKVDDSFFHRLEESFLVEEDKKHERHPIFGNIVDEVAYHEKYPTIYHLRKKLVDSTDKADLRLIYLALAHMIKFRGHFLIEGDLNPDNSDVDKLFIQLVQTYNQLFEENPINASGVDAKAILSARLSKSRRLENLIAQLPGEKKNGLFGNLIALSLGLTPNFKSNFDLAEDAKLQLSKDTYDDDLDNLLAQIGDQYADLFLAAKNLSDAILLSDILRVNTEITKAPLSASMIKRYDEHHQDLTLLKALVRQQLPEKYKEIFFDQSKNGYAGYIDGGASQEEFYKFIKPILEKMDGTEELLVKLNREDLLRKQRTFDNGSIPHQIHLGELHAILRRQEDFYPFLKDNREKIEKILTFRIPYYVGPLARGNSRFAWMTRKSEETITPWNFEEVVDKGASAQSFIERMTNFDKNLPNEKVLPKHSLLYEYFTVYNELTKVKYVTEGMRKPAFLSGEQKKAIVDLLFKTNRKVTVKQLKEDYFKKIECFDSVEISGVEDRFNASLGTYHDLLKIIKDKDFLDNEENEDILEDIVLTLTLFEDREMIEERLKTYAHLFDDKVMKQLKRRRYTGWGRLSRKLINGIRDKQSGKTILDFLKSDGFANRNFMQLIHDDSLTFKEDIQKAQVSGQGDSLHEHIANLAGSPAIKKGILQTVKVVDELVKVMGRHKPENIVIEMARENQTTQKGQKNSRERMKRIEEGIKELGSQILKEHPVENTQLQNEKLYLYYLQNGRDMYVDQELDINRLSDYDVDHIVPQSFLKDDSIDNKVLTRSDKARGKSDNVPSEEVVKKMKNYWRQLLNAKLITQRKFDNLTKAERGGLSELDKAGFIKRQLVETRQITKHVAQILDSRMNTKYDENDKLIREVKVITLKSKLVSDFRKDFQFYKVREINNYHHAHDAYLNAVVGTALIKKYPKLESEFVYGDYKVYDVRKMIAKSEQEIGKATAKYFFYSNIMNFFKTEITLANGEIRKRPLIETNGETGEIVWDKGRDFATVRKVLSMPQVNIVKKTEVQTGGFSKESILPKRNSDKLIARKKDWDPKKYGGFDSPTVAYSVLVVAKVEKGKSKKLKSVKELLGITIMERSSFEKNPIDFLEAKGYKEVKKDLIIKLPKYSLFELENGRKRMLASAGELQKGNELALPSKYVNFLYLASHYEKLKGSPEDNEQKQLFVEQHKHYLDEIIEQISEFSKRVILADANLDKVLSAYNKHRDKPIREQAENIIHLFTLTNLGAPAAFKYFDTTIDRKRYTSTKEVLDATLIHQSITGLYETRIDLSQLGGDGGEAAAKGSSGGTLGDQGSRGSDPLPEPRVTLTVEGIPTEFLVNTGAEHSVLTKPMGKMGSKRTVVAGATGSKVYPWTTKRLLKIGQKQVTHSFLVIPECPAPLLGRDLLTKLKAQIQFSTEGPQVTWEDRPAMCLVLNLEEEYRLHEKPVPPSIDPSWLQLFPMVWAEKAGMGLANQVPPVVVELKSDASPVAVRQYPMSKEAREGIRPHIQRFLDLGILVPCQSPWNTPLLPVKKPGTNDYRPVQDLREVNKRVQDIHPTVPNPYNLLSSLPPSHTWYSVLDLKDAFFCLKLHPNSQPLFAFEWRDPEKGNTGQLTWTRLPQGFKNSPTLFNEALHRDLASFRALNPQVVMLQYVDDLLVAAPTYRDCKEGTRRLLQELSKLGYRVSAKKAQLCREEVTYLGYLLKGGKRWLTPARKATVMKIPTPTTPRQVREFLGKAGFCRLFIPGFASLAAPLYPLTRPKVPFTWTEAHQEAFGRIKEALLSAPALALPDLTKPFALYVDEKEGVARGVLTQTLGPWRRPVAYLSKKLDPVASGWPTCLKAIAAVALLLKDADKLTLGQNVLVIAPHNLESIVRQPPDRWMTNARMTHYQSLLLNERVSFAPPAILNPATLLPVESDDTPIHICSEILAEETGTRPDLRDQPLPGVPAWYTDGSSFIMDGRRQAGAAIVDNKRTVWASNLPEGTSAQKAELIALTQALRLAEGKSINIYTDSRYAFATAHVHGAIYKQRGWLTSAGKDIKNKEEILALLEAIHLPKRVAIIHCPGHQRGTDPVATGNRKADEAAKQAAQSTRILTETTKNAGKRTADGSEFEKRTADGSEFESPKKKAKVE

SEQ ID NO: 6737 - protein, 2093 aa, synthetic construct
MPAAKRVKLDGGDKKYSIGLDIGTNSVGWAVITDEYKVPSKKFKVLGNTDRHSIKKNLIGALLFDSGETAEATRLKRTARRRYTRRKNRICYLQEIFSNEMAKVDDSFFHRLEESFLVEEDKKHERHPIFGNIVDEVAYHEKYPTIYHLRKKLVDSTDKADLRLIYLALAHMIKFRGHFLIEGDLNPDNSDVDKLFIQLVQTYNQLFEENPINASGVDAKAILSARLSKSRRLENLIAQLPGEKKNGLFGNLIALSLGLTPNFKSNFDLAEDAKLQLSKDTYDDDLDNLLAQIGDQYADLFLAAKNLSDAILLSDILRVNTEITKAPLSASMIKRYDEHHQDLTLLKALVRQQLPEKYKEIFFDQSKNGYAGYIDGGASQEEFYKFIKPILEKMDGTEELLVKLNREDLLRKQRTFDNGSIPHQIHLGELHAILRRQEDFYPFLKDNREKIEKILTFRIPYYVGPLARGNSRFAWMTRKSEETITPWNFEEVVDKGASAQSFIERMTNFDKNLPNEKVLPKHSLLYEYFTVYNELTKVKYVTEGMRKPAFLSGEQKKAIVDLLFKTNRKVTVKQLKEDYFKKIECFDSVEISGVEDRFNASLGTYHDLLKIIKDKDFLDNEENEDILEDIVLTLTLFEDREMIEERLKTYAHLFDDKVMKQLKRRRYTGWGRLSRKLINGIRDKQSGKTILDFLKSDGFANRNFMQLIHDDSLTFKEDIQKAQVSGQGDSLHEHIANLAGSPAIKKGILQTVKVVDELVKVMGRHKPENIVIEMARENQTTQKGQKNSRERMKRIEEGIKELGSQILKEHPVENTQLQNEKLYLYYLQNGRDMYVDQELDINRLSDYDVDHIVPQSFLKDDSIDNKVLTRSDKARGKSDNVPSEEVVKKMKNYWRQLLNAKLITQRKFDNLTKAERGGLSELDKAGFIKRQLVETRQITKHVAQILDSRMNTKYDENDKLIREVKVITLKSKLVSDFRKDFQFYKVREINNYHHAHDAYLNAVVGTALIKKYPKLESEFVYGDYKVYDVRKMIAKSEQEIGKATAKYFFYSNIMNFFKTEITLANGEIRKRPLIETNGETGEIVWDKGRDFATVRKVLSMPQVNIVKKTEVQTGGFSKESILPKRNSDKLIARKKDWDPKKYGGFDSPTVAYSVLVVAKVEKGKSKKLKSVKELLGITIMERSSFEKNPIDFLEAKGYKEVKKDLIIKLPKYSLFELENGRKRMLASAGELQKGNELALPSKYVNFLYLASHYEKLKGSPEDNEQKQLFVEQHKHYLDEIIEQISEFSKRVILADANLDKVLSAYNKHRDKPIREQAENIIHLFTLTNLGAPAAFKYFDTTIDRKRYTSTKEVLDATLIHQSITGLYETRIDLSQLGGDGGEAAAKGSSGGTLNLEDEYRLYETSAEPEVSPGSTWLSDFPQAWAETGGMGLAVRQAPLIIPLKATSTPVSIKQYPMSQEAKLGIKPHIQRLLDQGILVPCQSPWNTPLLPVKKPGTNDYRPVQDLREVNKRVEDIHPTVPNPYNLLSGLPPSHRWYTVLDLKDAFFCLRLHPTSQPLFAFEWRDPGMGISGQLTWTRLPQGFKNSPTLFNEALHRDLADFRIQHPDLILLQYVDDILLAATSELDCQQGTRALLLTLGNLGYRASAKKAQLCQKQVKYLGYLLKEGQRWLTEARKETVMGQPTPKTPRQLREFLGTAGFCRLWIPGFAEMAAPLYPLTKPGTLFNWGPDQQKAYQEIKQALLTAPALGLPDLTKPFELFVDEKQGYAKGVLTQKLGPWRRPVAYLSKKLDPVAAGWPPCLRMVAAIAVLRKDAGKLTMGQPLVILAPHAVEALVKQPPDRWLSNARMTHYQAMLLDTDRVQFGPVVALNPATLLPLPEEGAPHDCLEILAETHGTRPDLTDQPIPDADHTWYTDGSSFLQEGQRKAGAAVTTETEVIWARALPAGTSAQRAELIALTQALKMAEGKRLNVYTDSRYAFATAHIHGEIYRRRGWLTSEGREIKNKSEILALLKALFLPKRLSIIHCLGHQKGDSAEARGNRLADQAAREAAIKTPPDTSTLLAGKRTADGSEFEKRTADGSEFESPKKKAKVE

SEQ ID NO: 6738 - protein, 2093 aa, synthetic construct; identical to SEQ ID NO: 4512

SEQ ID NO: 6739 - protein, 2093 aa, synthetic construct
MPAAKRVKLDGGDKKYSIGLDIGTNSVGWAVITDEYKVPSKKFKVLGNTDRHSIKKNLIGALLFDSGETAEATRLKRTARRRYTRRKNRICYLQEIFSNEMAKVDDSFFHRLEESFLVEEDKKHERHPIFGNIVDEVAYHEKYPTIYHLRKKLVDSTDKADLRLIYLALAHMIKFRGHFLIEGDLNPDNSDVDKLFIQLVQTYNQLFEENPINASGVDAKAILSARLSKSRRLENLIAQLPGEKKNGLFGNLIALSLGLTPNFKSNFDLAEDAKLQLSKDTYDDDLDNLLAQIGDQYADLFLAAKNLSDAILLSDILRVNTEITKAPLSASMIKRYDEHHQDLTLLKALVRQQLPEKYKEIFFDQSKNGYAGYIDGGASQEEFYKFIKPILEKMDGTEELLVKLNREDLLRKQRTFDNGSIPHQIHLGELHAILRRQEDFYPFLKDNREKIEKILTFRIPYYVGPLARGNSRFAWMTRKSEETITPWNFEEVVDKGASAQSFIERMTNFDKNLPNEKVLPKHSLLYEYFTVYNELTKVKYVTEGMRKPAFLSGEQKKAIVDLLFKTNRKVTVKQLKEDYFKKIECFDSVEISGVEDRFNASLGTYHDLLKIIKDKDFLDNEENEDILEDIVLTLTLFEDREMIEERLKTYAHLFDDKVMKQLKRRRYTGWGRLSRKLINGIRDKQSGKTILDFLKSDGFANRNFMQLIHDDSLTFKEDIQKAQVSGQGDSLHEHIANLAGSPAIKKGILQTVKVVDELVKVMGRHKPENIVIEMARENQTTQKGQKNSRERMKRIEEGIKELGSQILKEHPVENTQLQNEKLYLYYLQNGRDMYVDQELDINRLSDYDVDHIVPQSFLKDDSIDNKVLTRSDKARGKSDNVPSEEVVKKMKNYWRQLLNAKLITQRKFDNLTKAERGGLSELDKAGFIKRQLVETRQITKHVAQILDSRMNTKYDENDKLIREVKVITLKSKLVSDFRKDFQFYKVREINNYHHAHDAYLNAVVGTALIKKYPKLESEFVYGDYKVYDVRKMIAKSEQEIGKATAKYFFYSNIMNFFKTEITLANGEIRKRPLIETNGETGEIVWDKGRDFATVRKVLSMPQVNIVKKTEVQTGGFSKESILPKRNSDKLIARKKDWDPKKYGGFDSPTVAYSVLVVAKVEKGKSKKLKSVKELLGITIMERSSFEKNPIDFLEAKGYKEVKKDLIIKLPKYSLFELENGRKRMLASAGELQKGNELALPSKYVNFLYLASHYEKLKGSPEDNEQKQLFVEQHKHYLDEIIEQISEFSKRVILADANLDKVLSAYNKHRDKPIREQAENIIHLFTLTNLGAPAAFKYFDTTIDRKRYTSTKEVLDATLIHQSITGLYETRIDLSQLGGDGGEAAAKGSSGGTLGIEDEYRLHETSTEPDVSLGSTWLSDFPQAWAETGGMGLAVRQAPLIIPLKATSTPVSIQQYPMSHEARLGIKPHIQRLLDQGILVPCQSPWNTPLLPVKKPGTNDYRPVQDLREVNKRVEDIHPTVPNPYNLLSGLPPSHQWYTVLDLKDAFFCLRLHPTSQPLFAFEWRDPGMGISGQLTWTRLPQGFKNSPTLFDEALHRDLADFRIQHPDLILLQYVDDILLAATSELDCQQGTRALLQTLGDLGYRASAKKAQICQKQVKYLGYLLREGQRWLTEARKETVMGQPVPKTPRQLREFLGTAGFCRLWIPGFAEMAAPLYPLTKTGTLFSWGPDQQKAYQEIKQALLTAPALGLPDLTKPFELFVDEKQGYAKGVLTQKLGPWRRPVAYLSKKLDPVAAGWPPCLRMVAAIAVLTKDAGKLTMGQPLVILAPHAVEALVKQPPDRWLSNARMTHYQAMLLDTDRVQFGPVVALNPATLLPLPEEGAPHDCLEILAETHGTRPDLTDQPIPDADHTWYTDGSSFLQEGQRKAGAAVTTETEVIWAGALPAGTSAQRAELIALTQALKMAEGKRLNVYTDSRYAFATAHIHGEIYRRRGLLTSEGREIKNKSEILALLKALFLPKRLSIIHCLGHQKGDSAEARGNRLADQAAREAAIKTPPDTSTLLAGKRTADGSEFEKRTADGSEFESPKKKAKVE

SEQ ID NO: 6740 - protein, 2093 aa, synthetic construct
MPAAKRVKLDGGDKKYSIGLDIGTNSVGWAVITDEYKVPSKKFKVLGNTDRHSIKKNLIGALLFDSGETAEATRLKRTARRRYTRRKNRICYLQEIFSNEMAKVDDSFFHRLEESFLVEEDKKHERHPIFGNIVDEVAYHEKYPTIYHLRKKLVDSTDKADLRLIYLALAHMIKFRGHFLIEGDLNPDNSDVDKLFIQLVQTYNQLFEENPINASGVDAKAILSARLSKSRRLENLIAQLPGEKKNGLFGNLIALSLGLTPNFKSNFDLAEDAKLQLSKDTYDDDLDNLLAQIGDQYADLFLAAKNLSDAILLSDILRVNTEITKAPLSASMIKRYDEHHQDLTLLKALVRQQLPEKYKEIFFDQSKNGYAGYIDGGASQEEFYKFIKPILEKMDGTEELLVKLNREDLLRKQRTFDNGSIPHQIHLGELHAILRRQEDFYPFLKDNREKIEKILTFRIPYYVGPLARGNSRFAWMTRKSEETITPWNFEEVVDKGASAQSFIERMTNFDKNLPNEKVLPKHSLLYEYFTVYNELTKVKYVTEGMRKPAFLSGEQKKAIVDLLFKTNRKVTVKQLKEDYFKKIECFDSVEISGVEDRFNASLGTYHDLLKIIKDKDFLDNEENEDILEDIVLTLTLFEDREMIEERLKTYAHLFDDKVMKQLKRRRYTGWGRLSRKLINGIRDKQSGKTILDFLKSDGFANRNFMQLIHDDSLTFKEDIQKAQVSGQGDSLHEHIANLAGSPAIKKGILQTVKVVDELVKVMGRHKPENIVIEMARENQTTQKGQKNSRERMKRIEEGIKELGSQILKEHPVENTQLQNEKLYLYYLQNGRDMYVDQELDINRLSDYDVDHIVPQSFLKDDSIDNKVLTRSDKARGKSDNVPSEEVVKKMKNYWRQLLNAKLITQRKFDNLTKAERGGLSELDKAGFIKRQLVETRQITKHVAQILDSRMNTKYDENDKLIREVKVITLKSKLVSDFRKDFQFYKVREINNYHHAHDAYLNAVVGTALIKKYPKLESEFVYGDYKVYDVRKMIAKSEQEIGKATAKYFFYSNIMNFFKTEITLANGEIRKRPLIETNGETGEIVWDKGRDFATVRKVLSMPQVNIVKKTEVQTGGFSKESILPKRNSDKLIARKKDWDPKKYGGFDSPTVAYSVLVVAKVEKGKSKKLKSVKELLGITIMERSSFEKNPIDFLEAKGYKEVKKDLIIKLPKYSLFELENGRKRMLASAGELQKGNELALPSKYVNFLYLASHYEKLKGSPEDNEQKQLFVEQHKHYLDEIIEQISEFSKRVILADANLDKVLSAYNKHRDKPIREQAENIIHLFTLTNLGAPAAFKYFDTTIDRKRYTSTKEVLDATLIHQSITGLYETRIDLSQLGGDGGEAAAKGSSGGTLNIEDEYRLHEISTEPDVSPGSTWLSDFPQAWAETGGMGLAVRQAPLIIPLKATSTPVSIKQYPMSQEAKLGIKPHIQRLLDQGILVPCQSPWNTPLLPVKKPGTNDYRPVQGLREVNKRVEDIHPTVPNPYNLLSGLPTSHRWYTVLDLKDAFFCLRLHPTSQPLFASEWRDPGMGISGQLTWTRLPQGFKNSPTLFNEALHRGLADFRIQHPDLILLQYVDDLLLAATSELDCQQGTRALLKTLGNLGYRASAKKAQICQKQVKYLGYLLREGQRWLTEARKETVMGQPTPKTPRQLREFLGTAGFCRLWIPRFAEMAAPLYPLTKPGTLFNWGPDQQKAYHEIKQALLTAPALGLPDLTKPFELFVDEKQGYAKGVLTQKLGPWRRPVAYLSKKLDPVAAGWPPCLRMVAAIAVLTKDAGKLTMGQPLVILAPHAVEALVKQPPDRWLSNARMTHYQAMLLDTDRVQFGPVVALNPATLLPLPEEGAPHDCLEILAETHGTEPDLTDQPIPDADHTWYTDGSSFLQEGQRKAGAAVTTETEVIWARALPAGTSAQRAELIALTQALKMAEGKRLNVYTDSRYAFATAHIHGEIYKRRGWLTSEGREIKNKSEILALLKALFLPKRLSIIHCLGHQKGDSAEARGNRLADQAAREAAIKTPPDTSTLLAGKRTADGSEFEKRTADGSEFESPKKKAKVE

SEQ ID NO: 6741 - protein, 2087 aa, synthetic construct
MPAAKRVKLDGGDKKYSIGLDIGTNSVGWAVITDEYKVPSKKFKVLGNTDRHSIKKNLIGALLFDSGETAEATRLKRTARRRYTRRKNRICYLQEIFSNEMAKVDDSFFHRLEESFLVEEDKKHERHPIFGNIVDEVAYHEKYPTIYHLRKKLVDSTDKADLRLIYLALAHMIKFRGHFLIEGDLNPDNSDVDKLFIQLVQTYNQLFEENPINASGVDAKAILSARLSKSRRLENLIAQLPGEKKNGLFGNLIALSLGLTPNFKSNFDLAEDAKLQLSKDTYDDDLDNLLAQIGDQYADLFLAAKNLSDAILLSDILRVNTEITKAPLSASMIKRYDEHHQDLTLLKALVRQQLPEKYKEIFFDQSKNGYAGYIDGGASQEEFYKFIKPILEKMDGTEELLVKLNREDLLRKQRTFDNGSIPHQIHLGELHAILRRQEDFYPFLKDNREKIEKILTFRIPYYVGPLARGNSRFAWMTRKSEETITPWNFEEVVDKGASAQSFIERMTNFDKNLPNEKVLPKHSLLYEYFTVYNELTKVKYVTEGMRKPAFLSGEQKKAIVDLLFKTNRKVTVKQLKEDYFKKIECFDSVEISGVEDRFNASLGTYHDLLKIIKDKDFLDNEENEDILEDIVLTLTLFEDREMIEERLKTYAHLFDDKVMKQLKRRRYTGWGRLSRKLINGIRDKQSGKTILDFLKSDGFANRNFMQLIHDDSLTFKEDIQKAQVSGQGDSLHEHIANLAGSPAIKKGILQTVKVVDELVKVMGRHKPENIVIEMARENQTTQKGQKNSRERMKRIEEGIKELGSQILKEHPVENTQLQNEKLYLYYLQNGRDMYVDQELDINRLSDYDVDHIVPQSFLKDDSIDNKVLTRSDKARGKSDNVPSEEVVKKMKNYWRQLLNAKLITQRKFDNLTKAERGGLSELDKAGFIKRQLVETRQITKHVAQILDSRMNTKYDENDKLIREVKVITLKSKLVSDFRKDFQFYKVREINNYHHAHDAYLNAVVGTALIKKYPKLESEFVYGDYKVYDVRKMIAKSEQEIGKATAKYFFYSNIMNFFKTEITLANGEIRKRPLIETNGETGEIVWDKGRDFATVRKVLSMPQVNIVKKTEVQTGGFSKESILPKRNSDKLIARKKDWDPKKYGGFDSPTVAYSVLVVAKVEKGKSKKLKSVKELLGITIMERSSFEKNPIDFLEAKGYKEVKKDLIIKLPKYSLFELENGRKRMLASAGELQKGNELALPSKYVNFLYLASHYEKLKGSPEDNEQKQLFVEQHKHYLDEIIEQISEFSKRVILADANLDKVLSAYNKHRDKPIREQAENIIHLFTLTNLGAPAAFKYFDTTIDRKRYTSTKEVLDATLIHQSITGLYETRIDLSQLGGDGGEAAAKGSSGGTLQLDDEYRLYSPLVKPDQNIQFWLEQFPQAWAETAGMGLAKQVPPQVIQLKASATPVSVRQYPLSKEAQEGIRPHVQRLIQQGILVPVQSPWNTPLLPVRKPGTNDYRPVQDLREVNKRVQDIHPTVPNPYNLLCALPPQRSWYTVLDLKDAFFCLRLHPTSQPLFAFEWRDPGTGRTGQLTWTRLPQGFKNSPTIFDEALHRDLANFRIQHPQVTLLQYVDDLLLAGATKQDCLEGTKALLLELSDLGYRASAKKAQICRREVTYLGYSLRDGQRWLTEARKKTVVQIPAPTTAKQVREFLGTAGFCRLWIPGFATLAAPLYPLTKEKGEFSWAPEHQKAFDAIKKALLSAPALALPDVTKPFTLYVDERKGVARGVLTQTLGPWRRPVAYLSKKLDPVASGWPVCLKAIAAVAILVKDADKLTLGQNITVIAPHALENIVRQPPDRWMTNARMTHYQSLLLTERVTFAPPAALNPATLLPEETDEPVTHDCHQLLIEETGVRKDLTDIPLTGEVLTWFTDGSSYVVEGKRMAGAAVVDGTRTIWASSLPEGTSAQKAELMALTQALRLAEGKSINIYTDSRYAFATAHVHGAIYKQRGLLTSAGREIKNKEEILSLLEALHLPKRLAIIHCPGHQKAKDPISRGNQMADRVAKQAAQGVNLLAGKRTADGSEFEKRTADGSEFESPKKKAKVE

SEQ ID NO: 6742 - protein, 2014 aa, synthetic construct
MPAAKRVKLDGGDKKYSIGLDIGTNSVGWAVITDEYKVPSKKFKVLGNTDRHSIKKNLIGALLFDSGETAEATRLKRTARRRYTRRKNRICYLQEIFSNEMAKVDDSFFHRLEESFLVEEDKKHERHPIFGNIVDEVAYHEKYPTIYHLRKKLVDSTDKADLRLIYLALAHMIKFRGHFLIEGDLNPDNSDVDKLFIQLVQTYNQLFEENPINASGVDAKAILSARLSKSRRLENLIAQLPGEKKNGLFGNLIALSLGLTPNFKSNFDLAEDAKLQLSKDTYDDDLDNLLAQIGDQYADLFLAAKNLSDAILLSDILRVNTEITKAPLSASMIKRYDEHHQDLTLLKALVRQQLPEKYKEIFFDQSKNGYAGYIDGGASQEEFYKFIKPILEKMDGTEELLVKLNREDLLRKQRTFDNGSIPHQIHLGELHAILRRQEDFYPFLKDNREKIEKILTFRIPYYVGPLARGNSRFAWMTRKSEETITPWNFEEVVDKGASAQSFIERMTNFDKNLPNEKVLPKHSLLYEYFTVYNELTKVKYVTEGMRKPAFLSGEQKKAIVDLLFKTNRKVTVKQLKEDYFKKIECFDSVEISGVEDRFNASLGTYHDLLKIIKDKDFLDNEENEDILEDIVLTLTLFEDREMIEERLKTYAHLFDDKVMKQLKRRRYTGWGRLSRKLINGIRDKQSGKTILDFLKSDGFANRNFMQLIHDDSLTFKEDIQKAQVSGQGDSLHEHIANLAGSPAIKKGILQTVKVVDELVKVMGRHKPENIVIEMARENQTTQKGQKNSRERMKRIEEGIKELGSQILKEHPVENTQLQNEKLYLYYLQNGRDMYVDQELDINRLSDYDVDHIVPQSFLKDDSIDNKVLTRSDKARGKSDNVPSEEVVKKMKNYWRQLLNAKLITQRKFDNLTKAERGGLSELDKAGFIKRQLVETRQITKHVAQILDSRMNTKYDENDKLIREVKVITLKSKLVSDFRKDFQFYKVREINNYHHAHDAYLNAVVGTALIKKYPKLESEFVYGDYKVYDVRKMIAKSEQEIGKATAKYFFYSNIMNFFKTEITLANGEIRKRPLIETNGETGEIVWDKGRDFATVRKVLSMPQVNIVKKTEVQTGGFSKESILPKRNSDKLIARKKDWDPKKYGGFDSPTVAYSVLVVAKVEKGKSKKLKSVKELLGITIMERSSFEKNPIDFLEAKGYKEVKKDLIIKLPKYSLFELENGRKRMLASAGELQKGNELALPSKYVNFLYLASHYEKLKGSPEDNEQKQLFVEQHKHYLDEIIEQISEFSKRVILADANLDKVLSAYNKHRDKPIREQAENIIHLFTLTNLGAPAAFKYFDTTIDRKRYTSTKEVLDATLIHQSITGLYETRIDLSQLGGDGGEAAAKGSSGGPRSRAIDIPVPHADKISWKITDPVWVDQWPLTYEKTLAAIALVQEQLAAGHIEPTNSPWNTPIFIIKKKSGSWRLLQDLRAVNKVMVPMGALQPGLPSPVAPPLNYHKIVIDLKDCFFTIPLHPEDRPYFAFSVPQINFQSPMPRYQWKVLPQGMANSPTLCQKFVAAAIAPVRSQWPEAYILHYMDDILLACDSAEAAKACYAHIISCLTSYGLKIAPDKVQVSEPFSYLGFELHHQQVFTPRVCLKTDHLKTLNDFQKLLGDIQWLRPYLKLPTSALVPLNNILKPDPNPLSVRALTPEAKQSLALINKAIQNQSVQQISYNLPLVLLLLPTPHTPTAVFWQPNGTDPTKNGSPLLWLHLPASPSKVLLTYPSLLAMLIIKGRYTGRQLFGRDPHSIIIPYTQDQLTWLLQTSDEWAIALSSFTGDIDNHYPSDPVIQFAKLHQFIFPKITKCAPIPQATLVFTDGSSNGIAAYVIDNQPISIKSPYLSAQLVELYAILQVFTVLAHQPFNLYTDSAYIAQSVPLLETVPFIKSSTNATPLFSKLQQLILNRQHPFFIGHLRAHLNLPGPLAEGNALADAATQIFPIISDAGKRTADGSEFEKRTADGSEFESPKKKAKVE

SEQ ID NO: 6743 - protein, 2072 aa, synthetic construct
MPAAKRVKLDGGDKKYSIGLDIGTNSVGWAVITDEYKVPSKKFKVLGNTDRHSIKKNLIGALLFDSGETAEATRLKRTARRRYTRRKNRICYLQEIFSNEMAKVDDSFFHRLEESFLVEEDKKHERHPIFGNIVDEVAYHEKYPTIYHLRKKLVDSTDKADLRLIYLALAHMIKFRGHFLIEGDLNPDNSDVDKLFIQLVQTYNQLFEENPINASGVDAKAILSARLSKSRRLENLIAQLPGEKKNGLFGNLIALSLGLTPNFKSNFDLAEDAKLQLSKDTYDDDLDNLLAQIGDQYADLFLAAKNLSDAILLSDILRVNTEITKAPLSASMIKRYDEHHQDLTLLKALVRQQLPEKYKEIFFDQSKNGYAGYIDGGASQEEFYKFIKPILEKMDGTEELLVKLNREDLLRKQRTFDNGSIPHQIHLGELHAILRRQEDFYPFLKDNREKIEKILTFRIPYYVGPLARGNSRFAWMTRKSEETITPWNFEEVVDKGASAQSFIERMTNFDKNLPNEKVLPKHSLLYEYFTVYNELTKVKYVTEGMRKPAFLSGEQKKAIVDLLFKTNRKVTVKQLKEDYFKKIECFDSVEISGVEDRFNASLGTYHDLLKIIKDKDFLDNEENEDILEDIVLTLTLFEDREMIEERLKTYAHLFDDKVMKQLKRRRYTGWGRLSRKLINGIRDKQSGKTILDFLKSDGFANRNFMQLIHDDSLTFKEDIQKAQVSGQGDSLHEHIANLAGSPAIKKGILQTVKVVDELVKVMGRHKPENIVIEMARENQTTQKGQKNSRERMKRIEEGIKELGSQILKEHPVENTQLQNEKLYLYYLQNGRDMYVDQELDINRLSDYDVDHIVPQSFLKDDSIDNKVLTRSDKARGKSDNVPSEEVVKKMKNYWRQLLNAKLITQRKFDNLTKAERGGLSELDKAGFIKRQLVETRQITKHVAQILDSRMNTKYDENDKLIREVKVITLKSKLVSDFRKDFQFYKVREINNYHHAHDAYLNAVVGTALIKKYPKLESEFVYGDYKVYDVRKMIAKSEQEIGKATAKYFFYSNIMNFFKTEITLANGEIRKRPLIETNGETGEIVWDKGRDFATVRKVLSMPQVNIVKKTEVQTGGFSKESILPKRNSDKLIARKKDWDPKKYGGFDSPTVAYSVLVVAKVEKGKSKKLKSVKELLGITIMERSSFEKNPIDFLEAKGYKEVKKDLIIKLPKYSLFELENGRKRMLASAGELQKGNELALPSKYVNFLYLASHYEKLKGSPEDNEQKQLFVEQHKHYLDEIIEQISEFSKRVILADANLDKVLSAYNKHRDKPIREQAENIIHLFTLTNLGAPAAFKYFDTTIDRKRYTSTKEVLDATLIHQSITGLYETRIDLSQLGGDGGEAAAKGSSGGSCQTKNTLNIDEYLLQFPDQLWASLPTDIGRMLVPPITIKIKDNASLPSIRQYPLPKDKTEGLRPLISSLENQGILIKCHSPCNTPIFPIKKAGRDEYRMIHDLRAINNIVAPLTAVVASPTTVLSNLAPSLHWFTVIDLSNAFFSVPIHKDSQYLFAFTFEGHQYTWTVLPQGFIHSPTLFSQALYQSLHKIKFKISSEICIYMDDVLIASKDRDTNLKDTAVMLQHLASEGHKVSKKKLQLCQQEVVYLGQLLTPEGRKILPDRKVTVSQFQQPTTIRQIRAFLGLVGYCRHWIPEFSIHSKFLEKQLKKDTAEPFQLDDQQVEAFNKLKHAITTAPVLVVPDPAKPFQLYTSHSEHASIAVLTQKHAGRTRPIAFLSSKFDAIESGLPPCLKACASIHRSLTQADSFILGAPLIIYTTHAICTLLQRDRSQLVTASRFSKWEADLLRPELTFVACSAVSPAHLYMQSCENNIPPHDCVLLTHTISRPRPDLSDLPIPDPDMTLFSDGSYTTGRGGAAVVMHRPVTDDFIIIHQQPGGASAQTAELLALAAACHLATDKTVNIYTDSRYAYGVVHDFGHLWMHRGFVTSAGTPIKNHKEIEYLLKQIMKPKQVSVIKIEAHTKGVSMEVRGNAAADEAAKNAVFLVQRAGKRTADGSEFEKRTADGSEFESPKKKAKVE

SEQ ID NO: 6744 - protein, 2093 aa, synthetic construct
MPAAKRVKLDGGDKKYSIGLDIGTNSVGWAVITDEYKVPSKKFKVLGNTDRHSIKKNLIGALLFDSGETAEATRLKRTARRRYTRRKNRICYLQEIFSNEMAKVDDSFFHRLEESFLVEEDKKHERHPIFGNIVDEVAYHEKYPTIYHLRKKLVDSTDKADLRLIYLALAHMIKFRGHFLIEGDLNPDNSDVDKLFIQLVQTYNQLFEENPINASGVDAKAILSARLSKSRRLENLIAQLPGEKKNGLFGNLIALSLGLTPNFKSNFDLAEDAKLQLSKDTYDDDLDNLLAQIGDQYADLFLAAKNLSDAILLSDILRVNTEITKAPLSASMIKRYDEHHQDLTLLKALVRQQLPEKYKEIFFDQSKNGYAGYIDGGASQEEFYKFIKPILEKMDGTEELLVKLNREDLLRKQRTFDNGSIPHQIHLGELHAILRRQEDFYPFLKDNREKIEKILTFRIPYYVGPLARGNSRFAWMTRKSEETITPWNFEEVVDKGASAQSFIERMTNFDKNLPNEKVLPKHSLLYEYFTVYNELTKVKYVTEGMRKPAFLSGEQKKAIVDLLFKTNRKVTVKQLKEDYFKKIECFDSVEISGVEDRFNASLGTYHDLLKIIKDKDFLDNEENEDILEDIVLTLTLFEDREMIEERLKTYAHLFDDKVMKQLKRRRYTGWGRLSRKLINGIRDKQSGKTILDFLKSDGFANRNFMQLIHDDSLTFKEDIQKAQVSGQGDSLHEHIANLAGSPAIKKGILQTVKVVDELVKVMGRHKPENIVIEMARENQTTQKGQKNSRERMKRIEEGIKELGSQILKEHPVENTQLQNEKLYLYYLQNGRDMYVDQELDINRLSDYDVDHIVPQSFLKDDSIDNKVLTRSDKARGKSDNVPSEEVVKKMKNYWRQLLNAKLITQRKFDNLTKAERGGLSELDKAGFIKRQLVETRQITKHVAQILDSRMNTKYDENDKLIREVKVITLKSKLVSDFRKDFQFYKVREINNYHHAHDAYLNAVVGTALIKKYPKLESEFVYGDYKVYDVRKMIAKSEQEIGKATAKYFFYSNIMNFFKTEITLANGEIRKRPLIETNGETGEIVWDKGRDFATVRKVLSMPQVNIVKKTEVQTGGFSKESILPKRNSDKLIARKKDWDPKKYGGFDSPTVAYSVLVVAKVEKGKSKKLKSVKELLGITIMERSSFEKNPIDFLEAKGYKEVKKDLIIKLPKYSLFELENGRKRMLASAGELQKGNELALPSKYVNFLYLASHYEKLKGSPEDNEQKQLFVEQHKHYLDEIIEQISEFSKRVILADANLDKVLSAYNKHRDKPIREQAENIIHLFTLTNLGAPAAFKYFDTTIDRKRYTSTKEVLDATLIHQSITGLYETRIDLSQLGGDGGEAAAKGSSGGTLNIEDEYRLHETSKEPDVPLGSTWLSDFPQAWAETGGMGLAVRQAPLIIPLKATSTPVSIKQYPMSQEARLGIKPHIQRLLDQGILVPCQSPWNTPLLPVKKPGTNDYRPVQDLREVNKRVEDIHPTVPNPYNLLSGLPPSHQWYTVLDLKDAFFCLRLHPTSQPLFAFEWRDPEMGISGQLTWTRLPQGFKNSPTLFNEALHRDLADFRIQHPDLILLQYVDDLLLAATSEQDCQRGTRALLQTLGNLGYRASAKKAQICQKQVKYLGYLLKEGQRWLTEARKETVMGQPTPKTPRQLREFLGTAGFCRLWIPGFAEMAAPLYPLTKPGTLFNWGPDQQKAYQEIKQALLTAPALGLPDLTKPFELFVDEKQGYAKGVLTQKLGPWRRPVAYLSKKLDPVAAGWPPCLRMVAAIAVLTKDAGKLTMGQPLVILAPHAVEALVKQPPDRWLSNARMTHYQAMLLDTDRVQFGPVVALNPATLLPLPEKEAPHDCLEILAETHGTRPDLTDQPIPDADYTWYTDGSSFLQEGQRRAGAAVTTETEVIWARALPAGTSAQRAELIALTQALKMAEGKKLNVYTDSRYAFATAHVHGEIYRRRGWLTSEGREIKNKNEILALLKALFLPKRLSIIHCPGHQKGNSAEARGNRMADQAAREAAMKAVLETSTLLAGKRTADGSEFEKRTADGSEFESPKKKAKVE

SEQ ID NO: 6745 - protein, 2093 aa, synthetic construct
MPAAKRVKLDGGDKKYSIGLDIGTNSVGWAVITDEYKVPSKKFKVLGNTDRHSIKKNLIGALLFDSGETAEATRLKRTARRRYTRRKNRICYLQEIFSNEMAKVDDSFFHRLEESFLVEEDKKHERHPIFGNIVDEVAYHEKYPTIYHLRKKLVDSTDKADLRLIYLALAHMIKFRGHFLIEGDLNPDNSDVDKLFIQLVQTYNQLFEENPINASGVDAKAILSARLSKSRRLENLIAQLPGEKKNGLFGNLIALSLGLTPNFKSNFDLAEDAKLQLSKDTYDDDLDNLLAQIGDQYADLFLAAKNLSDAILLSDILRVNTEITKAPLSASMIKRYDEHHQDLTLLKALVRQQLPEKYKEIFFDQSKNGYAGYIDGGASQEEFYKFIKPILEKMDGTEELLVKLNREDLLRKQRTFDNGSIPHQIHLGELHAILRRQEDFYPFLKDNREKIEKILTFRIPYYVGPLARGNSRFAWMTRKSEETITPWNFEEVVDKGASAQSFIERMTNFDKNLPNEKVLPKHSLLYEYFTVYNELTKVKYVTEGMRKPAFLSGEQKKAIVDLLFKTNRKVTVKQLKEDYFKKIECFDSVEISGVEDRFNASLGTYHDLLKIIKDKDFLDNEENEDILEDIVLTLTLFEDREMIEERLKTYAHLFDDKVMKQLKRRRYTGWGRLSRKLINGIRDKQSGKTILDFLKSDGFANRNFMQLIHDDSLTFKEDIQKAQVSGQGDSLHEHIANLAGSPAIKKGILQTVKVVDELVKVMGRHKPENIVIEMARENQTTQKGQKNSRERMKRIEEGIKELGSQILKEHPVENTQLQNEKLYLYYLQNGRDMYVDQELDINRLSDYDVDHIVPQSFLKDDSIDNKVLTRSDKARGKSDNVPSEEVVKKMKNYWRQLLNAKLITQRKFDNLTKAERGGLSELDKAGFIKRQLVETRQITKHVAQILDSRMNTKYDENDKLIREVKVITLKSKLVSDFRKDFQFYKVREINNYHHAHDAYLNAVVGTALIKKYPKLESEFVYGDYKVYDVRKMIAKSEQEIGKATAKYFFYSNIMNFFKTEITLANGEIRKRPLIETNGETGEIVWDKGRDFATVRKVLSMPQVNIVKKTEVQTGGFSKESILPKRNSDKLIARKKDWDPKKYGGFDSPTVAYSVLVVAKVEKGKSKKLKSVKELLGITIMERSSFEKNPIDFLEAKGYKEVKKDLIIKLPKYSLFELENGRKRMLASAGELQKGNELALPSKYVNFLYLASHYEKLKGSPEDNEQKQLFVEQHKHYLDEIIEQISEFSKRVILADANLDKVLSAYNKHRDKPIREQAENIIHLFTLTNLGAPAAFKYFDTTIDRKRYTSTKEVLDATLIHQSITGLYETRIDLSQLGGDGGGSSPAPGGTAPLEEEYRLFLEAPIQNVTLLEQWKREIPKVWAEINPPGLASTQAPIHVQLLSTALPVRVRQYPITLEAKRSLRETIRKFRAAGILRPVHSPWNTPLLPVRKSGTSEYRMVQDLREVNKRVETIHPTVPNPYTLLSLLPPDRIWYSVLDLKDAFFCIPLAPESQLIFAFEWADAEEGESGQLTWTRLPQGFKNSPTLFNEALNRDLQGFRLDHPSVSLLQYVDDLLIAADTQAACLSATRDLLMTLAELGYRVSGKKAQLCQEEVTYLGFKIHKGSRSLSNSRTQAILQIPVPKTKRQVREFLGTIGYCRLWIPGFAELAQPLYAATRPGNDPLVWGEKEEEAFQSLKLALTQPPALALPSLDKPFQLFVEETSGAAKGVLTQALGPWKRPVAYLSKRLDPVAAGWPRCLRAIAAAALLTREASKLTFGQDIEITSSHNLESLLRSPPDKWLTNARITQYQVLLLDPPRVRFKQTAALNPATLLPETDDTLPIHHCLDTLDSLTSTRPDLTDQPLAQAEATLFTDGSSYIRDGKRYAGAAVVTLDSVIWAEPLPIGTSAQKAELIALTKALEWSKDKSVNIYTDSRYAFATLHVHGMIYRERGWLTAGGKAIKNAPEILALLTAVWLPKRVAVMHCKGHQKDDAPTSTGNRRADEVAREVAIRPLSTQATISAGKRTADGSEFEKRTADGSEFESPKKKAKVE

SEQ ID NO: 6746 - protein, 2097 aa, synthetic construct
MPAAKRVKLDGGDKKYSIGLDIGTNSVGWAVITDEYKVPSKKFKVLGNTDRHSIKKNLIGALLFDSGETAEATRLKRTARRRYTRRKNRICYLQEIFSNEMAKVDDSFFHRLEESFLVEEDKKHERHPIFGNIVDEVAYHEKYPTIYHLRKKLVDSTDKADLRLIYLALAHMIKFRGHFLIEGDLNPDNSDVDKLFIQLVQTYNQLFEENPINASGVDAKAILSARLSKSRRLENLIAQLPGEKKNGLFGNLIALSLGLTPNFKSNFDLAEDAKLQLSKDTYDDDLDNLLAQIGDQYADLFLAAKNLSDAILLSDILRVNTEITKAPLSASMIKRYDEHHQDLTLLKALVRQQLPEKYKEIFFDQSKNGYAGYIDGGASQEEFYKFIKPILEKMDGTEELLVKLNREDLLRKQRTFDNGSIPHQIHLGELHAILRRQEDFYPFLKDNREKIEKILTFRIPYYVGPLARGNSRFAWMTRKSEETITPWNFEEVVDKGASAQSFIERMTNFDKNLPNEKVLPKHSLLYEYFTVYNELTKVKYVTEGMRKPAFLSGEQKKAIVDLLFKTNRKVTVKQLKEDYFKKIECFDSVEISGVEDRFNASLGTYHDLLKIIKDKDFLDNEENEDILEDIVLTLTLFEDREMIEERLKTYAHLFDDKVMKQLKRRRYTGWGRLSRKLINGIRDKQSGKTILDFLKSDGFANRNFMQLIHDDSLTFKEDIQKAQVSGQGDSLHEHIANLAGSPAIKKGILQTVKVVDELVKVMGRHKPENIVIEMARENQTTQKGQKNSRERMKRIEEGIKELGSQILKEHPVENTQLQNEKLYLYYLQNGRDMYVDQELDINRLSDYDVDHIVPQSFLKDDSIDNKVLTRSDKARGKSDNVPSEEVVKKMKNYWRQLLNAKLITQRKFDNLTKAERGGLSELDKAGFIKRQLVETRQITKHVAQILDSRMNTKYDENDKLIREVKVITLKSKLVSDFRKDFQFYKVREINNYHHAHDAYLNAVVGTALIKKYPKLESEFVYGDYKVYDVRKMIAKSEQEIGKATAKYFFYSNIMNFFKTEITLANGEIRKRPLIETNGETGEIVWDKGRDFATVRKVLSMPQVNIVKKTEVQTGGFSKESILPKRNSDKLIARKKDWDPKKYGGFDSPTVAYSVLVVAKVEKGKSKKLKSVKELLGITIMERSSFEKNPIDFLEAKGYKEVKKDLIIKLPKYSLFELENGRKRMLASAGELQKGNELALPSKYVNFLYLASHYEKLKGSPEDNEQKQLFVEQHKHYLDEIIEQISEFSKRVILADANLDKVLSAYNKHRDKPIREQAENIIHLFTLTNLGAPAAFKYFDTTIDRKRYTSTKEVLDATLIHQSITGLYETRIDLSQLGGDGGGSSPAPGGTVSLQDEHRLFDIPVTTSLPDVWLQDFPQAWAETGGLGRAKCQAPIIIDLKPTAVPVSIKQYPMSLEAHMGIRQHIIKFLELGVLRPCRSPWNTPLLPVKKPGTQDYRPVQDLREINKRTVDIHPTVPNPYNLLSTLKPDYSWYTVLDLKDAFFCLPLAPQSQELFAFEWKDPERGISGQLTWTRLPQGFKNSPTLFNEALHRDLTDFRTQHPEVTLLQYVDDLLLAAPTKKACTQGTRHLLQELGEKGYRASAKKAQICQTKVTYLGYILSEGKRWLTPGRIETVARIPPPRNPREVREFLGKAGFCRLFIPGFAELAAPLYALTKPSTPFTWQTEHQLAFEALKKALLSAPALGLPDTSKPFTLFLDERQGIAKGVLTQKLGPWKRPVAYLSKKLDPVAAGWPPCLRIMAATAMLVKDSAKLTLGQPLTVITPHTLEAIVRQPPDRWITNARLTHYQALLLDTDRVQFGPPVTLNPATLLPVPENQPSPHDCRQVLAETHGTREDLKDQELPDADHTWYTDGSSYLDSGTRRAGAAVVDGHNTIWAQSLPPGTSAQKAELIALTKALELSKGKKANIYTDSRYAFATAHTHGSIYERRGWLTSEGKEIKNKAEIIALLKALFLPQEVAIIHCPGHQKGQDPVAVGNRQADRVARQAAMAEVLTLATEPDNTSHITAGKRTADGSEFEKRTADGSEFESPKKKAKVE

SEQ ID NO: 6747 - protein, 2082 aa, synthetic construct
MPAAKRVKLDGGDKKYSIGLDIGTNSVGWAVITDEYKVPSKKFKVLGNTDRHSIKKNLIGALLFDSGETAEATRLKRTARRRYTRRKNRICYLQEIFSNEMAKVDDSFFHRLEESFLVEEDKKHERHPIFGNIVDEVAYHEKYPTIYHLRKKLVDSTDKADLRLIYLALAHMIKFRGHFLIEGDLNPDNSDVDKLFIQLVQTYNQLFEENPINASGVDAKAILSARLSKSRRLENLIAQLPGEKKNGLFGNLIALSLGLTPNFKSNFDLAEDAKLQLSKDTYDDDLDNLLAQIGDQYADLFLAAKNLSDAILLSDILRVNTEITKAPLSASMIKRYDEHHQDLTLLKALVRQQLPEKYKEIFFDQSKNGYAGYIDGGASQEEFYKFIKPILEKMDGTEELLVKLNREDLLRKQRTFDNGSIPHQIHLGELHAILRRQEDFYPFLKDNREKIEKILTFRIPYYVGPLARGNSRFAWMTRKSEETITPWNFEEVVDKGASAQSFIERMTNFDKNLPNEKVLPKHSLLYEYFTVYNELTKVKYVTEGMRKPAFLSGEQKKAIVDLLFKTNRKVTVKQLKEDYFKKIECFDSVEISGVEDRFNASLGTYHDLLKIIKDKDFLDNEENEDILEDIVLTLTLFEDREMIEERLKTYAHLFDDKVMKQLKRRRYTGWGRLSRKLINGIRDKQSGKTILDFLKSDGFANRNFMQLIHDDSLTFKEDIQKAQVSGQGDSLHEHIANLAGSPAIKKGILQTVKVVDELVKVMGRHKPENIVIEMARENQTTQKGQKNSRERMKRIEEGIKELGSQILKEHPVENTQLQNEKLYLYYLQNGRDMYVDQELDINRLSDYDVDHIVPQSFLKDDSIDNKVLTRSDKARGKSDNVPSEEVVKKMKNYWRQLLNAKLITQRKFDNLTKAERGGLSELDKAGFIKRQLVETRQITKHVAQILDSRMNTKYDENDKLIREVKVITLKSKLVSDFRKDFQFYKVREINNYHHAHDAYLNAVVGTALIKKYPKLESEFVYGDYKVYDVRKMIAKSEQEIGKATAKYFFYSNIMNFFKTEITLANGEIRKRPLIETNGETGEIVWDKGRDFATVRKVLSMPQVNIVKKTEVQTGGFSKESILPKRNSDKLIARKKDWDPKKYGGFDSPTVAYSVLVVAKVEKGKSKKLKSVKELLGITIMERSSFEKNPIDFLEAKGYKEVKKDLIIKLPKYSLFELENGRKRMLASAGELQKGNELALPSKYVNFLYLASHYEKLKGSPEDNEQKQLFVEQHKHYLDEIIEQISEFSKRVILADANLDKVLSAYNKHRDKPIREQAENIIHLFTLTNLGAPAAFKYFDTTIDRKRYTSTKEVLDATLIHQSITGLYETRIDLSQLGGDGGGSSPAPGGVPWILKKPLELTIKLDLEEQQGTLLNNSILSKKGKEELKQLFEKYSALWQSWENQVGHRRIRPHKIATGTVKPTPQKQYHINPKAKPDIQIVINDLLKQGVLIQKESTMNTPVYPVPKPNGRWRMVLDYRAVNKVTPLIAVQNQHSYGILGSLFKGRYKTTIDLSNGFWAHPIVPEDYWITAFTWQGKQYCWTVLPQGFLNSPGLFTGDVVDLLQGIPNVEVYVDDVYISHDSEKEHLEYLDILFNRLKEAGYIISLKKSNIANSIVDFLGFQITNEGRGLTDTFKEKLENITAPTTLKQLQSILGLLNFARNFIPDFTELIAPLYALIPKSTKNYVPWQIEHSTTLETLITKLNGAEYLQGRKGDKTLIMKVNASYTTGYIRYYNEGEKKPISYVSIVFSKTELKFTELEKLLTTVHKGLLKALDLSMGQNIHVYSPIVSMQNIQKTPQTAKKALASRWLSWLSYLEDPRIRFFYDPQMPALKDLPAVDTGKDNKKHPSNFQHIFYTDGSAITSPTKEGHLNAGMGIVYFINKDGNLQKQQEWSISLGNHTAQFAEIAAFEFALKKCLPLGGNILVVTDSNYVAKAYNEELDVWASNGFVNNRKKPLKHISKWKSVADLKRLRPDVVVTHEPGHQKLDSSPHAYGNNLADQLATQASFKVHAGKRTADGSEFEKRTADGSEFESPKKKAKVE

SEQ ID NO: 6748 - protein, 2090 aa, synthetic construct
MPAAKRVKLDGGDKKYSIGLDIGTNSVGWAVITDEYKVPSKKFKVLGNTDRHSIKKNLIGALLFDSGETAEATRLKRTARRRYTRRKNRICYLQEIFSNEMAKVDDSFFHRLEESFLVEEDKKHERHPIFGNIVDEVAYHEKYPTIYHLRKKLVDSTDKADLRLIYLALAHMIKFRGHFLIEGDLNPDNSDVDKLFIQLVQTYNQLFEENPINASGVDAKAILSARLSKSRRLENLIAQLPGEKKNGLFGNLIALSLGLTPNFKSNFDLAEDAKLQLSKDTYDDDLDNLLAQIGDQYADLFLAAKNLSDAILLSDILRVNTEITKAPLSASMIKRYDEHHQDLTLLKALVRQQLPEKYKEIFFDQSKNGYAGYIDGGASQEEFYKFIKPILEKMDGTEELLVKLNREDLLRKQRTFDNGSIPHQIHLGELHAILRRQEDFYPFLKDNREKIEKILTFRIPYYVGPLARGNSRFAWMTRKSEETITPWNFEEVVDKGASAQSFIERMTNFDKNLPNEKVLPKHSLLYEYFTVYNELTKVKYVTEGMRKPAFLSGEQKKAIVDLLFKTNRKVTVKQLKEDYFKKIECFDSVEISGVEDRFNASLGTYHDLLKIIKDKDFLDNEENEDILEDIVLTLTLFEDREMIEERLKTYAHLFDDKVMKQLKRRRYTGWGRLSRKLINGIRDKQSGKTILDFLKSDGFANRNFMQLIHDDSLTFKEDIQKAQVSGQGDSLHEHIANLAGSPAIKKGILQTVKVVDELVKVMGRHKPENIVIEMARENQTTQKGQKNSRERMKRIEEGIKELGSQILKEHPVENTQLQNEKLYLYYLQNGRDMYVDQELDINRLSDYDVDHIVPQSFLKDDSIDNKVLTRSDKARGKSDNVPSEEVVKKMKNYWRQLLNAKLITQRKFDNLTKAERGGLSELDKAGFIKRQLVETRQITKHVAQILDSRMNTKYDENDKLIREVKVITLKSKLVSDFRKDFQFYKVREINNYHHAHDAYLNAVVGTALIKKYPKLESEFVYGDYKVYDVRKMIAKSEQEIGKATAKYFFYSNIMNFFKTEITLANGEIRKRPLIETNGETGEIVWDKGRDFATVRKVLSMPQVNIVKKTEVQTGGFSKESILPKRNSDKLIARKKDWDPKKYGGFDSPTVAYSVLVVAKVEKGKSKKLKSVKELLGITIMERSSFEKNPIDFLEAKGYKEVKKDLIIKLPKYSLFELENGRKRMLASAGELQKGNELALPSKYVNFLYLASHYEKLKGSPEDNEQKQLFVEQHKHYLDEIIEQISEFSKRVILADANLDKVLSAYNKHRDKPIREQAENIIHLFTLTNLGAPAAFKYFDTTIDRKRYTSTKEVLDATLIHQSITGLYETRIDLSQLGGDGGGSSPAPGGTLQLEEEYRLFEPESTQKQEMDIWLKNFPQAWAETGGMGTAHCQAPVLIQLKATATPISIRQYPMPHEAYQGIKPHIRRMLDQGILKPCQSPWNTPLLPVKKPGTEDYRPVQDLREVNKRVEDIHPTVPNPYNLLSTLPPSHPWYTVLDLKDAFFCLRLHSESQLLFAFEWRDPEIGLSGQLTWTRLPQGFKNSPTLFNEALHSDLADFRVRYPALVLLQYVDDLLLAAATRTECLEGTKALLETLGNKGYRASAKKAQICLQEVTYLGYSLKDGQRWLTKARKEAILSIPVPKNSRQVREFLGTAGYCRLWIPGFAELAAPLYPLTRPGTLFQWGTEQQLAFEDIKKALLSSPALGLPDITKPFELFIDENSGFAKGVLVQKLGPWKRPVAYLSKKLDTVASGWPPCLRMVAAIAILVKDAGKLTLGQPLTILTSHPVEALVRQPPNKWLSNARMTHYQAMLLDAERVHFGPTVSLNPATLLPLPSGGNHHDCLQILAETHGTRPDLTDQPLPDADLTWYTDGSSFIRNGEREAGAAVTTESEVIWAAPLPPGTSAQRAELIALTQALKMAEGKKLTVYTDSRYAFATTHVHGEIYRRRGWLTSEGKEIKNKNEILALLEALFLPKRLSIIHCPGHQKGDSPQAKGNRLADDTAKKAATETHSSLTVLPAGKRTADGSEFEKRTADGSEFESPKKKAKVE

SEQ ID NO: 6749 - protein, 2213 aa, synthetic construct
MPAAKRVKLDGGDKKYSIGLDIGTNSVGWAVITDEYKVPSKKFKVLGNTDRHSIKKNLIGALLFDSGETAEATRLKRTARRRYTRRKNRICYLQEIFSNEMAKVDDSFFHRLEESFLVEEDKKHERHPIFGNIVDEVAYHEKYPTIYHLRKKLVDSTDKADLRLIYLALAHMIKFRGHFLIEGDLNPDNSDVDKLFIQLVQTYNQLFEENPINASGVDAKAILSARLSKSRRLENLIAQLPGEKKNGLFGNLIALSLGLTPNFKSNFDLAEDAKLQLSKDTYDDDLDNLLAQIGDQYADLFLAAKNLSDAILLSDILRVNTEITKAPLSASMIKRYDEHHQDLTLLKALVRQQLPEKYKEIFFDQSKNGYAGYIDGGASQEEFYKFIKPILEKMDGTEELLVKLNREDLLRKQRTFDNGSIPHQIHLGELHAILRRQEDFYPFLKDNREKIEKILTFRIPYYVGPLARGNSRFAWMTRKSEETITPWNFEEVVDKGASAQSFIERMTNFDKNLPNEKVLPKHSLLYEYFTVYNELTKVKYVTEGMRKPAFLSGEQKKAIVDLLFKTNRKVTVKQLKEDYFKKIECFDSVEISGVEDRFNASLGTYHDLLKIIKDKDFLDNEENEDILEDIVLTLTLFEDREMIEERLKTYAHLFDDKVMKQLKRRRYTGWGRLSRKLINGIRDKQSGKTILDFLKSDGFANRNFMQLIHDDSLTFKEDIQKAQVSGQGDSLHEHIANLAGSPAIKKGILQTVKVVDELVKVMGRHKPENIVIEMARENQTTQKGQKNSRERMKRIEEGIKELGSQILKEHPVENTQLQNEKLYLYYLQNGRDMYVDQELDINRLSDYDVDHIVPQSFLKDDSIDNKVLTRSDKARGKSDNVPSEEVVKKMKNYWRQLLNAKLITQRKFDNLTKAERGGLSELDKAGFIKRQLVETRQITKHVAQILDSRMNTKYDENDKLIREVKVITLKSKLVSDFRKDFQFYKVREINNYHHAHDAYLNAVVGTALIKKYPKLESEFVYGDYKVYDVRKMIAKSEQEIGKATAKYFFYSNIMNFFKTEITLANGEIRKRPLIETNGETGEIVWDKGRDFATVRKVLSMPQVNIVKKTEVQTGGFSKESILPKRNSDKLIARKKDWDPKKYGGFDSPTVAYSVLVVAKVEKGKSKKLKSVKELLGITIMERSSFEKNPIDFLEAKGYKEVKKDLIIKLPKYSLFELENGRKRMLASAGELQKGNELALPSKYVNFLYLASHYEKLKGSPEDNEQKQLFVEQHKHYLDEIIEQISEFSKRVILADANLDKVLSAYNKHRDKPIREQAENIIHLFTLTNLGAPAAFKYFDTTIDRKRYTSTKEVLDATLIHQSITGLYETRIDLSQLGGDGGGSSPAPGGTLGDQGSRGSDPLPEPRVTLTVEGIPTEFLVNTGAEHSVLTKPMGKMGSKRTVVAGATGSKVYPWTTKRLLKIGQKQVTHSFLVIPECPAPLLGRDLLTKLKAQIQFSTEGPQVTWEDRPAMCLVLNLEEEYRLHEKPVPPSIDPSWLQLFPMVWAEKAGMGLANQVPPVVVELKSDASPVAVRQYPMSKEAREGIRPHIQRFLDLGILVPCQSPWNTPLLPVKKPGTNDYRPVQDLREVNKRVQDIHPTVPNPYNLLSSLPPSHTWYSVLDLKDAFFCLKLHPNSQPLFAFEWRDPEKGNTGQLTWTRLPQGFKNSPTLFNEALHRDLASFRALNPQVVMLQYVDDLLVAAPTYRDCKEGTRRLLQELSKLGYRVSAKKAQLCREEVTYLGYLLKGGKRWLTPARKATVMKIPTPTTPRQVREFLGTAGFCRLWIPGFASLAAPLYPLTRPKVPFTWTEAHQEAFGRIKEALLSAPALALPDLTKPFALYVDEKEGVARGVLTQTLGPWRRPVAYLSKKLDPVASGWPTCLKAIAAVALLLKDADKLTLGQNVLVIAPHNLESIVRQPPDRWMTNARMTHYQSLLLNERVSFAPPAILNPATLLPVESDDTPIHICSEILAEETGTRPDLRDQPLPGVPAWYTDGSSFIMDGRRQAGAAIVDNKRTVWASNLPEGTSAQKAELIALTQALRLAEGKSINIYTDSRYAFATAHVHGAIYKQRGWLTSAGKDIKNKEEILALLEAIHLPKRVAIIHCPGHQRGTDPVATGNRKADEAAKQAAQSTRILTETTKNAGKRTADGSEFEKRTADGSEFESPKKKAKVE

SEQ ID NO: 6750 - protein, 2091 aa, synthetic construct
MPAAKRVKLDGGDKKYSIGLDIGTNSVGWAVITDEYKVPSKKFKVLGNTDRHSIKKNLIGALLFDSGETAEATRLKRTARRRYTRRKNRICYLQEIFSNEMAKVDDSFFHRLEESFLVEEDKKHERHPIFGNIVDEVAYHEKYPTIYHLRKKLVDSTDKADLRLIYLALAHMIKFRGHFLIEGDLNPDNSDVDKLFIQLVQTYNQLFEENPINASGVDAKAILSARLSKSRRLENLIAQLPGEKKNGLFGNLIALSLGLTPNFKSNFDLAEDAKLQLSKDTYDDDLDNLLAQIGDQYADLFLAAKNLSDAILLSDILRVNTEITKAPLSASMIKRYDEHHQDLTLLKALVRQQLPEKYKEIFFDQSKNGYAGYIDGGASQEEFYKFIKPILEKMDGTEELLVKLNREDLLRKQRTFDNGSIPHQIHLGELHAILRRQEDFYPFLKDNREKIEKILTFRIPYYVGPLARGNSRFAWMTRKSEETITPWNFEEVVDKGASAQSFIERMTNFDKNLPNEKVLPKHSLLYEYFTVYNELTKVKYVTEGMRKPAFLSGEQKKAIVDLLFKTNRKVTVKQLKEDYFKKIECFDSVEISGVEDRFNASLGTYHDLLKIIKDKDFLDNEENEDILEDIVLTLTLFEDREMIEERLKTYAHLFDDKVMKQLKRRRYTGWGRLSRKLINGIRDKQSGKTILDFLKSDGFANRNFMQLIHDDSLTFKEDIQKAQVSGQGDSLHEHIANLAGSPAIKKGILQTVKVVDELVKVMGRHKPENIVIEMARENQTTQKGQKNSRERMKRIEEGIKELGSQILKEHPVENTQLQNEKLYLYYLQNGRDMYVDQELDINRLSDYDVDHIVPQSFLKDDSIDNKVLTRSDKARGKSDNVPSEEVVKKMKNYWRQLLNAKLITQRKFDNLTKAERGGLSELDKAGFIKRQLVETRQITKHVAQILDSRMNTKYDENDKLIREVKVITLKSKLVSDFRKDFQFYKVREINNYHHAHDAYLNAVVGTALIKKYPKLESEFVYGDYKVYDVRKMIAKSEQEIGKATAKYFFYSNIMNFFKTEITLANGEIRKRPLIETNGETGEIVWDKGRDFATVRKVLSMPQVNIVKKTEVQTGGFSKESILPKRNSDKLIARKKDWDPKKYGGFDSPTVAYSVLVVAKVEKGKSKKLKSVKELLGITIMERSSFEKNPIDFLEAKGYKEVKKDLIIKLPKYSLFELENGRKRMLASAGELQKGNELALPSKYVNFLYLASHYEKLKGSPEDNEQKQLFVEQHKHYLDEIIEQISEFSKRVILADANLDKVLSAYNKHRDKPIREQAENIIHLFTLTNLGAPAAFKYFDTTIDRKRYTSTKEVLDATLIHQSITGLYETRIDLSQLGGDGGGSSPAPGGTLGIEDEYRLHETSTEPDVSLGSTWLSDFPQAWAETGGMGLAVRQAPLIIPLKATSTPVSIQQYPMSHEARLGIKPHIQRLLDQGILVPCQSPWNTPLLPVKKPGTNDYRPVQDLREVNKRVEDIHPTVPNPYNLLSGLPPSHQWYTVLDLKDAFFCLRLHPTSQPLFAFEWRDPGMGISGQLTWTRLPQGFKNSPTLFNEALHRDLADFRIQHPDLILLQYVDDILLAATSELDCQQGTRALLQTLGDLGYRASAKKAQICQKQVKYLGYLLREGQRWLTEARKETVMGQPVPKTPRQLREFLGTAGFCRLWIPGFAEMAAPLYPLTKPGTLFSWGPDQQKAYQEIKQALLTAPALGLPDLTKPFELFVDEKQGYAKGVLTQKLGPWRRPVAYLSKKLDPVAAGWPPCLRMVAAIAVLTKDAGKLTMGQPLVILAPHAVEALVKQPPDRWLSNARMTHYQAMLLDTDRVQFGPVVALNPATLLPLPEEGAPHDCLEILAETHGTRPDLTDQPIPDADHTWYTDGSSFLQEGQRKAGAAVTTETEVIWAGALPAGTSAQRAELIALTQALKMAEGKRLNVYTDSRYAFATAHIHGEIYRRRGWLTSEGREIKNKSEILALLKALFLPKRLSIIHCLGHQKGDSAEARGNRLADQAAREAAIKTPPDTSTLLAGKRTADGSEFEKRTADGSEFESPKKKAKVE

SEQ ID NO: 6751 - protein, 2111 aa, synthetic construct
MPAAKRVKLDGGDKKYSIGLDIGTNSVGWAVITDEYKVPSKKFKVLGNTDRHSIKKNLIGALLFDSGETAEATRLKRTARRRYTRRKNRICYLQEIFSNEMAKVDDSFFHRLEESFLVEEDKKHERHPIFGNIVDEVAYHEKYPTIYHLRKKLVDSTDKADLRLIYLALAHMIKFRGHFLIEGDLNPDNSDVDKLFIQLVQTYNQLFEENPINASGVDAKAILSARLSKSRRLENLIAQLPGEKKNGLFGNLIALSLGLTPNFKSNFDLAEDAKLQLSKDTYDDDLDNLLAQIGDQYADLFLAAKNLSDAILLSDILRVNTEITKAPLSASMIKRYDEHHQDLTLLKALVRQQLPEKYKEIFFDQSKNGYAGYIDGGASQEEFYKFIKPILEKMDGTEELLVKLNREDLLRKQRTFDNGSIPHQIHLGELHAILRRQEDFYPFLKDNREKIEKILTFRIPYYVGPLARGNSRFAWMTRKSEETITPWNFEEVVDKGASAQSFIERMTNFDKNLPNEKVLPKHSLLYEYFTVYNELTKVKYVTEGMRKPAFLSGEQKKAIVDLLFKTNRKVTVKQLKEDYFKKIECFDSVEISGVEDRFNASLGTYHDLLKIIKDKDFLDNEENEDILEDIVLTLTLFEDREMIEERLKTYAHLFDDKVMKQLKRRRYTGWGRLSRKLINGIRDKQSGKTILDFLKSDGFANRNFMQLIHDDSLTFKEDIQKAQVSGQGDSLHEHIANLAGSPAIKKGILQTVKVVDELVKVMGRHKPENIVIEMARENQTTQKGQKNSRERMKRIEEGIKELGSQILKEHPVENTQLQNEKLYLYYLQNGRDMYVDQELDINRLSDYDVDHIVPQSFLKDDSIDNKVLTRSDKARGKSDNVPSEEVVKKMKNYWRQLLNAKLITQRKFDNLTKAERGGLSELDKAGFIKRQLVETRQITKHVAQILDSRMNTKYDENDKLIREVKVITLKSKLVSDFRKDFQFYKVREINNYHHAHDAYLNAVVGTALIKKYPKLESEFVYGDYKVYDVRKMIAKSEQEIGKATAKYFFYSNIMNFFKTEITLANGEIRKRPLIETNGETGEIVWDKGRDFATVRKVLSMPQVNIVKKTEVQTGGFSKESILPKRNSDKLIARKKDWDPKKYGGFDSPTVAYSVLVVAKVEKGKSKKLKSVKELLGITIMERSSFEKNPIDFLEAKGYKEVKKDLIIKLPKYSLFELENGRKRMLASAGELQKGNELALPSKYVNFLYLASHYEKLKGSPEDNEQKQLFVEQHKHYLDEIIEQISEFSKRVILADANLDKVLSAYNKHRDKPIREQAENIIHLFTLTNLGAPAAFKYFDTTIDRKRYTSTKEVLDATLIHQSITGLYETRIDLSQLGGDGGGSSPAPGGTLNIEDEYRLHETSKEPDVSLGSTWLSDFPQAWAETGGMGLAVRQAPLIIPLKATSTPVSIKQYPMSQEARLGIKPHIQRLLDQGILVPCQSPWNTPLLPVKKPGTNDYRPVQDLREVNKRVEDIHPTVPNPYNLLSGLPPSHQWYTVLDLKDAFFCLRLHPTSQPLFAFEWRDPEMGISGQLTWTRLPQGFKNSPTLFNEALHRDLADFRIQHPDLILLQYVDDLLLAATSELDCQQGTRALLQTLGNLGYRASAKKAQICQKQVKYLGYLLKEGQRWLTEARKETVMGQPTPKTPRQLREFLGKAGFCRLFIPGFAEMAAPLYPLTKPGTLFNWGPDQQKAYQEIKQALLTAPALGLPDLTKPFELFVDEKQGYAKGVLTQKLGPWRRPVAYLSKKLDPVAAGWPPCLRMVAAIAVLTKDAGKLTMGQPLVILAPHAVEALVKQPPDRWLSNARMTHYQALLLDTDRVQFGPVVALNPATLLPLPEEGLQHNCLDILAEAHGTRPDLTDQPLPDADHTWYTDGSSLLQEGQRKAGAAVTTETEVIWAKALPAGTSAQRAELIALTQALKMAEGKKLNVYTDSRYAFATAHIHGEIYRRRGWLTSEGKEIKNKDEILALLKALFLPKRLSIIHCPGHQKGHSAEARGNRMADQAARKAAITETPDTSTLLIENSSPSGGSKRTADGSEFEAGKRTADGSEFEKRTADGSEFESPKKKAKVE

SEQ ID NO: 6752 - protein, 2111 aa, synthetic construct; identical to SEQ ID NO: 6751

SEQ ID NO: 6753 - protein, 2082 aa, synthetic construct
MPAAKRVKLDGGDKKYSIGLDIGTNSVGWAVITDEYKVPSKKFKVLGNTDRHSIKKNLIGALLFDSGETAEATRLKRTARRRYTRRKNRICYLQEIFSNEMAKVDDSFFHRLEESFLVEEDKKHERHPIFGNIVDEVAYHEKYPTIYHLRKKLVDSTDKADLRLIYLALAHMIKFRGHFLIEGDLNPDNSDVDKLFIQLVQTYNQLFEENPINASGVDAKAILSARLSKSRRLENLIAQLPGEKKNGLFGNLIALSLGLTPNFKSNFDLAEDAKLQLSKDTYDDDLDNLLAQIGDQYADLFLAAKNLSDAILLSDILRVNTEITKAPLSASMIKRYDEHHQDLTLLKALVRQQLPEKYKEIFFDQSKNGYAGYIDGGASQEEFYKFIKPILEKMDGTEELLVKLNREDLLRKQRTFDNGSIPHQIHLGELHAILRRQEDFYPFLKDNREKIEKILTFRIPYYVGPLARGNSRFAWMTRKSEETITPWNFEEVVDKGASAQSFIERMTNFDKNLPNEKVLPKHSLLYEYFTVYNELTKVKYVTEGMRKPAFLSGEQKKAIVDLLFKTNRKVTVKQLKEDYFKKIECFDSVEISGVEDRFNASLGTYHDLLKIIKDKDFLDNEENEDILEDIVLTLTLFEDREMIEERLKTYAHLFDDKVMKQLKRRRYTGWGRLSRKLINGIRDKQSGKTILDFLKSDGFANRNFMQLIHDDSLTFKEDIQKAQVSGQGDSLHEHIANLAGSPAIKKGILQTVKVVDELVKVMGRHKPENIVIEMARENQTTQKGQKNSRERMKRIEEGIKELGSQILKEHPVENTQLQNEKLYLYYLQNGRDMYVDQELDINRLSDYDVDHIVPQSFLKDDSIDNKVLTRSDKARGKSDNVPSEEVVKKMKNYWRQLLNAKLITQRKFDNLTKAERGGLSELDKAGFIKRQLVETRQITKHVAQILDSRMNTKYDENDKLIREVKVITLKSKLVSDFRKDFQFYKVREINNYHHAHDAYLNAVVGTALIKKYPKLESEFVYGDYKVYDVRKMIAKSEQEIGKATAKYFFYSNIMNFFKTEITLANGEIRKRPLIETNGETGEIVWDKGRDFATVRKVLSMPQVNIVKKTEVQTGGFSKESILPKRNSDKLIARKKDWDPKKYGGFDSPTVAYSVLVVAKVEKGKSKKLKSVKELLGITIMERSSFEKNPIDFLEAKGYKEVKKDLIIKLPKYSLFELENGRKRMLASAGELQKGNELALPSKYVNFLYLASHYEKLKGSPEDNEQKQLFVEQHKHYLDEIIEQISEFSKRVILADANLDKVLSAYNKHRDKPIREQAENIIHLFTLTNLGAPAAFKYFDTTIDRKRYTSTKEVLDATLIHQSITGLYETRIDLSQLGGDGGGSSPAPGGIPWLMKKPLQLTTLVPLQEYEERLLKQTMLTGSYKEKLQSLFLKYDALWQHWENQVGHRRIKPHHIATGTVNPRPQKQYPINPKAKASIQTVINDLLKQGVLIQQNSIMNTPVYPVPKPDGKWRMVLDYREVNKTIPLIAAQNQHSAGILSSIFRGKYKTTLDLSNGFWAHSITPESYWLTAFTWLGQQYCWTRLPQGFLNSPALFNADVVDLLKEVPNVQVYVDDIYISHDDPREHLEQLEKVFSLLLNAGYVVSLKKSEIAQHEVEFLGFNITKEGRGLTETFKQKLLNITPPRDLKQLQSILGLLNFARNFIPNFSELVKPLYNIIATAPGKYITWTTDNSQQLQNIISMLNSAENLEERNPEVRLIMKVNTSPSAGYIRFYNEFAKRPIMYLNYVYTKAEVKFTNTEKLLTTIHKGLIKALDLGMGQEILVYSPIVSMTKIQKTPLPERKALPIRWITWMSYLEDPRIQFHYDKTLPELQQVPTVTDDIIAKIKHPSEFSMVFYTDGSAIKHPNVNKSHNAGMGIAQVQFKPEFTVINTWSIPLGDHTAQLAEVAAVEFACKKALKIDGPVLIVTDSFYVAESVNKELPYWQSNGFFNNKKKPLKHVSKWKSIADCIQLKPDIIIIHEKGHQPTASTFHTEGNNLADKLATQGSYVVNAGKRTADGSEFEKRTADGSEFESPKKKAKVE

SEQ ID NO: 6754 - protein, 2091 aa, synthetic construct
MPAAKRVKLDGGDKKYSIGLDIGTNSVGWAVITDEYKVPSKKFKVLGNTDRHSIKKNLIGALLFDSGETAEATRLKRTARRRYTRRKNRICYLQEIFSNEMAKVDDSFFHRLEESFLVEEDKKHERHPIFGNIVDEVAYHEKYPTIYHLRKKLVDSTDKADLRLIYLALAHMIKFRGHFLIEGDLNPDNSDVDKLFIQLVQTYNQLFEENPINASGVDAKAILSARLSKSRRLENLIAQLPGEKKNGLFGNLIALSLGLTPNFKSNFDLAEDAKLQLSKDTYDDDLDNLLAQIGDQYADLFLAAKNLSDAILLSDILRVNTEITKAPLSASMIKRYDEHHQDLTLLKALVRQQLPEKYKEIFFDQSKNGYAGYIDGGASQEEFYKFIKPILEKMDGTEELLVKLNREDLLRKQRTFDNGSIPHQIHLGELHAILRRQEDFYPFLKDNREKIEKILTFRIPYYVGPLARGNSRFAWMTRKSEETITPWNFEEVVDKGASAQSFIERMTNFDKNLPNEKVLPKHSLLYEYFTVYNELTKVKYVTEGMRKPAFLSGEQKKAIVDLLFKTNRKVTVKQLKEDYFKKIECFDSVEISGVEDRFNASLGTYHDLLKIIKDKDFLDNEENEDILEDIVLTLTLFEDREMIEERLKTYAHLFDDKVMKQLKRRRYTGWGRLSRKLINGIRDKQSGKTILDFLKSDGFANRNFMQLIHDDSLTFKEDIQKAQVSGQGDSLHEHIANLAGSPAIKKGILQTVKVVDELVKVMGRHKPENIVIEMARENQTTQKGQKNSRERMKRIEEGIKELGSQILKEHPVENTQLQNEKLYLYYLQNGRDMYVDQELDINRLSDYDVDHIVPQSFLKDDSIDNKVLTRSDKARGKSDNVPSEEVVKKMKNYWRQLLNAKLITQRKFDNLTKAERGGLSELDKAGFIKRQLVETRQITKHVAQILDSRMNTKYDENDKLIREVKVITLKSKLVSDFRKDFQFYKVREINNYHHAHDAYLNAVVGTALIKKYPKLESEFVYGDYKVYDVRKMIAKSEQEIGKATAKYFFYSNIMNFFKTEITLANGEIRKRPLIETNGETGEIVWDKGRDFATVRKVLSMPQVNIVKKTEVQTGGFSKESILPKRNSDKLIARKKDWDPKKYGGFDSPTVAYSVLVVAKVEKGKSKKLKSVKELLGITIMERSSFEKNPIDFLEAKGYKEVKKDLIIKLPKYSLFELENGRKRMLASAGELQKGNELALPSKYVNFLYLASHYEKLKGSPEDNEQKQLFVEQHKHYLDEIIEQISEFSKRVILADANLDKVLSAYNKHRDKPIREQAENIIHLFTLTNLGAPAAFKYFDTTIDRKRYTSTKEVLDATLIHQSITGLYETRIDLSQLGGDGGGSSPAPGGTLNIEDEYRLHETSKEPDVPLGSTWLSDFPQAWAETGGMGLAVRQAPLIIPLKATSTPVSIKQYPMSQEARLGIKPHIQRLLDQGILVPCQSPWNTPLLPVKKPGTNDYRPVQDLREVNKRVEDIHPTVPNPYNLLSGLPPSHQWYTVLDLKDAFFCLRLHPTSQPLFAFEWRDPEMGISGQLTWTRLPQGFKNSPTLFNEALHRDLADFRIQHPDLILLQYVDDLLLAATSEQDCQRGTRALLQTLGNLGYRASAKKAQICQKQVKYLGYLLKEGQRWLTEARKETVMGQPTPKTPRQLREFLGTAGFCRLWIPGFAEMAAPLYPLTKPGTLFNWGPDQQKAYQEIKQALLTAPALGLPDLTKPFELFVDEKQGYAKGVLTQKLGPWRRPVAYLSKKLDPVAAGWPPCLRMVAAIAVLTKDAGKLTMGQPLVILAPHAVEALVKQPPDRWLSNARMTHYQAMLLDTDRVQFGPVVALNPATLLPLPEKEAPHDCLEILAETHGTRPDLTDQPIPDADYTWYTDGSSFLQEGQRRAGAAVTTETEVIWARALPAGTSAQRAELIALTQALKMAEGKKLNVYTDSRYAFATAHVHGEIYRRRGWLTSEGREIKNKNEILALLKALFLPKRLSIIHCPGHQKGNSAEARGNRMADQAAREAAMKAVLETSTLLAGKRTADGSEFEKRTADGSEFESPKKKAKVE

SEQ ID NO: 6755 - protein, 2093 aa, synthetic construct
MPAAKRVKLDGGDKKYSIGLDIGTNSVGWAVITDEYKVPSKKFKVLGNTDRHSIKKNLIGALLFDSGETAEATRLKRTARRRYTRRKNRICYLQEIFSNEMAKVDDSFFHRLEESFLVEEDKKHERHPIFGNIVDEVAYHEKYPTIYHLRKKLVDSTDKADLRLIYLALAHMIKFRGHFLIEGDLNPDNSDVDKLFIQLVQTYNQLFEENPINASGVDAKAILSARLSKSRRLENLIAQLPGEKKNGLFGNLIALSLGLTPNFKSNFDLAEDAKLQLSKDTYDDDLDNLLAQIGDQYADLFLAAKNLSDAILLSDILRVNTEITKAPLSASMIKRYDEHHQDLTLLKALVRQQLPEKYKEIFFDQSKNGYAGYIDGGASQEEFYKFIKPILEKMDGTEELLVKLNREDLLRKQRTFDNGSIPHQIHLGELHAILRRQEDFYPFLKDNREKIEKILTFRIPYYVGPLARGNSRFAWMTRKSEETITPWNFEEVVDKGASAQSFIERMTNFDKNLPNEKVLPKHSLLYEYFTVYNELTKVKYVTEGMRKPAFLSGEQKKAIVDLLFKTNRKVTVKQLKEDYFKKIECFDSVEISGVEDRFNASLGTYHDLLKIIKDKDFLDNEENEDILEDIVLTLTLFEDREMIEERLKTYAHLFDDKVMKQLKRRRYTGWGRLSRKLINGIRDKQSGKTILDFLKSDGFANRNFMQLIHDDSLTFKEDIQKAQVSGQGDSLHEHIANLAGSPAIKKGILQTVKVVDELVKVMGRHKPENIVIEMARENQTTQKGQKNSRERMKRIEEGIKELGSQILKEHPVENTQLQNEKLYLYYLQNGRDMYVDQELDINRLSDYDVDHIVPQSFLKDDSIDNKVLTRSDKARGKSDNVPSEEVVKKMKNYWRQLLNAKLITQRKFDNLTKAERGGLSELDKAGFIKRQLVETRQITKHVAQILDSRMNTKYDENDKLIREVKVITLKSKLVSDFRKDFQFYKVREINNYHHAHDAYLNAVVGTALIKKYPKLESEFVYGDYKVYDVRKMIAKSEQEIGKATAKYFFYSNIMNFFKTEITLANGEIRKRPLIETNGETGEIVWDKGRDFATVRKVLSMPQVNIVKKTEVQTGGFSKESILPKRNSDKLIARKKDWDPKKYGGFDSPTVAYSVLVVAKVEKGKSKKLKSVKELLGITIMERSSFEKNPIDFLEAKGYKEVKKDLIIKLPKYSLFELENGRKRMLASAGELQKGNELALPSKYVNFLYLASHYEKLKGSPEDNEQKQLFVEQHKHYLDEIIEQISEFSKRVILADANLDKVLSAYNKHRDKPIREQAENIIHLFTLTNLGAPAAFKYFDTTIDRKRYTSTKEVLDATLIHQSITGLYETRIDLSQLGGDGGPAPGSSGGTAPLEEEYRLFLEAPIQNVTLLEQWKREIPKVWAEINPPGLASTQAPIHVQLLSTALPVRVRQYPITLEAKRSLRETIRKFRAAGILRPVHSPWNTPLLPVRKSGTSEYRMVQDLREVNKRVETIHPTVPNPYTLLSLLPPDRIWYSVLDLKDAFFCIPLAPESQLIFAFEWADAEEGESGQLTWTRLPQGFKNSPTLFNEALNRDLQGFRLDHPSVSLLQYVDDLLIAADTQAACLSATRDLLMTLAELGYRVSGKKAQLCQEEVTYLGFKIHKGSRSLSNSRTQAILQIPVPKTKRQVREFLGTIGYCRLWIPGFAELAQPLYAATRPGNDPLVWGEKEEEAFQSLKLALTQPPALALPSLDKPFQLFVEETSGAAKGVLTQALGPWKRPVAYLSKRLDPVAAGWPRCLRAIAAAALLTREASKLTFGQDIEITSSHNLESLLRSPPDKWLTNARITQYQVLLLDPPRVRFKQTAALNPATLLPETDDTLPIHHCLDTLDSLTSTRPDLTDQPLAQAEATLFTDGSSYIRDGKRYAGAAVVTLDSVIWAEPLPIGTSAQKAELIALTKALEWSKDKSVNIYTDSRYAFATLHVHGMIYRERGWLTAGGKAIKNAPEILALLTAVWLPKRVAVMHCKGHQKDDAPTSTGNRRADEVAREVAIRPLSTQATISAGKRTADGSEFEKRTADGSEFESPKKKAKVE

SEQ ID NO: 6756 - protein, 2093 aa, synthetic construct
MPAAKRVKLDGGDKKYSIGLDIGTNSVGWAVITDEYKVPSKKFKVLGNTDRHSIKKNLIGALLFDSGETAEATRLKRTARRRYTRRKNRICYLQEIFSNEMAKVDDSFFHRLEESFLVEEDKKHERHPIFGNIVDEVAYHEKYPTIYHLRKKLVDSTDKADLRLIYLALAHMIKFRGHFLIEGDLNPDNSDVDKLFIQLVQTYNQLFEENPINASGVDAKAILSARLSKSRRLENLIAQLPGEKKNGLFGNLIALSLGLTPNFKSNFDLAEDAKLQLSKDTYDDDLDNLLAQIGDQYADLFLAAKNLSDAILLSDILRVNTEITKAPLSASMIKRYDEHHQDLTLLKALVRQQLPEKYKEIFFDQSKNGYAGYIDGGASQEEFYKFIKPILEKMDGTEELLVKLNREDLLRKQRTFDNGSIPHQIHLGELHAILRRQEDFYPFLKDNREKIEKILTFRIPYYVGPLARGNSRFAWMTRKSEETITPWNFEEVVDKGASAQSFIERMTNFDKNLPNEKVLPKHSLLYEYFTVYNELTKVKYVTEGMRKPAFLSGEQKKAIVDLLFKTNRKVTVKQLKEDYFKKIECFDSVEISGVEDRFNASLGTYHDLLKIIKDKDFLDNEENEDILEDIVLTLTLFEDREMIEERLKTYAHLFDDKVMKQLKRRRYTGWGRLSRKLINGIRDKQSGKTILDFLKSDGFANRNFMQLIHDDSLTFKEDIQKAQVSGQGDSLHEHIANLAGSPAIKKGILQTVKVVDELVKVMGRHKPENIVIEMARENQTTQKGQKNSRERMKRIEEGIKELGSQILKEHPVENTQLQNEKLYLYYLQNGRDMYVDQELDINRLSDYDVDHIVPQSFLKDDSIDNKVLTRSDKARGKSDNVPSEEVVKKMKNYWRQLLNAKLITQRKFDNLTKAERGGLSELDKAGFIKRQLVETRQITKHVAQILDSRMNTKYDENDKLIREVKVITLKSKLVSDFRKDFQFYKVREINNYHHAHDAYLNAVVGTALIKKYPKLESEFVYGDYKVYDVRKMIAKSEQEIGKATAKYFFYSNIMNFFKTEITLANGEIRKRPLIETNGETGEIVWDKGRDFATVRKVLSMPQVNIVKKTEVQTGGFSKESILPKRNSDKLIARKKDWDPKKYGGFDSPTVAYSVLVVAKVEKGKSKKLKSVKELLGITIMERSSFEKNPIDFLEAKGYKEVKKDLIIKLPKYSLFELENGRKRMLASAGELQKGNELALPSKYVNFLYLASHYEKLKGSPEDNEQKQLFVEQHKHYLDEIIEQISEFSKRVILADANLDKVLSAYNKHRDKPIREQAENIIHLFTLTNLGAPAAFKYFDTTIDRKRYTSTKEVLDATLIHQSITGLYETRIDLSQLGGDGGPAPGSSGGTAPLEEEYRLFLEAPIQNVTLLEQWKREIPKVWAEINPPGLASTQAPIHVQLLSTALPVRVRQYPITLEAKRSLRETIRKFRAAGILRPVHSPWNTPLLPVRKSGTSEYRMVQDLREVNKRVETIHPTVPNPYTLLSLLPPDRIWYSVLDLKDAFFCIPLAPESQLIFAFEWADAEEGESGQLTWTRLPQGFKNSPTLFNEALNRDLQGFRLDHPSVSLLQYVDDLLIAADTQAACLSATRDLLMTLAELGYRVSGKKAQLCQEEVTYLGFKIHKGSRSLSNSRTQAILQIPVPKTKRQVREFLGKIGYCRLFIPGFAELAQPLYAATRPGNDPLVWGEKEEEAFQSLKLALTQPPALALPSLDKPFQLFVEETSGAAKGVLTQALGPWKRPVAYLSKRLDPVAAGWPRCLRAIAAAALLTREASKLTFGQDIEITSSHNLESLLRSPPDKWLTNARITQYQVLLLDPPRVRFKQTAALNPATLLPETDDTLPIHHCLDTLDSLTSTRPDLTDQPLAQAEATLFTDGSSYIRDGKRYAGAAVVTLDSVIWAEPLPIGTSAQKAELIALTKALEWSKDKSVNIYTDSRYAFATLHVHGMIYRERGWLTAGGKAIKNAPEILALLTAVWLPKRVAVMHCKGHQKDDAPTSTGNRRADEVAREVAIRPLSTQATISAGKRTADGSEFEKRTADGSEFESPKKKAKVE

SEQ ID NO: 6757 - protein, 2090 aa, synthetic construct
MPAAKRVKLDGGDKKYSIGLDIGTNSVGWAVITDEYKVPSKKFKVLGNTDRHSIKKNLIGALLFDSGETAEATRLKRTARRRYTRRKNRICYLQEIFSNEMAKVDDSFFHRLEESFLVEEDKKHERHPIFGNIVDEVAYHEKYPTIYHLRKKLVDSTDKADLRLIYLALAHMIKFRGHFLIEGDLNPDNSDVDKLFIQLVQTYNQLFEENPINASGVDAKAILSARLSKSRRLENLIAQLPGEKKNGLFGNLIALSLGLTPNFKSNFDLAEDAKLQLSKDTYDDDLDNLLAQIGDQYADLFLAAKNLSDAILLSDILRVNTEITKAPLSASMIKRYDEHHQDLTLLKALVRQQLPEKYKEIFFDQSKNGYAGYIDGGASQEEFYKFIKPILEKMDGTEELLVKLNREDLLRKQRTFDNGSIPHQIHLGELHAILRRQEDFYPFLKDNREKIEKILTFRIPYYVGPLARGNSRFAWMTRKSEETITPWNFEEVVDKGASAQSFIERMTNFDKNLPNEKVLPKHSLLYEYFTVYNELTKVKYVTEGMRKPAFLSGEQKKAIVDLLFKTNRKVTVKQLKEDYFKKIECFDSVEISGVEDRFNASLGTYHDLLKIIKDKDFLDNEENEDILEDIVLTLTLFEDREMIEERLKTYAHLFDDKVMKQLKRRRYTGWGRLSRKLINGIRDKQSGKTILDFLKSDGFANRNFMQLIHDDSLTFKEDIQKAQVSGQGDSLHEHIANLAGSPAIKKGILQTVKVVDELVKVMGRHKPENIVIEMARENQTTQKGQKNSRERMKRIEEGIKELGSQILKEHPVENTQLQNEKLYLYYLQNGRDMYVDQELDINRLSDYDVDHIVPQSFLKDDSIDNKVLTRSDKARGKSDNVPSEEVVKKMKNYWRQLLNAKLITQRKFDNLTKAERGGLSELDKAGFIKRQLVETRQITKHVAQILDSRMNTKYDENDKLIREVKVITLKSKLVSDFRKDFQFYKVREINNYHHAHDAYLNAVVGTALIKKYPKLESEFVYGDYKVYDVRKMIAKSEQEIGKATAKYFFYSNIMNFFKTEITLANGEIRKRPLIETNGETGEIVWDKGRDFATVRKVLSMPQVNIVKKTEVQTGGFSKESILPKRNSDKLIARKKDWDPKKYGGFDSPTVAYSVLVVAKVEKGKSKKLKSVKELLGITIMERSSFEKNPIDFLEAKGYKEVKKDLIIKLPKYSLFELENGRKRMLASAGELQKGNELALPSKYVNFLYLASHYEKLKGSPEDNEQKQLFVEQHKHYLDEIIEQISEFSKRVILADANLDKVLSAYNKHRDKPIREQAENIIHLFTLTNLGAPAAFKYFDTTIDRKRYTSTKEVLDATLIHQSITGLYETRIDLSQLGGDGGPAPGSSGGTLQLEEEYRLFEPESTQKQEMDIWLKNFPQAWAETGGMGTAHCQAPVLIQLKATATPISIRQYPMPHEAYQGIKPHIRRMLDQGILKPCQSPWNTPLLPVKKPGTEDYRPVQDLREVNKRVEDIHPTVPNPYNLLSTLPPSHPWYTVLDLKDAFFCLRLHSESQLLFAFEWRDPEIGLSGQLTWTRLPQGFKNSPTLFNEALHSDLADFRVRYPALVLLQYVDDLLLAAATRTECLEGTKALLETLGNKGYRASAKKAQICLQEVTYLGYSLKDGQRWLTKARKEAILSIPVPKNSRQVREFLGTAGYCRLWIPGFAELAAPLYPLTRPGTLFQWGTEQQLAFEDIKKALLSSPALGLPDITKPFELFIDENSGFAKGVLVQKLGPWKRPVAYLSKKLDTVASGWPPCLRMVAAIAILVKDAGKLTLGQPLTILTSHPVEALVRQPPNKWLSNARMTHYQAMLLDAERVHFGPTVSLNPATLLPLPSGGNHHDCLQILAETHGTRPDLTDQPLPDADLTWYTDGSSFIRNGEREAGAAVTTESEVIWAAPLPPGTSAQRAELIALTQALKMAEGKKLTVYTDSRYAFATTHVHGEIYRRRGWLTSEGKEIKNKNEILALLEALFLPKRLSIIHCPGHQKGDSPQAKGNRLADDTAKKAATETHSSLTVLPAGKRTADGSEFEKRTADGSEFESPKKKAKVE

SEQ ID NO: 6758 - protein, 2213 aa, synthetic construct
MPAAKRVKLDGGDKKYSIGLDIGTNSVGWAVITDEYKVPSKKFKVLGNTDRHSIKKNLIGALLFDSGETAEATRLKRTARRRYTRRKNRICYLQEIFSNEMAKVDDSFFHRLEESFLVEEDKKHERHPIFGNIVDEVAYHEKYPTIYHLRKKLVDSTDKADLRLIYLALAHMIKFRGHFLIEGDLNPDNSDVDKLFIQLVQTYNQLFEENPINASGVDAKAILSARLSKSRRLENLIAQLPGEKKNGLFGNLIALSLGLTPNFKSNFDLAEDAKLQLSKDTYDDDLDNLLAQIGDQYADLFLAAKNLSDAILLSDILRVNTEITKAPLSASMIKRYDEHHQDLTLLKALVRQQLPEKYKEIFFDQSKNGYAGYIDGGASQEEFYKFIKPILEKMDGTEELLVKLNREDLLRKQRTFDNGSIPHQIHLGELHAILRRQEDFYPFLKDNREKIEKILTFRIPYYVGPLARGNSRFAWMTRKSEETITPWNFEEVVDKGASAQSFIERMTNFDKNLPNEKVLPKHSLLYEYFTVYNELTKVKYVTEGMRKPAFLSGEQKKAIVDLLFKTNRKVTVKQLKEDYFKKIECFDSVEISGVEDRFNASLGTYHDLLKIIKDKDFLDNEENEDILEDIVLTLTLFEDREMIEERLKTYAHLFDDKVMKQLKRRRYTGWGRLSRKLINGIRDKQSGKTILDFLKSDGFANRNFMQLIHDDSLTFKEDIQKAQVSGQGDSLHEHIANLAGSPAIKKGILQTVKVVDELVKVMGRHKPENIVIEMARENQTTQKGQKNSRERMKRIEEGIKELGSQILKEHPVENTQLQNEKLYLYYLQNGRDMYVDQELDINRLSDYDVDHIVPQSFLKDDSIDNKVLTRSDKARGKSDNVPSEEVVKKMKNYWRQLLNAKLITQRKFDNLTKAERGGLSELDKAGFIKRQLVETRQITKHVAQILDSRMNTKYDENDKLIREVKVITLKSKLVSDFRKDFQFYKVREINNYHHAHDAYLNAVVGTALIKKYPKLESEFVYGDYKVYDVRKMIAKSEQEIGKATAKYFFYSNIMNFFKTEITLANGEIRKRPLIETNGETGEIVWDKGRDFATVRKVLSMPQVNIVKKTEVQTGGFSKESILPKRNSDKLIARKKDWDPKKYGGFDSPTVAYSVLVVAKVEKGKSKKLKSVKELLGITIMERSSFEKNPIDFLEAKGYKEVKKDLIIKLPKYSLFELENGRKRMLASAGELQKGNELALPSKYVNFLYLASHYEKLKGSPEDNEQKQLFVEQHKHYLDEIIEQISEFSKRVILADANLDKVLSAYNKHRDKPIREQAENIIHLFTLTNLGAPAAFKYFDTTIDRKRYTSTKEVLDATLIHQSITGLYETRIDLSQLGGDGGPAPGSSGGTLGDQGSRGSDPLPEPRVTLTVEGIPTEFLVNTGAEHSVLTKPMGKMGSKRTVVAGATGSKVYPWTTKRLLKIGQKQVTHSFLVIPECPAPLLGRDLLTKLKAQIQFSTEGPQVTWEDRPAMCLVLNLEEEYRLHEKPVPPSIDPSWLQLFPMVWAEKAGMGLANQVPPVVVELKSDASPVAVRQYPMSKEAREGIRPHIQRFLDLGILVPCQSPWNTPLLPVKKPGTNDYRPVQDLREVNKRVQDIHPTVPNPYNLLSSLPPSHTWYSVLDLKDAFFCLKLHPNSQPLFAFEWRDPEKGNTGQLTWTRLPQGFKNSPTLFNEALHRDLASFRALNPQVVMLQYVDDLLVAAPTYRDCKEGTRRLLQELSKLGYRVSAKKAQLCREEVTYLGYLLKGGKRWLTPARKATVMKIPTPTTPRQVREFLGTAGFCRLWIPGFASLAAPLYPLTRPKVPFTWTEAHQEAFGRIKEALLSAPALALPDLTKPFALYVDEKEGVARGVLTQTLGPWRRPVAYLSKKLDPVASGWPTCLKAIAAVALLLKDADKLTLGQNVLVIAPHNLESIVRQPPDRWMTNARMTHYQSLLLNERVSFAPPAILNPATLLPVESDDTPIHICSEILAEETGTRPDLRDQPLPGVPAWYTDGSSFIMDGRRQAGAAIVDNKRTVWASNLPEGTSAQKAELIALTQALRLAEGKSINIYTDSRYAFATAHVHGAIYKQRGWLTSAGKDIKNKEEILALLEAIHLPKRVAIIHCPGHQRGTDPVATGNRKADEAAKQAAQSTRILTETTKNAGKRTADGSEFEKRTADGSEFESPKKKAKVE

SEQ ID NO: 6759 - protein, 2091 aa, synthetic construct
MPAAKRVKLDGGDKKYSIGLDIGTNSVGWAVITDEYKVPSKKFKVLGNTDRHSIKKNLIGALLFDSGETAEATRLKRTARRRYTRRKNRICYLQEIFSNEMAKVDDSFFHRLEESFLVEEDKKHERHPIFGNIVDEVAYHEKYPTIYHLRKKLVDSTDKADLRLIYLALAHMIKFRGHFLIEGDLNPDNSDVDKLFIQLVQTYNQLFEENPINASGVDAKAILSARLSKSRRLENLIAQLPGEKKNGLFGNLIALSLGLTPNFKSNFDLAEDAKLQLSKDTYDDDLDNLLAQIGDQYADLFLAAKNLSDAILLSDILRVNTEITKAPLSASMIKRYDEHHQDLTLLKALVRQQLPEKYKEIFFDQSKNGYAGYIDGGASQEEFYKFIKPILEKMDGTEELLVKLNREDLLRKQRTFDNGSIPHQIHLGELHAILRRQEDFYPFLKDNREKIEKILTFRIPYYVGPLARGNSRFAWMTRKSEETITPWNFEEVVDKGASAQSFIERMTNFDKNLPNEKVLPKHSLLYEYFTVYNELTKVKYVTEGMRKPAFLSGEQKKAIVDLLFKTNRKVTVKQLKEDYFKKIECFDSVEISGVEDRFNASLGTYHDLLKIIKDKDFLDNEENEDILEDIVLTLTLFEDREMIEERLKTYAHLFDDKVMKQLKRRRYTGWGRLSRKLINGIRDKQSGKTILDFLKSDGFANRNFMQLIHDDSLTFKEDIQKAQVSGQGDSLHEHIANLAGSPAIKKGILQTVKVVDELVKVMGRHKPENIVIEMARENQTTQKGQKNSRERMKRIEEGIKELGSQILKEHPVENTQLQNEKLYLYYLQNGRDMYVDQELDINRLSDYDVDHIVPQSFLKDDSIDNKVLTRSDKARGKSDNVPSEEVVKKMKNYWRQLLNAKLITQRKFDNLTKAERGGLSELDKAGFIKRQLVETRQITKHVAQILDSRMNTKYDENDKLIREVKVITLKSKLVSDFRKDFQFYKVREINNYHHAHDAYLNAVVGTALIKKYPKLESEFVYGDYKVYDVRKMIAKSEQEIGKATAKYFFYSNIMNFFKTEITLANGEIRKRPLIETNGETGEIVWDKGRDFATVRKVLSMPQVNIVKKTEVQTGGFSKESILPKRNSDKLIARKKDWDPKKYGGFDSPTVAYSVLVVAKVEKGKSKKLKSVKELLGITIMERSSFEKNPIDFLEAKGYKEVKKDLIIKLPKYSLFELENGRKRMLASAGELQKGNELALPSKYVNFLYLASHYEKLKGSPEDNEQKQLFVEQHKHYLDEIIEQISEFSKRVILADANLDKVLSAYNKHRDKPIREQAENIIHLFTLTNLGAPAAFKYFDTTIDRKRYTSTKEVLDATLIHQSITGLYETRIDLSQLGGDGGPAPGSSGGTLNLEDEYRLYETSAEPEVSPGSTWLSDFPQAWAETGGMGLAVRQAPLIIPLKATSTPVSIKQYPMSQEAKLGIKPHIQRLLDQGILVPCQSPWNTPLLPVKKPGTNDYRPVQDLREVNKRVEDIHPTVPNPYNLLSGLPPSHRWYTVLDLKDAFFCLRLHPTSQPLFAFEWRDPGMGISGQLTWTRLPQGFKNSPTLFNEALHRDLADFRIQHPDLILLQYVDDILLAATSELDCQQGTRALLLTLGNLGYRASAKKAQLCQKQVKYLGYLLKEGQRWLTEARKETVMGQPTPKTPRQLREFLGTAGFCRLWIPGFAEMAAPLYPLTKPGTLFNWGPDQQKAYQEIKQALLTAPALGLPDLTKPFELFVDEKQGYAKGVLTQKLGPWRRPVAYLSKKLDPVAAGWPPCLRMVAAIAVLRKDAGKLTMGQPLVILAPHAVEALVKQPPDRWLSNARMTHYQAMLLDTDRVQFGPVVALNPATLLPLPEEGAPHDCLEILAETHGTRPDLTDQPIPDADHTWYTDGSSFLQEGQRKAGAAVTTETEVIWARALPAGTSAQRAELIALTQALKMAEGKRLNVYTDSRYAFATAHIHGEIYRRRGWLTSEGREIKNKSEILALLKALFLPKRLSIIHCLGHQKGDSAEARGNRLADQAAREAAIKTPPDTSTLLAGKRTADGSEFEKRTADGSEFESPKKKAKVE

SEQ ID NO: 6760 - protein, 2091 aa, synthetic construct; identical to SEQ ID NO: 4513

SEQ ID NO: 6761 - protein, 2091 aa, synthetic construct; identical to SEQ ID NO: 4513

SEQ ID NO: 6762 - protein, 2082 aa, synthetic construct
MPAAKRVKLDGGDKKYSIGLDIGTNSVGWAVITDEYKVPSKKFKVLGNTDRHSIKKNLIGALLFDSGETAEATRLKRTARRRYTRRKNRICYLQEIFSNEMAKVDDSFFHRLEESFLVEEDKKHERHPIFGNIVDEVAYHEKYPTIYHLRKKLVDSTDKADLRLIYLALAHMIKFRGHFLIEGDLNPDNSDVDKLFIQLVQTYNQLFEENPINASGVDAKAILSARLSKSRRLENLIAQLPGEKKNGLFGNLIALSLGLTPNFKSNFDLAEDAKLQLSKDTYDDDLDNLLAQIGDQYADLFLAAKNLSDAILLSDILRVNTEITKAPLSASMIKRYDEHHQDLTLLKALVRQQLPEKYKEIFFDQSKNGYAGYIDGGASQEEFYKFIKPILEKMDGTEELLVKLNREDLLRKQRTFDNGSIPHQIHLGELHAILRRQEDFYPFLKDNREKIEKILTFRIPYYVGPLARGNSRFAWMTRKSEETITPWNFEEVVDKGASAQSFIERMTNFDKNLPNEKVLPKHSLLYEYFTVYNELTKVKYVTEGMRKPAFLSGEQKKAIVDLLFKTNRKVTVKQLKEDYFKKIECFDSVEISGVEDRFNASLGTYHDLLKIIKDKDFLDNEENEDILEDIVLTLTLFEDREMIEERLKTYAHLFDDKVMKQLKRRRYTGWGRLSRKLINGIRDKQSGKTILDFLKSDGFANRNFMQLIHDDSLTFKEDIQKAQVSGQGDSLHEHIANLAGSPAIKKGILQTVKVVDELVKVMGRHKPENIVIEMARENQTTQKGQKNSRERMKRIEEGIKELGSQILKEHPVENTQLQNEKLYLYYLQNGRDMYVDQELDINRLSDYDVDHIVPQSFLKDDSIDNKVLTRSDKARGKSDNVPSEEVVKKMKNYWRQLLNAKLITQRKFDNLTKAERGGLSELDKAGFIKRQLVETRQITKHVAQILDSRMNTKYDENDKLIREVKVITLKSKLVSDFRKDFQFYKVREINNYHHAHDAYLNAVVGTALIKKYPKLESEFVYGDYKVYDVRKMIAKSEQEIGKATAKYFFYSNIMNFFKTEITLANGEIRKRPLIETNGETGEIVWDKGRDFATVRKVLSMPQVNIVKKTEVQTGGFSKESILPKRNSDKLIARKKDWDPKKYGGFDSPTVAYSVLVVAKVEKGKSKKLKSVKELLGITIMERSSFEKNPIDFLEAKGYKEVKKDLIIKLPKYSLFELENGRKRMLASAGELQKGNELALPSKYVNFLYLASHYEKLKGSPEDNEQKQLFVEQHKHYLDEIIEQISEFSKRVILADANLDKVLSAYNKHRDKPIREQAENIIHLFTLTNLGAPAAFKYFDTTIDRKRYTSTKEVLDATLIHQSITGLYETRIDLSQLGGDGGPAPGSSGGIPWLMKKPLQLTTLVPLQEYEERLLKQTMLTGSYKEKLQSLFLKYDALWQHWENQVGHRRIKPHHIATGTVNPRPQKQYPINPKAKASIQTVINDLLKQGVLIQQNSIMNTPVYPVPKPDGKWRMVLDYREVNKTIPLIAAQNQHSAGILSSIFRGKYKTTLDLSNGFWAHSITPESYWLTAFTWLGQQYCWTRLPQGFLNSPALFNADVVDLLKEVPNVQVYVDDIYISHDDPREHLEQLEKVFSLLLNAGYVVSLKKSEIAQHEVEFLGFNITKEGRGLTETFKQKLLNITPPRDLKQLQSILGKLNFARNFIPNFSELVKPLYNIIATAPGKYITWTTDNSQQLQNIISMLNSAENLEERNPEVRLIMKVNTSPSAGYIRFYNEFAKRPIMYLNYVYTKAEVKFTNTEKLLTTIHKGLIKALDLGMGQEILVYSPIVSMTKIQKTPLPERKALPIRWITWMSYLEDPRIQFHYDKTLPELQQVPTVTDDIIAKIKHPSEFSMVFYTDGSAIKHPNVNKSHNAGMGIAQVQFKPEFTVINTWSIPLGDHTAQLAEVAAVEFACKKALKIDGPVLIVTDSFYVAESVNKELPYWQSNGFFNNKKKPLKHVSKWKSIADCIQLKPDIIIIHEKGHQPTASTFHTEGNNLADKLATQGSYVVNAGKRTADGSEFEKRTADGSEFESPKKKAKVE

SEQ ID NO: 6763 - protein, 2012 aa, synthetic construct
MPAAKRVKLDGGDKKYSIGLDIGTNSVGWAVITDEYKVPSKKFKVLGNTDRHSIKKNLIGALLFDSGETAEATRLKRTARRRYTRRKNRICYLQEIFSNEMAKVDDSFFHRLEESFLVEEDKKHERHPIFGNIVDEVAYHEKYPTIYHLRKKLVDSTDKADLRLIYLALAHMIKFRGHFLIEGDLNPDNSDVDKLFIQLVQTYNQLFEENPINASGVDAKAILSARLSKSRRLENLIAQLPGEKKNGLFGNLIALSLGLTPNFKSNFDLAEDAKLQLSKDTYDDDLDNLLAQIGDQYADLFLAAKNLSDAILLSDILRVNTEITKAPLSASMIKRYDEHHQDLTLLKALVRQQLPEKYKEIFFDQSKNGYAGYIDGGASQEEFYKFIKPILEKMDGTEELLVKLNREDLLRKQRTFDNGSIPHQIHLGELHAILRRQEDFYPFLKDNREKIEKILTFRIPYYVGPLARGNSRFAWMTRKSEETITPWNFEEVVDKGASAQSFIERMTNFDKNLPNEKVLPKHSLLYEYFTVYNELTKVKYVTEGMRKPAFLSGEQKKAIVDLLFKTNRKVTVKQLKEDYFKKIECFDSVEISGVEDRFNASLGTYHDLLKIIKDKDFLDNEENEDILEDIVLTLTLFEDREMIEERLKTYAHLFDDKVMKQLKRRRYTGWGRLSRKLINGIRDKQSGKTILDFLKSDGFANRNFMQLIHDDSLTFKEDIQKAQVSGQGDSLHEHIANLAGSPAIKKGILQTVKVVDELVKVMGRHKPENIVIEMARENQTTQKGQKNSRERMKRIEEGIKELGSQILKEHPVENTQLQNEKLYLYYLQNGRDMYVDQELDINRLSDYDVDHIVPQSFLKDDSIDNKVLTRSDKARGKSDNVPSEEVVKKMKNYWRQLLNAKLITQRKFDNLTKAERGGLSELDKAGFIKRQLVETRQITKHVAQILDSRMNTKYDENDKLIREVKVITLKSKLVSDFRKDFQFYKVREINNYHHAHDAYLNAVVGTALIKKYPKLESEFVYGDYKVYDVRKMIAKSEQEIGKATAKYFFYSNIMNFFKTEITLANGEIRKRPLIETNGETGEIVWDKGRDFATVRKVLSMPQVNIVKKTEVQTGGFSKESILPKRNSDKLIARKKDWDPKKYGGFDSPTVAYSVLVVAKVEKGKSKKLKSVKELLGITIMERSSFEKNPIDFLEAKGYKEVKKDLIIKLPKYSLFELENGRKRMLASAGELQKGNELALPSKYVNFLYLASHYEKLKGSPEDNEQKQLFVEQHKHYLDEIIEQISEFSKRVILADANLDKVLSAYNKHRDKPIREQAENIIHLFTLTNLGAPAAFKYFDTTIDRKRYTSTKEVLDATLIHQSITGLYETRIDLSQLGGDGGPAPGSSGGPRSRAIDIPVPHADKISWKITDPVWVDQWPLTYEKTLAAIALVQEQLAAGHIEPTNSPWNTPIFIIKKKSGSWRLLQDLRAVNKVMVPMGALQPGLPSPVAIPLNYHKIVIDLKDCFFTIPLHPEDRPYFAFSVPQINFQSPMPRYQWKVLPQGMANSPTLCQKFVAAAIAPVRSQWPEAYILHYMDDILLACDSAEAAKACYAHIISCLTSYGLKIAPDKVQVSEPFSYLGFELHHQQVFTPRVCLKTDHLKTLNDFQKLLGDIQWLRPYLKLPTSALVPLNNILKPDPNPLSVRALTPEAKQSLALINKAIQNQSVQQISYNLPLVLLLLPTPHTPTAVFWQPNGTDPTKNGSPLLWLHLPASPSKVLLTYPSLLAMLIIKGRYTGRQLFGRDPHSIIIPYTQDQLTWLLQTSDEWAIALSSFTGDIDNHYPSDPVIQFAKLHQFIFPKITKCAPIPQATLVFTDGSSNGIAAYVIDNQPISIKSPYLSAQLVELYAILQVFTVLAHQPFNLYTDSAYIAQSVPLLETVPFIKSSTNATPLFSKLQQLILNRQHPFFIGHLRAHLNLPGPLAEGNALADAATQIFPIISDAGKRTADGSEFEKRTADGSEFESPKKKAKVE

SEQ ID NO: 6764 - protein, 2091 aa, synthetic construct
MPAAKRVKLDGGDKKYSIGLDIGTNSVGWAVITDEYKVPSKKFKVLGNTDRHSIKKNLIGALLFDSGETAEATRLKRTARRRYTRRKNRICYLQEIFSNEMAKVDDSFFHRLEESFLVEEDKKHERHPIFGNIVDEVAYHEKYPTIYHLRKKLVDSTDKADLRLIYLALAHMIKFRGHFLIEGDLNPDNSDVDKLFIQLVQTYNQLFEENPINASGVDAKAILSARLSKSRRLENLIAQLPGEKKNGLFGNLIALSLGLTPNFKSNFDLAEDAKLQLSKDTYDDDLDNLLAQIGDQYADLFLAAKNLSDAILLSDILRVNTEITKAPLSASMIKRYDEHHQDLTLLKALVRQQLPEKYKEIFFDQSKNGYAGYIDGGASQEEFYKFIKPILEKMDGTEELLVKLNREDLLRKQRTFDNGSIPHQIHLGELHAILRRQEDFYPFLKDNREKIEKILTFRIPYYVGPLARGNSRFAWMTRKSEETITPWNFEEVVDKGASAQSFIERMTNFDKNLPNEKVLPKHSLLYEYFTVYNELTKVKYVTEGMRKPAFLSGEQKKAIVDLLFKTNRKVTVKQLKEDYFKKIECFDSVEISGVEDRFNASLGTYHDLLKIIKDKDFLDNEENEDILEDIVLTLTLFEDREMIEERLKTYAHLFDDKVMKQLKRRRYTGWGRLSRKLINGIRDKQSGKTILDFLKSDGFANRNFMQLIHDDSLTFKEDIQKAQVSGQGDSLHEHIANLAGSPAIKKGILQTVKVVDELVKVMGRHKPENIVIEMARENQTTQKGQKNSRERMKRIEEGIKELGSQILKEHPVENTQLQNEKLYLYYLQNGRDMYVDQELDINRLSDYDVDHIVPQSFLKDDSIDNKVLTRSDKARGKSDNVPSEEVVKKMKNYWRQLLNAKLITQRKFDNLTKAERGGLSELDKAGFIKRQLVETRQITKHVAQILDSRMNTKYDENDKLIREVKVITLKSKLVSDFRKDFQFYKVREINNYHHAHDAYLNAVVGTALIKKYPKLESEFVYGDYKVYDVRKMIAKSEQEIGKATAKYFFYSNIMNFFKTEITLANGEIRKRPLIETNGETGEIVWDKGRDFATVRKVLSMPQVNIVKKTEVQTGGFSKESILPKRNSDKLIARKKDWDPKKYGGFDSPTVAYSVLVVAKVEKGKSKKLKSVKELLGITIMERSSFEKNPIDFLEAKGYKEVKKDLIIKLPKYSLFELENGRKRMLASAGELQKGNELALPSKYVNFLYLASHYEKLKGSPEDNEQKQLFVEQHKHYLDEIIEQISEFSKRVILADANLDKVLSAYNKHRDKPIREQAENIIHLFTLTNLGAPAAFKYFDTTIDRKRYTSTKEVLDATLIHQSITGLYETRIDLSQLGGDGGPAPGSSGGTLNIEDEYRLHETSKEPDVPLGSTWLSDFPQAWAETGGMGLAVRQAPLIIPLKATSTPVSIKQYPMSQEARLGIKPHIQRLLDQGILVPCQSPWNTPLLPVKKPGTNDYRPVQDLREVNKRVEDIHPTVPNPYNLLSGLPPSHQWYTVLDLKDAFFCLRLHPTSQPLFAFEWRDPEMGISGQLTWTRLPQGFKNSPTLFNEALHRDLADFRIQHPDLILLQYVDDLLLAATSEQDCQRGTRALLQTLGNLGYRASAKKAQICQKQVKYLGYLLKEGQRWLTEARKETVMGQPTPKTPRQLREFLGKAGFCRLFIPGFAEMAAPLYPLTKPGTLFNWGPDQQKAYQEIKQALLTAPALGLPDLTKPFELFVDEKQGYAKGVLTQKLGPWRRPVAYLSKKLDPVAAGWPPCLRMVAAIAVLTKDAGKLTMGQPLVILAPHAVEALVKQPPDRWLSNARMTHYQAMLLDTDRVQFGPVVALNPATLLPLPEKEAPHDCLEILAETHGTRPDLTDQPIPDADYTWYTDGSSFLQEGQRRAGAAVTTETEVIWARALPAGTSAQRAELIALTQALKMAEGKKLNVYTDSRYAFATAHVHGEIYRRRGWLTSEGREIKNKNEILALLKALFLPKRLSIIHCPGHQKGNSAEARGNRMADQAAREAAMKAVLETSTLLAGKRTADGSEFEKRTADGSEFESPKKKAKVE

SEQ ID NO: 6765 - protein, 2095 aa, synthetic construct
MPAAKRVKLDGGDKKYSIGLDIGTNSVGWAVITDEYKVPSKKFKVLGNTDRHSIKKNLIGALLFDSGETAEATRLKRTARRRYTRRKNRICYLQEIFSNEMAKVDDSFFHRLEESFLVEEDKKHERHPIFGNIVDEVAYHEKYPTIYHLRKKLVDSTDKADLRLIYLALAHMIKFRGHFLIEGDLNPDNSDVDKLFIQLVQTYNQLFEENPINASGVDAKAILSARLSKSRRLENLIAQLPGEKKNGLFGNLIALSLGLTPNFKSNFDLAEDAKLQLSKDTYDDDLDNLLAQIGDQYADLFLAAKNLSDAILLSDILRVNTEITKAPLSASMIKRYDEHHQDLTLLKALVRQQLPEKYKEIFFDQSKNGYAGYIDGGASQEEFYKFIKPILEKMDGTEELLVKLNREDLLRKQRTFDNGSIPHQIHLGELHAILRRQEDFYPFLKDNREKIEKILTFRIPYYVGPLARGNSRFAWMTRKSEETITPWNFEEVVDKGASAQSFIERMTNFDKNLPNEKVLPKHSLLYEYFTVYNELTKVKYVTEGMRKPAFLSGEQKKAIVDLLFKTNRKVTVKQLKEDYFKKIECFDSVEISGVEDRFNASLGTYHDLLKIIKDKDFLDNEENEDILEDIVLTLTLFEDREMIEERLKTYAHLFDDKVMKQLKRRRYTGWGRLSRKLINGIRDKQSGKTILDFLKSDGFANRNFMQLIHDDSLTFKEDIQKAQVSGQGDSLHEHIANLAGSPAIKKGILQTVKVVDELVKVMGRHKPENIVIEMARENQTTQKGQKNSRERMKRIEEGIKELGSQILKEHPVENTQLQNEKLYLYYLQNGRDMYVDQELDINRLSDYDVDHIVPQSFLKDDSIDNKVLTRSDKARGKSDNVPSEEVVKKMKNYWRQLLNAKLITQRKFDNLTKAERGGLSELDKAGFIKRQLVETRQITKHVAQILDSRMNTKYDENDKLIREVKVITLKSKLVSDFRKDFQFYKVREINNYHHAHDAYLNAVVGTALIKKYPKLESEFVYGDYKVYDVRKMIAKSEQEIGKATAKYFFYSNIMNFFKTEITLANGEIRKRPLIETNGETGEIVWDKGRDFATVRKVLSMPQVNIVKKTEVQTGGFSKESILPKRNSDKLIARKKDWDPKKYGGFDSPTVAYSVLVVAKVEKGKSKKLKSVKELLGITIMERSSFEKNPIDFLEAKGYKEVKKDLIIKLPKYSLFELENGRKRMLASAGELQKGNELALPSKYVNFLYLASHYEKLKGSPEDNEQKQLFVEQHKHYLDEIIEQISEFSKRVILADANLDKVLSAYNKHRDKPIREQAENIIHLFTLTNLGAPAAFKYFDTTIDRKRYTSTKEVLDATLIHQSITGLYETRIDLSQLGGDGGEAAAKPAPGGTAPLEEEYRLFLEAPIQNVTLLEQWKREIPKVWAEINPPGLASTQAPIHVQLLSTALPVRVRQYPITLEAKRSLRETIRKFRAAGILRPVHSPWNTPLLPVRKSGTSEYRMVQDLREVNKRVETIHPTVPNPYTLLSLLPPDRIWYSVLDLKDAFFCIPLAPESQLIFAFEWADAEEGESGQLTWTRLPQGFKNSPTLFNEALNRDLQGFRLDHPSVSLLQYVDDLLIAADTQAACLSATRDLLMTLAELGYRVSGKKAQLCQEEVTYLGFKIHKGSRSLSNSRTQAILQIPVPKTKRQVREFLGKIGYCRLFIPGFAELAQPLYAATRPGNDPLVWGEKEEEAFQSLKLALTQPPALALPSLDKPFQLFVEETSGAAKGVLTQALGPWKRPVAYLSKRLDPVAAGWPRCLRAIAAAALLTREASKLTFGQDIEITSSHNLESLLRSPPDKWLTNARITQYQVLLLDPPRVRFKQTAALNPATLLPETDDTLPIHHCLDTLDSLTSTRPDLTDQPLAQAEATLFTDGSSYIRDGKRYAGAAVVTLDSVIWAEPLPIGTSAQKAELIALTKALEWSKDKSVNIYTDSRYAFATLHVHGMIYRERGWLTAGGKAIKNAPEILALLTAVWLPKRVAVMHCKGHQKDDAPTSTGNRRADEVAREVAIRPLSTQATISAGKRTADGSEFEKRTADGSEFESPKKKAKVE

SEQ ID NO: 6766 - protein, 2084 aa, synthetic construct
MPAAKRVKLDGGDKKYSIGLDIGTNSVGWAVITDEYKVPSKKFKVLGNTDRHSIKKNLIGALLFDSGETAEATRLKRTARRRYTRRKNRICYLQEIFSNEMAKVDDSFFHRLEESFLVEEDKKHERHPIFGNIVDEVAYHEKYPTIYHLRKKLVDSTDKADLRLIYLALAHMIKFRGHFLIEGDLNPDNSDVDKLFIQLVQTYNQLFEENPINASGVDAKAILSARLSKSRRLENLIAQLPGEKKNGLFGNLIALSLGLTPNFKSNFDLAEDAKLQLSKDTYDDDLDNLLAQIGDQYADLFLAAKNLSDAILLSDILRVNTEITKAPLSASMIKRYDEHHQDLTLLKALVRQQLPEKYKEIFFDQSKNGYAGYIDGGASQEEFYKFIKPILEKMDGTEELLVKLNREDLLRKQRTFDNGSIPHQIHLGELHAILRRQEDFYPFLKDNREKIEKILTFRIPYYVGPLARGNSRFAWMTRKSEETITPWNFEEVVDKGASAQSFIERMTNFDKNLPNEKVLPKHSLLYEYFTVYNELTKVKYVTEGMRKPAFLSGEQKKAIVDLLFKTNRKVTVKQLKEDYFKKIECFDSVEISGVEDRFNASLGTYHDLLKIIKDKDFLDNEENEDILEDIVLTLTLFEDREMIEERLKTYAHLFDDKVMKQLKRRRYTGWGRLSRKLINGIRDKQSGKTILDFLKSDGFANRNFMQLIHDDSLTFKEDIQKAQVSGQGDSLHEHIANLAGSPAIKKGILQTVKVVDELVKVMGRHKPENIVIEMARENQTTQKGQKNSRERMKRIEEGIKELGSQILKEHPVENTQLQNEKLYLYYLQNGRDMYVDQELDINRLSDYDVDHIVPQSFLKDDSIDNKVLTRSDKARGKSDNVPSEEVVKKMKNYWRQLLNAKLITQRKFDNLTKAERGGLSELDKAGFIKRQLVETRQITKHVAQILDSRMNTKYDENDKLIREVKVITLKSKLVSDFRKDFQFYKVREINNYHHAHDAYLNAVVGTALIKKYPKLESEFVYGDYKVYDVRKMIAKSEQEIGKATAKYFFYSNIMNFFKTEITLANGEIRKRPLIETNGETGEIVWDKGRDFATVRKVLSMPQVNIVKKTEVQTGGFSKESILPKRNSDKLIARKKDWDPKKYGGFDSPTVAYSVLVVAKVEKGKSKKLKSVKELLGITIMERSSFEKNPIDFLEAKGYKEVKKDLIIKLPKYSLFELENGRKRMLASAGELQKGNELALPSKYVNFLYLASHYEKLKGSPEDNEQKQLFVEQHKHYLDEIIEQISEFSKRVILADANLDKVLSAYNKHRDKPIREQAENIIHLFTLTNLGAPAAFKYFDTTIDRKRYTSTKEVLDATLIHQSITGLYETRIDLSQLGGDGGEAAAKPAPGGVPWILKKPLELTIKLDLEEQQGTLLNNSILSKKGKEELKQLFEKYSALWQSWENQVGHRRIRPHKIATGTVKPTPQKQYHINPKAKPDIQIVINDLLKQGVLIQKESTMNTPVYPVPKPNGRWRMVLDYRAVNKVTPLIAVQNQHSYGILGSLFKGRYKTTIDLSNGFWAHPIVPEDYWITAFTWQGKQYCWTVLPQGFLNSPGLFNGDVVDLLQGIPNVEVYVDDVYISHDSEKEHLEYLDILFNRLKEAGYIISLKKSNIANSIVDFLGFQITNEGRGLTDTFKEKLENITAPTTLKQLQSILGLLNFARNFIPDFTELIAPLYALIPKSPKNYVPWQIEHSTTLETLITKLNGAEYLQGRKGDKTLIMKVNASYTTGYIRYYNEGEKKPISYVSIVFSKTELKFTELEKLLTTVHKGLLKALDLSMGQNIHVYSPIVSMQNIQKTPQTAKKALASRWLSWLSYLEDPRIRFFYDPQMPALKDLPAVDTGKDNKKHPSNFQHIFYTDGSAITSPTKEGHLNAGMGIVYFINKDGNLQKQQEWSISLGNHTAQFAEIAAFEFALKKCLPLGGNILVVTDSNYVAKAYNEELDVWASNGFVNNRKKPLKHISKWKSVADLKRLRPDVVVTHEPGHQKLDSSPHAYGNNLADQLATQASFKVHAGKRTADGSEFEKRTADGSEFESPKKKAKVE

SEQ ID NO: 6767 - protein, 2084 aa, synthetic construct
MPAAKRVKLDGGDKKYSIGLDIGTNSVGWAVITDEYKVPSKKFKVLGNTDRHSIKKNLIGALLFDSGETAEATRLKRTARRRYTRRKNRICYLQEIFSNEMAKVDDSFFHRLEESFLVEEDKKHERHPIFGNIVDEVAYHEKYPTIYHLRKKLVDSTDKADLRLIYLALAHMIKFRGHFLIEGDLNPDNSDVDKLFIQLVQTYNQLFEENPINASGVDAKAILSARLSKSRRLENLIAQLPGEKKNGLFGNLIALSLGLTPNFKSNFDLAEDAKLQLSKDTYDDDLDNLLAQIGDQYADLFLAAKNLSDAILLSDILRVNTEITKAPLSASMIKRYDEHHQDLTLLKALVRQQLPEKYKEIFFDQSKNGYAGYIDGGASQEEFYKFIKPILEKMDGTEELLVKLNREDLLRKQRTFDNGSIPHQIHLGELHAILRRQEDFYPFLKDNREKIEKILTFRIPYYVGPLARGNSRFAWMTRKSEETITPWNFEEVVDKGASAQSFIERMTNFDKNLPNEKVLPKHSLLYEYFTVYNELTKVKYVTEGMRKPAFLSGEQKKAIVDLLFKTNRKVTVKQLKEDYFKKIECFDSVEISGVEDRFNASLGTYHDLLKIIKDKDFLDNEENEDILEDIVLTLTLFEDREMIEERLKTYAHLFDDKVMKQLKRRRYTGWGRLSRKLINGIRDKQSGKTILDFLKSDGFANRNFMQLIHDDSLTFKEDIQKAQVSGQGDSLHEHIANLAGSPAIKKGILQTVKVVDELVKVMGRHKPENIVIEMARENQTTQKGQKNSRERMKRIEEGIKELGSQILKEHPVENTQLQNEKLYLYYLQNGRDMYVDQELDINRLSDYDVDHIVPQSFLKDDSIDNKVLTRSDKARGKSDNVPSEEVVKKMKNYWRQLLNAKLITQRKFDNLTKAERGGLSELDKAGFIKRQLVETRQITKHVAQILDSRMNTKYDENDKLIREVKVITLKSKLVSDFRKDFQFYKVREINNYHHAHDAYLNAVVGTALIKKYPKLESEFVYGDYKVYDVRKMIAKSEQEIGKATAKYFFYSNIMNFFKTEITLANGEIRKRPLIETNGETGEIVWDKGRDFATVRKVLSMPQVNIVKKTEVQTGGFSKESILPKRNSDKLIARKKDWDPKKYGGFDSPTVAYSVLVVAKVEKGKSKKLKSVKELLGITIMERSSFEKNPIDFLEAKGYKEVKKDLIIKLPKYSLFELENGRKRMLASAGELQKGNELALPSKYVNFLYLASHYEKLKGSPEDNEQKQLFVEQHKHYLDEIIEQISEFSKRVILADANLDKVLSAYNKHRDKPIREQAENIIHLFTLTNLGAPAAFKYFDTTIDRKRYTSTKEVLDATLIHQSITGLYETRIDLSQLGGDGGEAAAKPAPGGVPWLTQQPLQLTILVPLQEYQEKILSKTALPEDQKQQLKTLFVKYDNLWQHWENQVGHRKIRPHNIATGDYPPRPQKQYPINPKAKPSIQIVIDDLLKQGVLTPQNSTMNTPVYPVPKPDGRWRMVLDYREVNKTIPLTAAQNQHSAGILATIVRQKYKTTLDLANGFWAHPITPESYWLTAFTWQGKQYCWTRLPQGFLNSPALFNADVVDLLKEIPNVQVYVDDIYLSHDDPKEHVQQLEKVFQILLQAGYVVSLKKSEIGQKTVEFLGFNITKEGRGLTDTFKTKLLNITPPKDLKQLQSILGKLNFARNFIPNFAELVQPLYNLIAPAKGKYIEWSEENTKQLNMVIEALNTASNLEERLPEQRLVIKVNTSPSAGYVRYYNETGKKPIMYLNYVFSKAELKFSMLEKLLTTMHKALIKAMDLAMGQEILVYSPIVSMTKIQKTPLPERKALPIRWITWMTYLEDPRIQFHYDKTLPELKHIPDVYTSSQSPVKHPSQYEGVFYTDGSAIKSPDPTKSNNAGMGIVHATYKPEYQVLNQWSIPLGNHTAQMAEIAAVEFACKKALKIPGPVLVITDSFYVAESANKELPYWKSNGFVNNKKKPLKHISKWKSIAECLSMKPDITIQHEKGISLQIPVFILKGNALADKLATQGSYVVNAGKRTADGSEFEKRTADGSEFESPKKKAKVE

SEQ ID NO: 6768 - protein, 2173 aa, synthetic construct
MPAAKRVKLDGGDKKYSIGLDIGTNSVGWAVITDEYKVPSKKFKVLGNTDRHSIKKNLIGALLFDSGETAEATRLKRTARRRYTRRKNRICYLQEIFSNEMAKVDDSFFHRLEESFLVEEDKKHERHPIFGNIVDEVAYHEKYPTIYHLRKKLVDSTDKADLRLIYLALAHMIKFRGHFLIEGDLNPDNSDVDKLFIQLVQTYNQLFEENPINASGVDAKAILSARLSKSRRLENLIAQLPGEKKNGLFGNLIALSLGLTPNFKSNFDLAEDAKLQLSKDTYDDDLDNLLAQIGDQYADLFLAAKNLSDAILLSDILRVNTEITKAPLSASMIKRYDEHHQDLTLLKALVRQQLPEKYKEIFFDQSKNGYAGYIDGGASQEEFYKFIKPILEKMDGTEELLVKLNREDLLRKQRTFDNGSIPHQIHLGELHAILRRQEDFYPFLKDNREKIEKILTFRIPYYVGPLARGNSRFAWMTRKSEETITPWNFEEVVDKGASAQSFIERMTNFDKNLPNEKVLPKHSLLYEYFTVYNELTKVKYVTEGMRKPAFLSGEQKKAIVDLLFKTNRKVTVKQLKEDYFKKIECFDSVEISGVEDRFNASLGTYHDLLKIIKDKDFLDNEENEDILEDIVLTLTLFEDREMIEERLKTYAHLFDDKVMKQLKRRRYTGWGRLSRKLINGIRDKQSGKTILDFLKSDGFANRNFMQLIHDDSLTFKEDIQKAQVSGQGDSLHEHIANLAGSPAIKKGILQTVKVVDELVKVMGRHKPENIVIEMARENQTTQKGQKNSRERMKRIEEGIKELGSQILKEHPVENTQLQNEKLYLYYLQNGRDMYVDQELDINRLSDYDVDHIVPQSFLKDDSIDNKVLTRSDKARGKSDNVPSEEVVKKMKNYWRQLLNAKLITQRKFDNLTKAERGGLSELDKAGFIKRQLVETRQITKHVAQILDSRMNTKYDENDKLIREVKVITLKSKLVSDFRKDFQFYKVREINNYHHAHDAYLNAVVGTALIKKYPKLESEFVYGDYKVYDVRKMIAKSEQEIGKATAKYFFYSNIMNFFKTEITLANGEIRKRPLIETNGETGEIVWDKGRDFATVRKVLSMPQVNIVKKTEVQTGGFSKESILPKRNSDKLIARKKDWDPKKYGGFDSPTVAYSVLVVAKVEKGKSKKLKSVKELLGITIMERSSFEKNPIDFLEAKGYKEVKKDLIIKLPKYSLFELENGRKRMLASAGELQKGNELALPSKYVNFLYLASHYEKLKGSPEDNEQKQLFVEQHKHYLDEIIEQISEFSKRVILADANLDKVLSAYNKHRDKPIREQAENIIHLFTLTNLGAPAAFKYFDTTIDRKRYTSTKEVLDATLIHQSITGLYETRIDLSQLGGDGGEAAAKPAPGGMNPLQLLQPLPAEIKGTKLLAHWNSGATITCIPESFLEDEQPIKKTLIKTIHGEKQQNVYYVTFKVKGRKVEAEVIASPYEYILLSPTDVPWLTQQPLQLTILVPLQEYQEKILSKTALPEDQKQQLKTLFVKYDNLWQHWENQVGHRKIRPHNIATGDYPPRPQKQYPINPKAKPSIQIVIDDLLKQGVLTPQNSTMNTPVYPVPKPDGRWRMVLDYREVNKTIPLTAAQNQHSAGILATIVRQKYKTTLDLANGFWAHPITPESYWLTAFTWQGKQYCWTRLPQGFLNSPALFNADVVDLLKEIPNVQVYVDDIYLSHDDPKEHVQQLEKVFQILLQAGYVVSLKKSEIGQKTVEFLGFNITKEGRGLTDTFKTKLLNITPPKDLKQLQSILGKLNFARNFIPNFAELVQPLYNLIAPAKGKYIEWSEENTKQLNMVIEALNTASNLEERLPEQRLVIKVNTSPSAGYVRYYNETGKKPIMYLNYVFSKAELKFSMLEKLLTTMHKALIKAMDLAMGQEILVYSPIVSMTKIQKTPLPERKALPIRWITWMTYLEDPRIQFHYDKTLPELKHIPDVYTSSQSPVKHPSQYEGVFYTDGSAIKSPDPTKSNNAGMGIVHATYKPEYQVLNQWSIPLGNHTAQMAEIAAVEFACKKALKIPGPVLVITDSFYVAESANKELPYWKSNGFVNNKKKPLKHISKWKSIAECLSMKPDITIQHEKGISLQIPVFILKGNALADKLATQGSYVVNAGKRTADGSEFEKRTADGSEFESPKKKAKVE

SEQ ID NO: 6769 - protein, 2091 aa, synthetic construct
MPAAKRVKLDGGDKKYSIGLDIGTNSVGWAVITDEYKVPSKKFKVLGNTDRHSIKKNLIGALLFDSGETAEATRLKRTARRRYTRRKNRICYLQEIFSNEMAKVDDSFFHRLEESFLVEEDKKHERHPIFGNIVDEVAYHEKYPTIYHLRKKLVDSTDKADLRLIYLALAHMIKFRGHFLIEGDLNPDNSDVDKLFIQLVQTYNQLFEENPINASGVDAKAILSARLSKSRRLENLIAQLPGEKKNGLFGNLIALSLGLTPNFKSNFDLAEDAKLQLSKDTYDDDLDNLLAQIGDQYADLFLAAKNLSDAILLSDILRVNTEITKAPLSASMIKRYDEHHQDLTLLKALVRQQLPEKYKEIFFDQSKNGYAGYIDGGASQEEFYKFIKPILEKMDGTEELLVKLNREDLLRKQRTFDNGSIPHQIHLGELHAILRRQEDFYPFLKDNREKIEKILTFRIPYYVGPLARGNSRFAWMTRKSEETITPWNFEEVVDKGASAQSFIERMTNFDKNLPNEKVLPKHSLLYEYFTVYNELTKVKYVTEGMRKPAFLSGEQKKAIVDLLFKTNRKVTVKQLKEDYFKKIECFDSVEISGVEDRFNASLGTYHDLLKIIKDKDFLDNEENEDILEDIVLTLTLFEDREMIEERLKTYAHLFDDKVMKQLKRRRYTGWGRLSRKLINGIRDKQSGKTILDFLKSDGFANRNFMQLIHDDSLTFKEDIQKAQVSGQGDSLHEHIANLAGSPAIKKGILQTVKVVDELVKVMGRHKPENIVIEMARENQTTQKGQKNSRERMKRIEEGIKELGSQILKEHPVENTQLQNEKLYLYYLQNGRDMYVDQELDINRLSDYDVDHIVPQSFLKDDSIDNKVLTRSDKARGKSDNVPSEEVVKKMKNYWRQLLNAKLITQRKFDNLTKAERGGLSELDKAGFIKRQLVETRQITKHVAQILDSRMNTKYDENDKLIREVKVITLKSKLVSDFRKDFQFYKVREINNYHHAHDAYLNAVVGTALIKKYPKLESEFVYGDYKVYDVRKMIAKSEQEIGKATAKYFFYSNIMNFFKTEITLANGEIRKRPLIETNGETGEIVWDKGRDFATVRKVLSMPQVNIVKKTEVQTGGFSKESILPKRNSDKLIARKKDWDPKKYGGFDSPTVAYSVLVVAKVEKGKSKKLKSVKELLGITIMERSSFEKNPIDFLEAKGYKEVKKDLIIKLPKYSLFELENGRKRMLASAGELQKGNELALPSKYVNFLYLASHYEKLKGSPEDNEQKQLFVEQHKHYLDEIIEQISEFSKRVILADANLDKVLSAYNKHRDKPIREQAENIIHLFTLTNLGAPAAFKYFDTTIDRKRYTSTKEVLDATLIHQSITGLYETRIDLSQLGGDGGEAAAKPAPGGVLNLEEEYRLHEKPVPSSIDPSWLQLFPTVWAERAGMGLANQVPPVVVELRSGASPVAVRQYPMSKEAREGIRPHIQKFLDLGVLVPCRSPWNTPLLPVKKPGTNDYRPVQDLREINKRVQDIHPTVPNPYNLLSSLPPSYTWYSVLDLKDAFFCLRLHPNSQPLFAFEWKDPEKGNTGQLTWTRLPQGFKNSPTLFNEALHRDLAPFRALNPQVVLLQYVDDLLVAAPTYEDCKKGTQKLLQELSKLGYRVSAKKAQLCQREVTYLGYLLKEGKRWLTPARKATVMKIPVPTTPRQVREFLGKAGFCRLFIPGFASLAAPLYPLTKPSIPFIWTEEHQQAFDHIKKALLSAPALALPDLTKPFTLYIDERAGVARGVLTQTLGPWRRPVAYLSKKLDPVASGWPTCLKAVAAVALLLKDADKLTLGQNVTVIASHSLESIVRQPPDRWMTNARMTHYQSLLLNERVSFAPPAVLNPATLLPVESEATPVHRCSEILAEETGTRRDLEDQPLPGVPTWYTDGSSFITEGKRRAGAPIVDGKRTVWASSLPEGTSAQKAELVALTQALRLAEGKNINIYTDSRYAFATAHIHGAIYKQRGWLTSAGKDIKNKEEILALLEAIHLPRRVAIIHCPGHQRGSNPVATGNRRADEAAKQAALSTRVLAGTTKPAGKRTADGSEFEKRTADGSEFESPKKKAKVE

SEQ ID NO: 6770 - protein, 2124 aa, synthetic construct
MPAAKRVKLDGGDKKYSIGLDIGTNSVGWAVITDEYKVPSKKFKVLGNTDRHSIKKNLIGALLFDSGETAEATRLKRTARRRYTRRKNRICYLQEIFSNEMAKVDDSFFHRLEESFLVEEDKKHERHPIFGNIVDEVAYHEKYPTIYHLRKKLVDSTDKADLRLIYLALAHMIKFRGHFLIEGDLNPDNSDVDKLFIQLVQTYNQLFEENPINASGVDAKAILSARLSKSRRLENLIAQLPGEKKNGLFGNLIALSLGLTPNFKSNFDLAEDAKLQLSKDTYDDDLDNLLAQIGDQYADLFLAAKNLSDAILLSDILRVNTEITKAPLSASMIKRYDEHHQDLTLLKALVRQQLPEKYKEIFFDQSKNGYAGYIDGGASQEEFYKFIKPILEKMDGTEELLVKLNREDLLRKQRTFDNGSIPHQIHLGELHAILRRQEDFYPFLKDNREKIEKILTFRIPYYVGPLARGNSRFAWMTRKSEETITPWNFEEVVDKGASAQSFIERMTNFDKNLPNEKVLPKHSLLYEYFTVYNELTKVKYVTEGMRKPAFLSGEQKKAIVDLLFKTNRKVTVKQLKEDYFKKIECFDSVEISGVEDRFNASLGTYHDLLKIIKDKDFLDNEENEDILEDIVLTLTLFEDREMIEERLKTYAHLFDDKVMKQLKRRRYTGWGRLSRKLINGIRDKQSGKTILDFLKSDGFANRNFMQLIHDDSLTFKEDIQKAQVSGQGDSLHEHIANLAGSPAIKKGILQTVKVVDELVKVMGRHKPENIVIEMARENQTTQKGQKNSRERMKRIEEGIKELGSQILKEHPVENTQLQNEKLYLYYLQNGRDMYVDQELDINRLSDYDVDHIVPQSFLKDDSIDNKVLTRSDKARGKSDNVPSEEVVKKMKNYWRQLLNAKLITQRKFDNLTKAERGGLSELDKAGFIKRQLVETRQITKHVAQILDSRMNTKYDENDKLIREVKVITLKSKLVSDFRKDFQFYKVREINNYHHAHDAYLNAVVGTALIKKYPKLESEFVYGDYKVYDVRKMIAKSEQEIGKATAKYFFYSNIMNFFKTEITLANGEIRKRPLIETNGETGEIVWDKGRDFATVRKVLSMPQVNIVKKTEVQTGGFSKESILPKRNSDKLIARKKDWDPKKYGGFDSPTVAYSVLVVAKVEKGKSKKLKSVKELLGITIMERSSFEKNPIDFLEAKGYKEVKKDLIIKLPKYSLFELENGRKRMLASAGELQKGNELALPSKYVNFLYLASHYEKLKGSPEDNEQKQLFVEQHKHYLDEIIEQISEFSKRVILADANLDKVLSAYNKHRDKPIREQAENIIHLFTLTNLGAPAAFKYFDTTIDRKRYTSTKEVLDATLIHQSITGLYETRIDLSQLGGDGGEAAAKPAPGGLLGRDLLTKLKAQIQFSTEGPQVTWEDRPAMCLVLNLEEEYRLHEKPVPPSIDPSWLQLFPMVWAEKAGMGLANQVPPVVVELKSDASPVAVRQYPMSKEAREGIRPHIQRFLDLGILVPCQSPWNTPLLPVKKPGTNDYRPVQDLREVNKRVQDIHPTVPNPYNLLSSLPPSHTWYSVLDLKDAFFCLKLHPNSQPLFAFEWRDPEKGNTGQLTWTRLPQGFKNSPTLFNEALHRDLASFRALNPQVVMLQYVDDLLVAAPTYRDCKEGTRRLLQELSKLGYRVSAKKAQLCREEVTYLGYLLKGGKRWLTPARKATVMKIPTPTTPRQVREFLGTAGFCRLWIPGFASLAAPLYPLTRPKVPFTWTEAHQEAFGRIKEALLSAPALALPDLTKPFALYVDEKEGVARGVLTQTLGPWRRPVAYLSKKLDPVASGWPTCLKAIAAVALLLKDADKLTLGQNVLVIAPHNLESIVRQPPDRWMTNARMTHYQSLLLNERVSFAPPAILNPATLLPVESDDTPIHICSEILAEETGTRPDLRDQPLPGVPAWYTDGSSFIMDGRRQAGAAIVDNKRTVWASNLPEGTSAQKAELIALTQALRLAEGKSINIYTDSRYAFATAHVHGAIYKQRGWLTSAGKDIKNKEEILALLEAIHLPKRVAIIHCPGHQRGTDPVATGNRKADEAAKQAAQSTRILTETTKNAGKRTADGSEFEKRTADGSEFESPKKKAKVE

SEQ ID NO: 6771 - protein, 2124 aa, synthetic construct
MPAAKRVKLDGGDKKYSIGLDIGTNSVGWAVITDEYKVPSKKFKVLGNTDRHSIKKNLIGALLFDSGETAEATRLKRTARRRYTRRKNRICYLQEIFSNEMAKVDDSFFHRLEESFLVEEDKKHERHPIFGNIVDEVAYHEKYPTIYHLRKKLVDSTDKADLRLIYLALAHMIKFRGHFLIEGDLNPDNSDVDKLFIQLVQTYNQLFEENPINASGVDAKAILSARLSKSRRLENLIAQLPGEKKNGLFGNLIALSLGLTPNFKSNFDLAEDAKLQLSKDTYDDDLDNLLAQIGDQYADLFLAAKNLSDAILLSDILRVNTEITKAPLSASMIKRYDEHHQDLTLLKALVRQQLPEKYKEIFFDQSKNGYAGYIDGGASQEEFYKFIKPILEKMDGTEELLVKLNREDLLRKQRTFDNGSIPHQIHLGELHAILRRQEDFYPFLKDNREKIEKILTFRIPYYVGPLARGNSRFAWMTRKSEETITPWNFEEVVDKGASAQSFIERMTNFDKNLPNEKVLPKHSLLYEYFTVYNELTKVKYVTEGMRKPAFLSGEQKKAIVDLLFKTNRKVTVKQLKEDYFKKIECFDSVEISGVEDRFNASLGTYHDLLKIIKDKDFLDNEENEDILEDIVLTLTLFEDREMIEERLKTYAHLFDDKVMKQLKRRRYTGWGRLSRKLINGIRDKQSGKTILDFLKSDGFANRNFMQLIHDDSLTFKEDIQKAQVSGQGDSLHEHIANLAGSPAIKKGILQTVKVVDELVKVMGRHKPENIVIEMARENQTTQKGQKNSRERMKRIEEGIKELGSQILKEHPVENTQLQNEKLYLYYLQNGRDMYVDQELDINRLSDYDVDHIVPQSFLKDDSIDNKVLTRSDKARGKSDNVPSEEVVKKMKNYWRQLLNAKLITQRKFDNLTKAERGGLSELDKAGFIKRQLVETRQITKHVAQILDSRMNTKYDENDKLIREVKVITLKSKLVSDFRKDFQFYKVREINNYHHAHDAYLNAVVGTALIKKYPKLESEFVYGDYKVYDVRKMIAKSEQEIGKATAKYFFYSNIMNFFKTEITLANGEIRKRPLIETNGETGEIVWDKGRDFATVRKVLSMPQVNIVKKTEVQTGGFSKESILPKRNSDKLIARKKDWDPKKYGGFDSPTVAYSVLVVAKVEKGKSKKLKSVKELLGITIMERSSFEKNPIDFLEAKGYKEVKKDLIIKLPKYSLFELENGRKRMLASAGELQKGNELALPSKYVNFLYLASHYEKLKGSPEDNEQKQLFVEQHKHYLDEIIEQISEFSKRVILADANLDKVLSAYNKHRDKPIREQAENIIHLFTLTNLGAPAAFKYFDTTIDRKRYTSTKEVLDATLIHQSITGLYETRIDLSQLGGDGGEAAAKPAPGGLLGRDLLTKLKAQIQFSTEGPQVTWEDRPAMCLVLNLEEEYRLHEKPVPPSIDPSWLQLFPMVWAEKAGMGLANQVPPVVVELKSDASPVAVRQYPMSKEAREGIRPHIQRFLDLGILVPCQSPWNTPLLPVKKPGTNDYRPVQDLREVNKRVQDIHPTVPNPYNLLSSLPPSHTWYSVLDLKDAFFCLKLHPNSQPLFAFEWRDPEKGNTGQLTWTRLPQGFKNSPTLFNEALHRDLASFRALNPQVVMLQYVDDLLVAAPTYRDCKEGTRRLLQELSKLGYRVSAKKAQLCREEVTYLGYLLKGGKRWLTPARKATVMKIPTPTTPRQVREFLGKAGFCRLFIPGFASLAAPLYPLTRPKVPFTWTEAHQEAFGRIKEALLSAPALALPDLTKPFALYVDEKEGVARGVLTQTLGPWRRPVAYLSKKLDPVASGWPTCLKAIAAVALLLKDADKLTLGQNVLVIAPHNLESIVRQPPDRWMTNARMTHYQSLLLNERVSFAPPAILNPATLLPVESDDTPIHICSEILAEETGTRPDLRDQPLPGVPAWYTDGSSFIMDGRRQAGAAIVDNKRTVWASNLPEGTSAQKAELIALTQALRLAEGKSINIYTDSRYAFATAHVHGAIYKQRGWLTSAGKDIKNKEEILALLEAIHLPKRVAIIHCPGHQRGTDPVATGNRKADEAAKQAAQSTRILTETTKNAGKRTADGSEFEKRTADGSEFESPKKKAKVE

SEQ ID NO: 6772 - protein, 2215 aa, synthetic construct
MPAAKRVKLDGGDKKYSIGLDIGTNSVGWAVITDEYKVPSKKFKVLGNTDRHSIKKNLIGALLFDSGETAEATRLKRTARRRYTRRKNRICYLQEIFSNEMAKVDDSFFHRLEESFLVEEDKKHERHPIFGNIVDEVAYHEKYPTIYHLRKKLVDSTDKADLRLIYLALAHMIKFRGHFLIEGDLNPDNSDVDKLFIQLVQTYNQLFEENPINASGVDAKAILSARLSKSRRLENLIAQLPGEKKNGLFGNLIALSLGLTPNFKSNFDLAEDAKLQLSKDTYDDDLDNLLAQIGDQYADLFLAAKNLSDAILLSDILRVNTEITKAPLSASMIKRYDEHHQDLTLLKALVRQQLPEKYKEIFFDQSKNGYAGYIDGGASQEEFYKFIKPILEKMDGTEELLVKLNREDLLRKQRTFDNGSIPHQIHLGELHAILRRQEDFYPFLKDNREKIEKILTFRIPYYVGPLARGNSRFAWMTRKSEETITPWNFEEVVDKGASAQSFIERMTNFDKNLPNEKVLPKHSLLYEYFTVYNELTKVKYVTEGMRKPAFLSGEQKKAIVDLLFKTNRKVTVKQLKEDYFKKIECFDSVEISGVEDRFNASLGTYHDLLKIIKDKDFLDNEENEDILEDIVLTLTLFEDREMIEERLKTYAHLFDDKVMKQLKRRRYTGWGRLSRKLINGIRDKQSGKTILDFLKSDGFANRNFMQLIHDDSLTFKEDIQKAQVSGQGDSLHEHIANLAGSPAIKKGILQTVKVVDELVKVMGRHKPENIVIEMARENQTTQKGQKNSRERMKRIEEGIKELGSQILKEHPVENTQLQNEKLYLYYLQNGRDMYVDQELDINRLSDYDVDHIVPQSFLKDDSIDNKVLTRSDKARGKSDNVPSEEVVKKMKNYWRQLLNAKLITQRKFDNLTKAERGGLSELDKAGFIKRQLVETRQITKHVAQILDSRMNTKYDENDKLIREVKVITLKSKLVSDFRKDFQFYKVREINNYHHAHDAYLNAVVGTALIKKYPKLESEFVYGDYKVYDVRKMIAKSEQEIGKATAKYFFYSNIMNFFKTEITLANGEIRKRPLIETNGETGEIVWDKGRDFATVRKVLSMPQVNIVKKTEVQTGGFSKESILPKRNSDKLIARKKDWDPKKYGGFDSPTVAYSVLVVAKVEKGKSKKLKSVKELLGITIMERSSFEKNPIDFLEAKGYKEVKKDLIIKLPKYSLFELENGRKRMLASAGELQKGNELALPSKYVNFLYLASHYEKLKGSPEDNEQKQLFVEQHKHYLDEIIEQISEFSKRVILADANLDKVLSAYNKHRDKPIREQAENIIHLFTLTNLGAPAAFKYFDTTIDRKRYTSTKEVLDATLIHQSITGLYETRIDLSQLGGDGGEAAAKPAPGGTLGDQGSRGSDPLPEPRVTLTVEGIPTEFLVNTGAEHSVLTKPMGKMGSKRTVVAGATGSKVYPWTTKRLLKIGQKQVTHSFLVIPECPAPLLGRDLLTKLKAQIQFSTEGPQVTWEDRPAMCLVLNLEEEYRLHEKPVPPSIDPSWLQLFPMVWAEKAGMGLANQVPPVVVELKSDASPVAVRQYPMSKEAREGIRPHIQRFLDLGILVPCQSPWNTPLLPVKKPGTNDYRPVQDLREVNKRVQDIHPTVPNPYNLLSSLPPSHTWYSVLDLKDAFFCLKLHPNSQPLFAFEWRDPEKGNTGQLTWTRLPQGFKNSPTLFNEALHRDLASFRALNPQVVMLQYVDDLLVAAPTYRDCKEGTRRLLQELSKLGYRVSAKKAQLCREEVTYLGYLLKGGKRWLTPARKATVMKIPTPTTPRQVREFLGTAGFCRLWIPGFASLAAPLYPLTRPKVPFTWTEAHQEAFGRIKEALLSAPALALPDLTKPFALYVDEKEGVARGVLTQTLGPWRRPVAYLSKKLDPVASGWPTCLKAIAAVALLLKDADKLTLGQNVLVIAPHNLESIVRQPPDRWMTNARMTHYQSLLLNERVSFAPPAILNPATLLPVESDDTPIHICSEILAEETGTRPDLRDQPLPGVPAWYTDGSSFIMDGRRQAGAAIVDNKRTVWASNLPEGTSAQKAELIALTQALRLAEGKSINIYTDSRYAFATAHVHGAIYKQRGWLTSAGKDIKNKEEILALLEAIHLPKRVAIIHCPGHQRGTDPVATGNRKADEAAKQAAQSTRILTETTKNAGKRTADGSEFEKRTADGSEFESPKKKAKVE

SEQ ID NO: 6773 - protein, 2093 aa, synthetic construct
MPAAKRVKLDGGDKKYSIGLDIGTNSVGWAVITDEYKVPSKKFKVLGNTDRHSIKKNLIGALLFDSGETAEATRLKRTARRRYTRRKNRICYLQEIFSNEMAKVDDSFFHRLEESFLVEEDKKHERHPIFGNIVDEVAYHEKYPTIYHLRKKLVDSTDKADLRLIYLALAHMIKFRGHFLIEGDLNPDNSDVDKLFIQLVQTYNQLFEENPINASGVDAKAILSARLSKSRRLENLIAQLPGEKKNGLFGNLIALSLGLTPNFKSNFDLAEDAKLQLSKDTYDDDLDNLLAQIGDQYADLFLAAKNLSDAILLSDILRVNTEITKAPLSASMIKRYDEHHQDLTLLKALVRQQLPEKYKEIFFDQSKNGYAGYIDGGASQEEFYKFIKPILEKMDGTEELLVKLNREDLLRKQRTFDNGSIPHQIHLGELHAILRRQEDFYPFLKDNREKIEKILTFRIPYYVGPLARGNSRFAWMTRKSEETITPWNFEEVVDKGASAQSFIERMTNFDKNLPNEKVLPKHSLLYEYFTVYNELTKVKYVTEGMRKPAFLSGEQKKAIVDLLFKTNRKVTVKQLKEDYFKKIECFDSVEISGVEDRFNASLGTYHDLLKIIKDKDFLDNEENEDILEDIVLTLTLFEDREMIEERLKTYAHLFDDKVMKQLKRRRYTGWGRLSRKLINGIRDKQSGKTILDFLKSDGFANRNFMQLIHDDSLTFKEDIQKAQVSGQGDSLHEHIANLAGSPAIKKGILQTVKVVDELVKVMGRHKPENIVIEMARENQTTQKGQKNSRERMKRIEEGIKELGSQILKEHPVENTQLQNEKLYLYYLQNGRDMYVDQELDINRLSDYDVDHIVPQSFLKDDSIDNKVLTRSDKARGKSDNVPSEEVVKKMKNYWRQLLNAKLITQRKFDNLTKAERGGLSELDKAGFIKRQLVETRQITKHVAQILDSRMNTKYDENDKLIREVKVITLKSKLVSDFRKDFQFYKVREINNYHHAHDAYLNAVVGTALIKKYPKLESEFVYGDYKVYDVRKMIAKSEQEIGKATAKYFFYSNIMNFFKTEITLANGEIRKRPLIETNGETGEIVWDKGRDFATVRKVLSMPQVNIVKKTEVQTGGFSKESILPKRNSDKLIARKKDWDPKKYGGFDSPTVAYSVLVVAKVEKGKSKKLKSVKELLGITIMERSSFEKNPIDFLEAKGYKEVKKDLIIKLPKYSLFELENGRKRMLASAGELQKGNELALPSKYVNFLYLASHYEKLKGSPEDNEQKQLFVEQHKHYLDEIIEQISEFSKRVILADANLDKVLSAYNKHRDKPIREQAENIIHLFTLTNLGAPAAFKYFDTTIDRKRYTSTKEVLDATLIHQSITGLYETRIDLSQLGGDGGEAAAKPAPGGTLNLEDEYRLYETSAEPEVSPGSTWLSDFPQAWAETGGMGLAVRQAPLIIPLKATSTPVSIKQYPMSQEAKLGIKPHIQRLLDQGILVPCQSPWNTPLLPVKKPGTNDYRPVQDLREVNKRVEDIHPTVPNPYNLLSGLPPSHRWYTVLDLKDAFFCLRLHPTSQPLFAFEWRDPGMGISGQLTWTRLPQGFKNSPTLFNEALHRDLADFRIQHPDLILLQYVDDILLAATSELDCQQGTRALLLTLGNLGYRASAKKAQLCQKQVKYLGYLLKEGQRWLTEARKETVMGQPTPKTPRQLREFLGKAGFCRLFIPGFAEMAAPLYPLTKPGTLFNWGPDQQKAYQEIKQALLTAPALGLPDLTKPFELFVDEKQGYAKGVLTQKLGPWRRPVAYLSKKLDPVAAGWPPCLRMVAAIAVLRKDAGKLTMGQPLVILAPHAVEALVKQPPDRWLSNARMTHYQAMLLDTDRVQFGPVVALNPATLLPLPEEGAPHDCLEILAETHGTRPDLTDQPIPDADHTWYTDGSSFLQEGQRKAGAAVTTETEVIWARALPAGTSAQRAELIALTQALKMAEGKRLNVYTDSRYAFATAHIHGEIYRRRGWLTSEGREIKNKSEILALLKALFLPKRLSIIHCLGHQKGDSAEARGNRLADQAAREAAIKTPPDTSTLLAGKRTADGSEFEKRTADGSEFESPKKKAKVE

SEQ ID NO: 6774 - protein, 2093 aa, synthetic construct
MPAAKRVKLDGGDKKYSIGLDIGTNSVGWAVITDEYKVPSKKFKVLGNTDRHSIKKNLIGALLFDSGETAEATRLKRTARRRYTRRKNRICYLQEIFSNEMAKVDDSFFHRLEESFLVEEDKKHERHPIFGNIVDEVAYHEKYPTIYHLRKKLVDSTDKADLRLIYLALAHMIKFRGHFLIEGDLNPDNSDVDKLFIQLVQTYNQLFEENPINASGVDAKAILSARLSKSRRLENLIAQLPGEKKNGLFGNLIALSLGLTPNFKSNFDLAEDAKLQLSKDTYDDDLDNLLAQIGDQYADLFLAAKNLSDAILLSDILRVNTEITKAPLSASMIKRYDEHHQDLTLLKALVRQQLPEKYKEIFFDQSKNGYAGYIDGGASQEEFYKFIKPILEKMDGTEELLVKLNREDLLRKQRTFDNGSIPHQIHLGELHAILRRQEDFYPFLKDNREKIEKILTFRIPYYVGPLARGNSRFAWMTRKSEETITPWNFEEVVDKGASAQSFIERMTNFDKNLPNEKVLPKHSLLYEYFTVYNELTKVKYVTEGMRKPAFLSGEQKKAIVDLLFKTNRKVTVKQLKEDYFKKIECFDSVEISGVEDRFNASLGTYHDLLKIIKDKDFLDNEENEDILEDIVLTLTLFEDREMIEERLKTYAHLFDDKVMKQLKRRRYTGWGRLSRKLINGIRDKQSGKTILDFLKSDGFANRNFMQLIHDDSLTFKEDIQKAQVSGQGDSLHEHIANLAGSPAIKKGILQTVKVVDELVKVMGRHKPENIVIEMARENQTTQKGQKNSRERMKRIEEGIKELGSQILKEHPVENTQLQNEKLYLYYLQNGRDMYVDQELDINRLSDYDVDHIVPQSFLKDDSIDNKVLTRSDKARGKSDNVPSEEVVKKMKNYWRQLLNAKLITQRKFDNLTKAERGGLSELDKAGFIKRQLVETRQITKHVAQILDSRMNTKYDENDKLIREVKVITLKSKLVSDFRKDFQFYKVREINNYHHAHDAYLNAVVGTALIKKYPKLESEFVYGDYKVYDVRKMIAKSEQEIGKATAKYFFYSNIMNFFKTEITLANGEIRKRPLIETNGETGEIVWDKGRDFATVRKVLSMPQVNIVKKTEVQTGGFSKESILPKRNSDKLIARKKDWDPKKYGGFDSPTVAYSVLVVAKVEKGKSKKLKSVKELLGITIMERSSFEKNPIDFLEAKGYKEVKKDLIIKLPKYSLFELENGRKRMLASAGELQKGNELALPSKYVNFLYLASHYEKLKGSPEDNEQKQLFVEQHKHYLDEIIEQISEFSKRVILADANLDKVLSAYNKHRDKPIREQAENIIHLFTLTNLGAPAAFKYFDTTIDRKRYTSTKEVLDATLIHQSITGLYETRIDLSQLGGDGGEAAAKPAPGGTLGIEDEYRLHETSTEPDVSLGSTWLSDFPQAWAETGGMGLAVRQAPLIIPLKATSTPVSIQQYPMSHEARLGIKPHIQRLLDQGILVPCQSPWNTPLLPVKKPGTNDYRPVQDLREVNKRVEDIHPTVPNPYNLLSGLPPSHQWYTVLDLKDAFFCLRLHPTSQPLFAFEWRDPGMGISGQLTWTRLPQGFKNSPTLFNEALHRDLADFRIQHPDLILLQYVDDILLAATSELDCQQGTRALLQTLGDLGYRASAKKAQICQKQVKYLGYLLREGQRWLTEARKETVMGQPVPKTPRQLREFLGTAGFCRLWIPGFAEMAAPLYPLTKPGTLFSWGPDQQKAYQEIKQALLTAPALGLPDLTKPFELFVDEKQGYAKGVLTQKLGPWRRPVAYLSKKLDPVAAGWPPCLRMVAAIAVLTKDAGKLTMGQPLVILAPHAVEALVKQPPDRWLSNARMTHYQAMLLDTDRVQFGPVVALNPATLLPLPEEGAPHDCLEILAETHGTRPDLTDQPIPDADHTWYTDGSSFLQEGQRKAGAAVTTETEVIWAGALPAGTSAQRAELIALTQALKMAEGKRLNVYTDSRYAFATAHIHGEIYRRRGWLTSEGREIKNKSEILALLKALFLPKRLSIIHCLGHQKGDSAEARGNRLADQAAREAAIKTPPDTSTLLAGKRTADGSEFEKRTADGSEFESPKKKAKVE

SEQ ID NO: 6775 - protein, 2093 aa, synthetic construct
MPAAKRVKLDGGDKKYSIGLDIGTNSVGWAVITDEYKVPSKKFKVLGNTDRHSIKKNLIGALLFDSGETAEATRLKRTARRRYTRRKNRICYLQEIFSNEMAKVDDSFFHRLEESFLVEEDKKHERHPIFGNIVDEVAYHEKYPTIYHLRKKLVDSTDKADLRLIYLALAHMIKFRGHFLIEGDLNPDNSDVDKLFIQLVQTYNQLFEENPINASGVDAKAILSARLSKSRRLENLIAQLPGEKKNGLFGNLIALSLGLTPNFKSNFDLAEDAKLQLSKDTYDDDLDNLLAQIGDQYADLFLAAKNLSDAILLSDILRVNTEITKAPLSASMIKRYDEHHQDLTLLKALVRQQLPEKYKEIFFDQSKNGYAGYIDGGASQEEFYKFIKPILEKMDGTEELLVKLNREDLLRKQRTFDNGSIPHQIHLGELHAILRRQEDFYPFLKDNREKIEKILTFRIPYYVGPLARGNSRFAWMTRKSEETITPWNFEEVVDKGASAQSFIERMTNFDKNLPNEKVLPKHSLLYEYFTVYNELTKVKYVTEGMRKPAFLSGEQKKAIVDLLFKTNRKVTVKQLKEDYFKKIECFDSVEISGVEDRFNASLGTYHDLLKIIKDKDFLDNEENEDILEDIVLTLTLFEDREMIEERLKTYAHLFDDKVMKQLKRRRYTGWGRLSRKLINGIRDKQSGKTILDFLKSDGFANRNFMQLIHDDSLTFKEDIQKAQVSGQGDSLHEHIANLAGSPAIKKGILQTVKVVDELVKVMGRHKPENIVIEMARENQTTQKGQKNSRERMKRIEEGIKELGSQILKEHPVENTQLQNEKLYLYYLQNGRDMYVDQELDINRLSDYDVDHIVPQSFLKDDSIDNKVLTRSDKARGKSDNVPSEEVVKKMKNYWRQLLNAKLITQRKFDNLTKAERGGLSELDKAGFIKRQLVETRQITKHVAQILDSRMNTKYDENDKLIREVKVITLKSKLVSDFRKDFQFYKVREINNYHHAHDAYLNAVVGTALIKKYPKLESEFVYGDYKVYDVRKMIAKSEQEIGKATAKYFFYSNIMNFFKTEITLANGEIRKRPLIETNGETGEIVWDKGRDFATVRKVLSMPQVNIVKKTEVQTGGFSKESILPKRNSDKLIARKKDWDPKKYGGFDSPTVAYSVLVVAKVEKGKSKKLKSVKELLGITIMERSSFEKNPIDFLEAKGYKEVKKDLIIKLPKYSLFELENGRKRMLASAGELQKGNELALPSKYVNFLYLASHYEKLKGSPEDNEQKQLFVEQHKHYLDEIIEQISEFSKRVILADANLDKVLSAYNKHRDKPIREQAENIIHLFTLTNLGAPAAFKYFDTTIDRKRYTSTKEVLDATLIHQSITGLYETRIDLSQLGGDGGEAAAKPAPGGTLNIEDEYRLHETSKEPDVSLGSTWLSDFPQAWAETGGMGLAVRQAPLIIPLKATSTPVSIKQYPMSQEARLGIKPHIQRLLDQGILVPCQSPWNTPLLPVKKPGTNDYRPVQDLREVNKRVEDIHPTVPNPYNLLSGLPPSHQWYTVLDLKDAFFCLRLHPTSQPLFAFEWRDPEMGISGQLTWTRLPQGFKNSPTLFNEALHRDLAGFRIQHPDLILLQYVDDLLLAATSELDCQQGTRALLQTLGDLGYRASAKKAQICQKQVKYLGYLLKEGQRWLTEARKETVMGQPIPKTPRQLREFLGTAGFCRLWIPGFAEMAAPLYPLTKPGTLFNWGPDQQKAFQEIKQALLTAPALGLPDLTKPFELFVDEKQGYAKGVLTQKLGPWRRPVAYLSKKLDPVAAGWPPCLRMVAAIAVLTKDAGKLTMGQPLVILAPHAVEALVKQPPDRWLSNARMTHYQALLLDTDRVQFGPVVALNPATLLPLPEEGLQHDCLDILAEAHGTRSDLMDQPLPDADHTWYTDGSSFLQEGQRKAGAAVTTETEVIWARALPAGTSAQRAELIALTQALKMAEGKKLNVYTDSRYAFATAHIHGEIYRRRGWLTSEGKEIKNKDEILALLKALFLPKRLSIIHCPGHQKGNSAEARGNRMADQAAREVATRETPETSTLLAGKRTADGSEFEKRTADGSEFESPKKKAKVE

SEQ ID NO: 6776 - protein, 2093 aa, synthetic construct
MPAAKRVKLDGGDKKYSIGLDIGTNSVGWAVITDEYKVPSKKFKVLGNTDRHSIKKNLIGALLFDSGETAEATRLKRTARRRYTRRKNRICYLQEIFSNEMAKVDDSFFHRLEESFLVEEDKKHERHPIFGNIVDEVAYHEKYPTIYHLRKKLVDSTDKADLRLIYLALAHMIKFRGHFLIEGDLNPDNSDVDKLFIQLVQTYNQLFEENPINASGVDAKAILSARLSKSRRLENLIAQLPGEKKNGLFGNLIALSLGLTPNFKSNFDLAEDAKLQLSKDTYDDDLDNLLAQIGDQYADLFLAAKNLSDAILLSDILRVNTEITKAPLSASMIKRYDEHHQDLTLLKALVRQQLPEKYKEIFFDQSKNGYAGYIDGGASQEEFYKFIKPILEKMDGTEELLVKLNREDLLRKQRTFDNGSIPHQIHLGELHAILRRQEDFYPFLKDNREKIEKILTFRIPYYVGPLARGNSRFAWMTRKSEETITPWNFEEVVDKGASAQSFIERMTNFDKNLPNEKVLPKHSLLYEYFTVYNELTKVKYVTEGMRKPAFLSGEQKKAIVDLLFKTNRKVTVKQLKEDYFKKIECFDSVEISGVEDRFNASLGTYHDLLKIIKDKDFLDNEENEDILEDIVLTLTLFEDREMIEERLKTYAHLFDDKVMKQLKRRRYTGWGRLSRKLINGIRDKQSGKTILDFLKSDGFANRNFMQLIHDDSLTFKEDIQKAQVSGQGDSLHEHIANLAGSPAIKKGILQTVKVVDELVKVMGRHKPENIVIEMARENQTTQKGQKNSRERMKRIEEGIKELGSQILKEHPVENTQLQNEKLYLYYLQNGRDMYVDQELDINRLSDYDVDHIVPQSFLKDDSIDNKVLTRSDKARGKSDNVPSEEVVKKMKNYWRQLLNAKLITQRKFDNLTKAERGGLSELDKAGFIKRQLVETRQITKHVAQILDSRMNTKYDENDKLIREVKVITLKSKLVSDFRKDFQFYKVREINNYHHAHDAYLNAVVGTALIKKYPKLESEFVYGDYKVYDVRKMIAKSEQEIGKATAKYFFYSNIMNFFKTEITLANGEIRKRPLIETNGETGEIVWDKGRDFATVRKVLSMPQVNIVKKTEVQTGGFSKESILPKRNSDKLIARKKDWDPKKYGGFDSPTVAYSVLVVAKVEKGKSKKLKSVKELLGITIMERSSFEKNPIDFLEAKGYKEVKKDLIIKLPKYSLFELENGRKRMLASAGELQKGNELALPSKYVNFLYLASHYEKLKGSPEDNEQKQLFVEQHKHYLDEIIEQISEFSKRVILADANLDKVLSAYNKHRDKPIREQAENIIHLFTLTNLGAPAAFKYFDTTIDRKRYTSTKEVLDATLIHQSITGLYETRIDLSQLGGDGGEAAAKPAPGGTLNIEDEYRLHETSKGPDVPLGSTWLSDFPQAWAETGGMGLAVRQAPLIIPLKATSTPVSIKQYPMSQEARLGIKPHIQRLLDQGILVPCQSPWNTPLLPVKKPGTNDYRPVQDLREVNKRVEDIHPTVPNPYNLLSGLPPSHQWYTVLDLKDAFFCLRLHPTSQSLFAFEWRDPEMGISGQLTWTRLPQGFKNSPTLFNEALHRDLADFRIQHPDLILLQYVDDLLLAATSELDCQQGTRALLQTLGDLGYRASAKKAQICQKQVKYLGYLLKEGQRWLTEARKETVMGQPTPKTPRQLREFLGTAGFCRLWIPGFAEMAAPLYPLTKPGTLFEWGPDQQKAYQEIKQALLTAPALGLPDLTKPFELFVDEKQGYAKGVLTQKLGPWRRPVAYLSKKLDPVAAGWPPCLRMVAAIAVLTKDAGKLTMGQPLVILAPHAVEALVKQPPDRWLSNARMTHYQALLLDTDRVQFGPIVALNPATLLPLPEEGLQHDCLDILAEAHGTRPDLTDQPLPDADHTWYTDGSSFLQEGQRKAGAAVTTETEVVWAKALPAGTSAQRAELIALTQALKMAEGKKLNVYTDSRYAFATAHIHGEIYRRRGWLTSEGKEIKNKDEILALLKALFLPKRLSIIHCPGHQKGNRAEARGNRMADQAAREVATRETPETSTLLAGKRTADGSEFEKRTADGSEFESPKKKAKVE

SEQ ID NO: 6777 - protein, 2113 aa, synthetic construct
MPAAKRVKLDGGDKKYSIGLDIGTNSVGWAVITDEYKVPSKKFKVLGNTDRHSIKKNLIGALLFDSGETAEATRLKRTARRRYTRRKNRICYLQEIFSNEMAKVDDSFFHRLEESFLVEEDKKHERHPIFGNIVDEVAYHEKYPTIYHLRKKLVDSTDKADLRLIYLALAHMIKFRGHFLIEGDLNPDNSDVDKLFIQLVQTYNQLFEENPINASGVDAKAILSARLSKSRRLENLIAQLPGEKKNGLFGNLIALSLGLTPNFKSNFDLAEDAKLQLSKDTYDDDLDNLLAQIGDQYADLFLAAKNLSDAILLSDILRVNTEITKAPLSASMIKRYDEHHQDLTLLKALVRQQLPEKYKEIFFDQSKNGYAGYIDGGASQEEFYKFIKPILEKMDGTEELLVKLNREDLLRKQRTFDNGSIPHQIHLGELHAILRRQEDFYPFLKDNREKIEKILTFRIPYYVGPLARGNSRFAWMTRKSEETITPWNFEEVVDKGASAQSFIERMTNFDKNLPNEKVLPKHSLLYEYFTVYNELTKVKYVTEGMRKPAFLSGEQKKAIVDLLFKTNRKVTVKQLKEDYFKKIECFDSVEISGVEDRFNASLGTYHDLLKIIKDKDFLDNEENEDILEDIVLTLTLFEDREMIEERLKTYAHLFDDKVMKQLKRRRYTGWGRLSRKLINGIRDKQSGKTILDFLKSDGFANRNFMQLIHDDSLTFKEDIQKAQVSGQGDSLHEHIANLAGSPAIKKGILQTVKVVDELVKVMGRHKPENIVIEMARENQTTQKGQKNSRERMKRIEEGIKELGSQILKEHPVENTQLQNEKLYLYYLQNGRDMYVDQELDINRLSDYDVDHIVPQSFLKDDSIDNKVLTRSDKARGKSDNVPSEEVVKKMKNYWRQLLNAKLITQRKFDNLTKAERGGLSELDKAGFIKRQLVETRQITKHVAQILDSRMNTKYDENDKLIREVKVITLKSKLVSDFRKDFQFYKVREINNYHHAHDAYLNAVVGTALIKKYPKLESEFVYGDYKVYDVRKMIAKSEQEIGKATAKYFFYSNIMNFFKTEITLANGEIRKRPLIETNGETGEIVWDKGRDFATVRKVLSMPQVNIVKKTEVQTGGFSKESILPKRNSDKLIARKKDWDPKKYGGFDSPTVAYSVLVVAKVEKGKSKKLKSVKELLGITIMERSSFEKNPIDFLEAKGYKEVKKDLIIKLPKYSLFELENGRKRMLASAGELQKGNELALPSKYVNFLYLASHYEKLKGSPEDNEQKQLFVEQHKHYLDEIIEQISEFSKRVILADANLDKVLSAYNKHRDKPIREQAENIIHLFTLTNLGAPAAFKYFDTTIDRKRYTSTKEVLDATLIHQSITGLYETRIDLSQLGGDGGEAAAKPAPGGTLNIEDEYRLHETSKEPDVSLGSTWLSDFPQAWAETGGMGLAVRQAPLIIPLKATSTPVSIKQYPMSQEARLGIKPHIQRLLDQGILVPCQSPWNTPLLPVKKPGTNDYRPVQDLREVNKRVEDIHPTVPNPYNLLSGLPPSHQWYTVLDLKDAFFCLRLHPTSQPLFAFEWRDPEMGISGQLTWTRLPQGFKNSPTLFNEALHRDLADFRIQHPDLILLQYVDDLLLAATSELDCQQGTRALLQTLGNLGYRASAKKAQICQKQVKYLGYLLKEGQRWLTEARKETVMGQPTPKTPRQLREFLGKAGFCRLFIPGFAEMAAPLYPLTKPGTLFNWGPDQQKAYQEIKQALLTAPALGLPDLTKPFELFVDEKQGYAKGVLTQKLGPWRRPVAYLSKKLDPVAAGWPPCLRMVAAIAVLTKDAGKLTMGQPLVILAPHAVEALVKQPPDRWLSNARMTHYQALLLDTDRVQFGPVVALNPATLLPLPEEGLQHNCLDILAEAHGTRPDLTDQPLPDADHTWYTDGSSLLQEGQRKAGAAVTTETEVIWAKALPAGTSAQRAELIALTQALKMAEGKKLNVYTDSRYAFATAHIHGEIYRRRGWLTSEGKEIKNKDEILALLKALFLPKRLSIIHCPGHQKGHSAEARGNRMADQAARKAAITETPDTSTLLIENSSPSGGSKRTADGSEFEAGKRTADGSEFEKRTADGSEFESPKKKAKVE

SEQ ID NO: 6778 - protein, 2113 aa, synthetic construct; identical to SEQ ID NO: 6777

SEQ ID NO: 6779 - protein, 2021 aa, synthetic construct
MPAAKRVKLDGGDKKYSIGLDIGTNSVGWAVITDEYKVPSKKFKVLGNTDRHSIKKNLIGALLFDSGETAEATRLKRTARRRYTRRKNRICYLQEIFSNEMAKVDDSFFHRLEESFLVEEDKKHERHPIFGNIVDEVAYHEKYPTIYHLRKKLVDSTDKADLRLIYLALAHMIKFRGHFLIEGDLNPDNSDVDKLFIQLVQTYNQLFEENPINASGVDAKAILSARLSKSRRLENLIAQLPGEKKNGLFGNLIALSLGLTPNFKSNFDLAEDAKLQLSKDTYDDDLDNLLAQIGDQYADLFLAAKNLSDAILLSDILRVNTEITKAPLSASMIKRYDEHHQDLTLLKALVRQQLPEKYKEIFFDQSKNGYAGYIDGGASQEEFYKFIKPILEKMDGTEELLVKLNREDLLRKQRTFDNGSIPHQIHLGELHAILRRQEDFYPFLKDNREKIEKILTFRIPYYVGPLARGNSRFAWMTRKSEETITPWNFEEVVDKGASAQSFIERMTNFDKNLPNEKVLPKHSLLYEYFTVYNELTKVKYVTEGMRKPAFLSGEQKKAIVDLLFKTNRKVTVKQLKEDYFKKIECFDSVEISGVEDRFNASLGTYHDLLKIIKDKDFLDNEENEDILEDIVLTLTLFEDREMIEERLKTYAHLFDDKVMKQLKRRRYTGWGRLSRKLINGIRDKQSGKTILDFLKSDGFANRNFMQLIHDDSLTFKEDIQKAQVSGQGDSLHEHIANLAGSPAIKKGILQTVKVVDELVKVMGRHKPENIVIEMARENQTTQKGQKNSRERMKRIEEGIKELGSQILKEHPVENTQLQNEKLYLYYLQNGRDMYVDQELDINRLSDYDVDHIVPQSFLKDDSIDNKVLTRSDKARGKSDNVPSEEVVKKMKNYWRQLLNAKLITQRKFDNLTKAERGGLSELDKAGFIKRQLVETRQITKHVAQILDSRMNTKYDENDKLIREVKVITLKSKLVSDFRKDFQFYKVREINNYHHAHDAYLNAVVGTALIKKYPKLESEFVYGDYKVYDVRKMIAKSEQEIGKATAKYFFYSNIMNFFKTEITLANGEIRKRPLIETNGETGEIVWDKGRDFATVRKVLSMPQVNIVKKTEVQTGGFSKESILPKRNSDKLIARKKDWDPKKYGGFDSPTVAYSVLVVAKVEKGKSKKLKSVKELLGITIMERSSFEKNPIDFLEAKGYKEVKKDLIIKLPKYSLFELENGRKRMLASAGELQKGNELALPSKYVNFLYLASHYEKLKGSPEDNEQKQLFVEQHKHYLDEIIEQISEFSKRVILADANLDKVLSAYNKHRDKPIREQAENIIHLFTLTNLGAPAAFKYFDTTIDRKRYTSTKEVLDATLIHQSITGLYETRIDLSQLGGDGGEAAAKPAPGGGRDIMKDIKVRLMTDSPDDSQDLMIGAIESNLFADQISWKSDQPVWLNQWPLKQEKLQALQQLVTEQLQLGHLEESNSPWNTPVFVIKKKSGKWRLLQDLRAVNATMHDMGALQPGLPSPVAVPKGWEIIIIDLQDCFFNIKLHPEDCKRFAFSVPSPNFKRPYQRFQWKVLPQGMKNSPTLCQKFVDKAILTVRDKYQDSYIVHYMDDILLAHPSRSIVDEILTSMIQALNKHGLVVSTEKIQKYDNLKYLGTHIQGDSVSYQKLQIRTDKLRTLNDFQKLLGNINWIRPFLKLTTGELKPLFEILNGDSNPISTRKLTPEACKALQLMNERLSTARVKRLDLSQPWSLCILKTEYTPTACLWQDGVVEWIHLPHISPKVITPYDIFCTQLIIKGRHRSKELFSKDPDYIVVPYTKVQFDLLLQEKEDWPISLLGFLGEVHFHLPKDPLLTFTLQTAIIFPHMTSTTPLEKGIVIFTDGSANGRSVTYIQGREPIIKENTQNTAQQAEIVAVITAFEEVSQPFNLYTDSKYVTGLFPEIETATLSPRTKIYTELKHLQRLIHKRQEKFYIGHIRGHTGLPGPLAQGNAYADSLTRILTAGKRTADGSEFEKRTADGSEFESPKKKAKVE

SEQ ID NO: 6780 - protein, 2084 aa, synthetic construct
MPAAKRVKLDGGDKKYSIGLDIGTNSVGWAVITDEYKVPSKKFKVLGNTDRHSIKKNLIGALLFDSGETAEATRLKRTARRRYTRRKNRICYLQEIFSNEMAKVDDSFFHRLEESFLVEEDKKHERHPIFGNIVDEVAYHEKYPTIYHLRKKLVDSTDKADLRLIYLALAHMIKFRGHFLIEGDLNPDNSDVDKLFIQLVQTYNQLFEENPINASGVDAKAILSARLSKSRRLENLIAQLPGEKKNGLFGNLIALSLGLTPNFKSNFDLAEDAKLQLSKDTYDDDLDNLLAQIGDQYADLFLAAKNLSDAILLSDILRVNTEITKAPLSASMIKRYDEHHQDLTLLKALVRQQLPEKYKEIFFDQSKNGYAGYIDGGASQEEFYKFIKPILEKMDGTEELLVKLNREDLLRKQRTFDNGSIPHQIHLGELHAILRRQEDFYPFLKDNREKIEKILTFRIPYYVGPLARGNSRFAWMTRKSEETITPWNFEEVVDKGASAQSFIERMTNFDKNLPNEKVLPKHSLLYEYFTVYNELTKVKYVTEGMRKPAFLSGEQKKAIVDLLFKTNRKVTVKQLKEDYFKKIECFDSVEISGVEDRFNASLGTYHDLLKIIKDKDFLDNEENEDILEDIVLTLTLFEDREMIEERLKTYAHLFDDKVMKQLKRRRYTGWGRLSRKLINGIRDKQSGKTILDFLKSDGFANRNFMQLIHDDSLTFKEDIQKAQVSGQGDSLHEHIANLAGSPAIKKGILQTVKVVDELVKVMGRHKPENIVIEMARENQTTQKGQKNSRERMKRIEEGIKELGSQILKEHPVENTQLQNEKLYLYYLQNGRDMYVDQELDINRLSDYDVDHIVPQSFLKDDSIDNKVLTRSDKARGKSDNVPSEEVVKKMKNYWRQLLNAKLITQRKFDNLTKAERGGLSELDKAGFIKRQLVETRQITKHVAQILDSRMNTKYDENDKLIREVKVITLKSKLVSDFRKDFQFYKVREINNYHHAHDAYLNAVVGTALIKKYPKLESEFVYGDYKVYDVRKMIAKSEQEIGKATAKYFFYSNIMNFFKTEITLANGEIRKRPLIETNGETGEIVWDKGRDFATVRKVLSMPQVNIVKKTEVQTGGFSKESILPKRNSDKLIARKKDWDPKKYGGFDSPTVAYSVLVVAKVEKGKSKKLKSVKELLGITIMERSSFEKNPIDFLEAKGYKEVKKDLIIKLPKYSLFELENGRKRMLASAGELQKGNELALPSKYVNFLYLASHYEKLKGSPEDNEQKQLFVEQHKHYLDEIIEQISEFSKRVILADANLDKVLSAYNKHRDKPIREQAENIIHLFTLTNLGAPAAFKYFDTTIDRKRYTSTKEVLDATLIHQSITGLYETRIDLSQLGGDGGEAAAKPAPGGIPWLMKKPLQLTTLVPLQEYEERLLKQTMLTGSYKEKLQSLFLKYDALWQHWENQVGHRRIKPHHIATGTVNPRPQKQYPINPKAKASIQTVINDLLKQGVLIQQNSIMNTPVYPVPKPDGKWRMVLDYREVNKTIPLIAAQNQHSAGILSSIFRGKYKTTLDLSNGFWAHSITPESYWLTAFTWLGQQYCWTRLPQGFLNSPALFNADVVDLLKEVPNVQVYVDDIYISHDDPREHLEQLEKVFSLLLNAGYVVSLKKSEIAQHEVEFLGFNITKEGRGLTETFKQKLLNITPPRDLKQLQSILGKLNFARNFIPNFSELVKPLYNIIATAPGKYITWTTDNSQQLQNIISMLNSAENLEERNPEVRLIMKVNTSPSAGYIRFYNEFAKRPIMYLNYVYTKAEVKFTNTEKLLTTIHKGLIKALDLGMGQEILVYSPIVSMTKIQKTPLPERKALPIRWITWMSYLEDPRIQFHYDKTLPELQQVPTVTDDIIAKIKHPSEFSMVFYTDGSAIKHPNVNKSHNAGMGIAQVQFKPEFTVINTWSIPLGDHTAQLAEVAAVEFACKKALKIDGPVLIVTDSFYVAESVNKELPYWQSNGFFNNKKKPLKHVSKWKSIADCIQLKPDIIIIHEKGHQPTASTFHTEGNNLADKLATQGSYVVNAGKRTADGSEFEKRTADGSEFESPKKKAKVE

SEQ ID NO: 6781 - protein, 2173 aa, synthetic construct
MPAAKRVKLDGGDKKYSIGLDIGTNSVGWAVITDEYKVPSKKFKVLGNTDRHSIKKNLIGALLFDSGETAEATRLKRTARRRYTRRKNRICYLQEIFSNEMAKVDDSFFHRLEESFLVEEDKKHERHPIFGNIVDEVAYHEKYPTIYHLRKKLVDSTDKADLRLIYLALAHMIKFRGHFLIEGDLNPDNSDVDKLFIQLVQTYNQLFEENPINASGVDAKAILSARLSKSRRLENLIAQLPGEKKNGLFGNLIALSLGLTPNFKSNFDLAEDAKLQLSKDTYDDDLDNLLAQIGDQYADLFLAAKNLSDAILLSDILRVNTEITKAPLSASMIKRYDEHHQDLTLLKALVRQQLPEKYKEIFFDQSKNGYAGYIDGGASQEEFYKFIKPILEKMDGTEELLVKLNREDLLRKQRTFDNGSIPHQIHLGELHAILRRQEDFYPFLKDNREKIEKILTFRIPYYVGPLARGNSRFAWMTRKSEETITPWNFEEVVDKGASAQSFIERMTNFDKNLPNEKVLPKHSLLYEYFTVYNELTKVKYVTEGMRKPAFLSGEQKKAIVDLLFKTNRKVTVKQLKEDYFKKIECFDSVEISGVEDRFNASLGTYHDLLKIIKDKDFLDNEENEDILEDIVLTLTLFEDREMIEERLKTYAHLFDDKVMKQLKRRRYTGWGRLSRKLINGIRDKQSGKTILDFLKSDGFANRNFMQLIHDDSLTFKEDIQKAQVSGQGDSLHEHIANLAGSPAIKKGILQTVKVVDELVKVMGRHKPENIVIEMARENQTTQKGQKNSRERMKRIEEGIKELGSQILKEHPVENTQLQNEKLYLYYLQNGRDMYVDQELDINRLSDYDVDHIVPQSFLKDDSIDNKVLTRSDKARGKSDNVPSEEVVKKMKNYWRQLLNAKLITQRKFDNLTKAERGGLSELDKAGFIKRQLVETRQITKHVAQILDSRMNTKYDENDKLIREVKVITLKSKLVSDFRKDFQFYKVREINNYHHAHDAYLNAVVGTALIKKYPKLESEFVYGDYKVYDVRKMIAKSEQEIGKATAKYFFYSNIMNFFKTEITLANGEIRKRPLIETNGETGEIVWDKGRDFATVRKVLSMPQVNIVKKTEVQTGGFSKESILPKRNSDKLIARKKDWDPKKYGGFDSPTVAYSVLVVAKVEKGKSKKLKSVKELLGITIMERSSFEKNPIDFLEAKGYKEVKKDLIIKLPKYSLFELENGRKRMLASAGELQKGNELALPSKYVNFLYLASHYEKLKGSPEDNEQKQLFVEQHKHYLDEIIEQISEFSKRVILADANLDKVLSAYNKHRDKPIREQAENIIHLFTLTNLGAPAAFKYFDTTIDRKRYTSTKEVLDATLIHQSITGLYETRIDLSQLGGDGGEAAAKPAPGGMDPLQLLQPLEAEIKGTKLKAHWNSGATITCVPQAFLEEEVPIKNIWIKTIHGEKEQPVYYLTFKIQGRKVEAEVISSPYDYILVSPSDIPWLMKKPLQLTTLVPLQEYEERLLKQTMLTGSYKEKLQSLFLKYDALWQHWENQVGHRRIKPHHIATGTVNPRPQKQYPINPKAKASIQTVINDLLKQGVLIQQNSIMNTPVYPVPKPDGKWRMVLDYREVNKTIPLIAAQNQHSAGILSSIFRGKYKTTLDLSNGFWAHSITPESYWLTAFTWLGQQYCWTRLPQGFLNSPALFNADVVDLLKEVPNVQVYVDDIYISHDDPREHLEQLEKVFSLLLNAGYVVSLKKSEIAQHEVEFLGFNITKEGRGLTETFKQKLLNITPPRDLKQLQSILGKLNFARNFIPNFSELVKPLYNIIATAPGKYITWTTDNSQQLQNIISMLNSAENLEERNPEVRLIMKVNTSPSAGYIRFYNEFAKRPIMYLNYVYTKAEVKFTNTEKLLTTIHKGLIKALDLGMGQEILVYSPIVSMTKIQKTPLPERKALPIRWITWMSYLEDPRIQFHYDKTLPELQQVPTVTDDIIAKIKHPSEFSMVFYTDGSAIKHPNVNKSHNAGMGIAQVQFKPEFTVINTWSIPLGDHTAQLAEVAAVEFACKKALKIDGPVLIVTDSFYVAESVNKELPYWQSNGFFNNKKKPLKHVSKWKSIADCIQLKPDIIIIHEKGHQPTASTFHTEGNNLADKLATQGSYVVNAGKRTADGSEFEKRTADGSEFESPKKKAKVE

SEQ ID NO: 6782 - protein, 2091 aa, synthetic construct
MPAAKRVKLDGGDKKYSIGLDIGTNSVGWAVITDEYKVPSKKFKVLGNTDRHSIKKNLIGALLFDSGETAEATRLKRTARRRYTRRKNRICYLQEIFSNEMAKVDDSFFHRLEESFLVEEDKKHERHPIFGNIVDEVAYHEKYPTIYHLRKKLVDSTDKADLRLIYLALAHMIKFRGHFLIEGDLNPDNSDVDKLFIQLVQTYNQLFEENPINASGVDAKAILSARLSKSRRLENLIAQLPGEKKNGLFGNLIALSLGLTPNFKSNFDLAEDAKLQLSKDTYDDDLDNLLAQIGDQYADLFLAAKNLSDAILLSDILRVNTEITKAPLSASMIKRYDEHHQDLTLLKALVRQQLPEKYKEIFFDQSKNGYAGYIDGGASQEEFYKFIKPILEKMDGTEELLVKLNREDLLRKQRTFDNGSIPHQIHLGELHAILRRQEDFYPFLKDNREKIEKILTFRIPYYVGPLARGNSRFAWMTRKSEETITPWNFEEVVDKGASAQSFIERMTNFDKNLPNEKVLPKHSLLYEYFTVYNELTKVKYVTEGMRKPAFLSGEQKKAIVDLLFKTNRKVTVKQLKEDYFKKIECFDSVEISGVEDRFNASLGTYHDLLKIIKDKDFLDNEENEDILEDIVLTLTLFEDREMIEERLKTYAHLFDDKVMKQLKRRRYTGWGRLSRKLINGIRDKQSGKTILDFLKSDGFANRNFMQLIHDDSLTFKEDIQKAQVSGQGDSLHEHIANLAGSPAIKKGILQTVKVVDELVKVMGRHKPENIVIEMARENQTTQKGQKNSRERMKRIEEGIKELGSQILKEHPVENTQLQNEKLYLYYLQNGRDMYVDQELDINRLSDYDVDHIVPQSFLKDDSIDNKVLTRSDKARGKSDNVPSEEVVKKMKNYWRQLLNAKLITQRKFDNLTKAERGGLSELDKAGFIKRQLVETRQITKHVAQILDSRMNTKYDENDKLIREVKVITLKSKLVSDFRKDFQFYKVREINNYHHAHDAYLNAVVGTALIKKYPKLESEFVYGDYKVYDVRKMIAKSEQEIGKATAKYFFYSNIMNFFKTEITLANGEIRKRPLIETNGETGEIVWDKGRDFATVRKVLSMPQVNIVKKTEVQTGGFSKESILPKRNSDKLIARKKDWDPKKYGGFDSPTVAYSVLVVAKVEKGKSKKLKSVKELLGITIMERSSFEKNPIDFLEAKGYKEVKKDLIIKLPKYSLFELENGRKRMLASAGELQKGNELALPSKYVNFLYLASHYEKLKGSPEDNEQKQLFVEQHKHYLDEIIEQISEFSKRVILADANLDKVLSAYNKHRDKPIREQAENIIHLFTLTNLGAPAAFKYFDTTIDRKRYTSTKEVLDATLIHQSITGLYETRIDLSQLGGDGGEAAAKPAPGGVLNLEEEYRLHEKPVPSSIDPSWLQLFPTVWAERAGMGLANQVPPVVVELRSGASPVAVRQYPMSKEAREGIRPHIQRFLDLGVLVPCQSPWNTPLLPVKKPGTNDYRPVQDLREINKRVQDIHPTVPNPYNLLSSLPPSHTWYSVLDLKDAFFCLKLHPNSQPLFAFEWRDPEKGNTGQLTWTRLPQGFKNSPTLFNEALHRDLAPFRALNPQVVLLQYVDDLLVAAPTYRDCKEGTQKLLQELSKLGYRVSAKKAQLCQKEVTYLGYLLKEGKRWLTPARKATVMKIPPPTTPRQVREFLGTAGFCRLWIPGFASLAAPLYPLTKPSIPFIWTEEHQKAFDRIKEALLSAPALALPDLTKPFTLYVDERAGVARGVLTQTLGPWRRPVAYLSKKLDPVASGWPTCLKAVAAVALLLKDADKLTLGQNVTVIASHSLESIVRQPPDRWMTNARMTHYQSLLLNERVSFAPPAVLNPATLLPVESEATPVHRCSEILAEETGTRRDLKDQPLPGVPAWYTDGSSFIAEGKRRAGAAIVDGKRTVWASSLPEGTSAQKAELVALTQALRLAEGKDINIYTDSRYAFATAHIHGAIYKQRGWLTSAGKDIKNKEEILALLEAIHLPKRVAIIHCPGHQKGNDPVATGNRRADEAAKQAALSTRVLAETTKPAGKRTADGSEFEKRTADGSEFESPKKKAKVE

SEQ ID NO: 6783 - protein, 2091 aa, synthetic construct; identical to SEQ ID NO: 4515

SEQ ID NO: 6784 - protein, 2095 aa, synthetic construct
MPAAKRVKLDGGDKKYSIGLDIGTNSVGWAVITDEYKVPSKKFKVLGNTDRHSIKKNLIGALLFDSGETAEATRLKRTARRRYTRRKNRICYLQEIFSNEMAKVDDSFFHRLEESFLVEEDKKHERHPIFGNIVDEVAYHEKYPTIYHLRKKLVDSTDKADLRLIYLALAHMIKFRGHFLIEGDLNPDNSDVDKLFIQLVQTYNQLFEENPINASGVDAKAILSARLSKSRRLENLIAQLPGEKKNGLFGNLIALSLGLTPNFKSNFDLAEDAKLQLSKDTYDDDLDNLLAQIGDQYADLFLAAKNLSDAILLSDILRVNTEITKAPLSASMIKRYDEHHQDLTLLKALVRQQLPEKYKEIFFDQSKNGYAGYIDGGASQEEFYKFIKPILEKMDGTEELLVKLNREDLLRKQRTFDNGSIPHQIHLGELHAILRRQEDFYPFLKDNREKIEKILTFRIPYYVGPLARGNSRFAWMTRKSEETITPWNFEEVVDKGASAQSFIERMTNFDKNLPNEKVLPKHSLLYEYFTVYNELTKVKYVTEGMRKPAFLSGEQKKAIVDLLFKTNRKVTVKQLKEDYFKKIECFDSVEISGVEDRFNASLGTYHDLLKIIKDKDFLDNEENEDILEDIVLTLTLFEDREMIEERLKTYAHLFDDKVMKQLKRRRYTGWGRLSRKLINGIRDKQSGKTILDFLKSDGFANRNFMQLIHDDSLTFKEDIQKAQVSGQGDSLHEHIANLAGSPAIKKGILQTVKVVDELVKVMGRHKPENIVIEMARENQTTQKGQKNSRERMKRIEEGIKELGSQILKEHPVENTQLQNEKLYLYYLQNGRDMYVDQELDINRLSDYDVDHIVPQSFLKDDSIDNKVLTRSDKARGKSDNVPSEEVVKKMKNYWRQLLNAKLITQRKFDNLTKAERGGLSELDKAGFIKRQLVETRQITKHVAQILDSRMNTKYDENDKLIREVKVITLKSKLVSDFRKDFQFYKVREINNYHHAHDAYLNAVVGTALIKKYPKLESEFVYGDYKVYDVRKMIAKSEQEIGKATAKYFFYSNIMNFFKTEITLANGEIRKRPLIETNGETGEIVWDKGRDFATVRKVLSMPQVNIVKKTEVQTGGFSKESILPKRNSDKLIARKKDWDPKKYGGFDSPTVAYSVLVVAKVEKGKSKKLKSVKELLGITIMERSSFEKNPIDFLEAKGYKEVKKDLIIKLPKYSLFELENGRKRMLASAGELQKGNELALPSKYVNFLYLASHYEKLKGSPEDNEQKQLFVEQHKHYLDEIIEQISEFSKRVILADANLDKVLSAYNKHRDKPIREQAENIIHLFTLTNLGAPAAFKYFDTTIDRKRYTSTKEVLDATLIHQSITGLYETRIDLSQLGGDGGPAPEAAAKGGTAPLEEEYRLFLEAPIQNVTLLEQWKREIPKVWAEINPPGLASTQAPIHVQLLSTALPVRVRQYPITLEAKRSLRETIRKFRAAGILRPVHSPWNTPLLPVRKSGTSEYRMVQDLREVNKRVETIHPTVPNPYTLLSLLPPDRIWYSVLDLKDAFFCIPLAPESQLIFAFEWADAEEGESGQLTWTRLPQGFKNSPTLFNEALNRDLQGFRLDHPSVSLLQYVDDLLIAADTQAACLSATRDLLMTLAELGYRVSGKKAQLCQEEVTYLGFKIHKGSRSLSNSRTQAILQIPVPKTKRQVREFLGTIGYCRLWIPGFAELAQPLYAATRPGNDPLVWGEKEEEAFQSLKLALTQPPALALPSLDKPFQLFVEETSGAAKGVLTQALGPWKRPVAYLSKRLDPVAAGWPRCLRAIAAAALLTREASKLTFGQDIEITSSHNLESLLRSPPDKWLTNARITQYQVLLLDPPRVRFKQTAALNPATLLPETDDTLPIHHCLDTLDSLTSTRPDLTDQPLAQAEATLFTDGSSYIRDGKRYAGAAVVTLDSVIWAEPLPIGTSAQKAELIALTKALEWSKDKSVNIYTDSRYAFATLHVHGMIYRERGWLTAGGKAIKNAPEILALLTAVWLPKRVAVMHCKGHQKDDAPTSTGNRRADEVAREVAIRPLSTQATISAGKRTADGSEFEKRTADGSEFESPKKKAKVE

SEQ ID NO: 6785 - protein, 2092 aa, synthetic construct
MPAAKRVKLDGGDKKYSIGLDIGTNSVGWAVITDEYKVPSKKFKVLGNTDRHSIKKNLIGALLFDSGETAEATRLKRTARRRYTRRKNRICYLQEIFSNEMAKVDDSFFHRLEESFLVEEDKKHERHPIFGNIVDEVAYHEKYPTIYHLRKKLVDSTDKADLRLIYLALAHMIKFRGHFLIEGDLNPDNSDVDKLFIQLVQTYNQLFEENPINASGVDAKAILSARLSKSRRLENLIAQLPGEKKNGLFGNLIALSLGLTPNFKSNFDLAEDAKLQLSKDTYDDDLDNLLAQIGDQYADLFLAAKNLSDAILLSDILRVNTEITKAPLSASMIKRYDEHHQDLTLLKALVRQQLPEKYKEIFFDQSKNGYAGYIDGGASQEEFYKFIKPILEKMDGTEELLVKLNREDLLRKQRTFDNGSIPHQIHLGELHAILRRQEDFYPFLKDNREKIEKILTFRIPYYVGPLARGNSRFAWMTRKSEETITPWNFEEVVDKGASAQSFIERMTNFDKNLPNEKVLPKHSLLYEYFTVYNELTKVKYVTEGMRKPAFLSGEQKKAIVDLLFKTNRKVTVKQLKEDYFKKIECFDSVEISGVEDRFNASLGTYHDLLKIIKDKDFLDNEENEDILEDIVLTLTLFEDREMIEERLKTYAHLFDDKVMKQLKRRRYTGWGRLSRKLINGIRDKQSGKTILDFLKSDGFANRNFMQLIHDDSLTFKEDIQKAQVSGQGDSLHEHIANLAGSPAIKKGILQTVKVVDELVKVMGRHKPENIVIEMARENQTTQKGQKNSRERMKRIEEGIKELGSQILKEHPVENTQLQNEKLYLYYLQNGRDMYVDQELDINRLSDYDVDHIVPQSFLKDDSIDNKVLTRSDKARGKSDNVPSEEVVKKMKNYWRQLLNAKLITQRKFDNLTKAERGGLSELDKAGFIKRQLVETRQITKHVAQILDSRMNTKYDENDKLIREVKVITLKSKLVSDFRKDFQFYKVREINNYHHAHDAYLNAVVGTALIKKYPKLESEFVYGDYKVYDVRKMIAKSEQEIGKATAKYFFYSNIMNFFKTEITLANGEIRKRPLIETNGETGEIVWDKGRDFATVRKVLSMPQVNIVKKTEVQTGGFSKESILPKRNSDKLIARKKDWDPKKYGGFDSPTVAYSVLVVAKVEKGKSKKLKSVKELLGITIMERSSFEKNPIDFLEAKGYKEVKKDLIIKLPKYSLFELENGRKRMLASAGELQKGNELALPSKYVNFLYLASHYEKLKGSPEDNEQKQLFVEQHKHYLDEIIEQISEFSKRVILADANLDKVLSAYNKHRDKPIREQAENIIHLFTLTNLGAPAAFKYFDTTIDRKRYTSTKEVLDATLIHQSITGLYETRIDLSQLGGDGGPAPEAAAKGGTLQLEEEYRLFEPESTQKQEMDIWLKNFPQAWAETGGMGTAHCQAPVLIQLKATATPISIRQYPMPHEAYQGIKPHIRRMLDQGILKPCQSPWNTPLLPVKKPGTEDYRPVQDLREVNKRVEDIHPTVPNPYNLLSTLPPSHPWYTVLDLKDAFFCLRLHSESQLLFAFEWRDPEIGLSGQLTWTRLPQGFKNSPTLFNEALHSDLADFRVRYPALVLLQYVDDLLLAAATRTECLEGTKALLETLGNKGYRASAKKAQICLQEVTYLGYSLKDGQRWLTKARKEAILSIPVPKNSRQVREFLGTAGYCRLWIPGFAELAAPLYPLTRPGTLFQWGTEQQLAFEDIKKALLSSPALGLPDITKPFELFIDENSGFAKGVLVQKLGPWKRPVAYLSKKLDTVASGWPPCLRMVAAIAILVKDAGKLTLGQPLTILTSHPVEALVRQPPNKWLSNARMTHYQAMLLDAERVHFGPTVSLNPATLLPLPSGGNHHDCLQILAETHGTRPDLTDQPLPDADLTWYTDGSSFIRNGEREAGAAVTTESEVIWAAPLPPGTSAQRAELIALTQALKMAEGKKLTVYTDSRYAFATTHVHGEIYRRRGWLTSEGKEIKNKNEILALLEALFLPKRLSIIHCPGHQKGDSPQAKGNRLADDTAKKAATETHSSLTVLPAGKRTADGSEFEKRTADGSEFESPKKKAKVE

SEQ ID NO: 6786 - protein, 2124 aa, synthetic construct
MPAAKRVKLDGGDKKYSIGLDIGTNSVGWAVITDEYKVPSKKFKVLGNTDRHSIKKNLIGALLFDSGETAEATRLKRTARRRYTRRKNRICYLQEIFSNEMAKVDDSFFHRLEESFLVEEDKKHERHPIFGNIVDEVAYHEKYPTIYHLRKKLVDSTDKADLRLIYLALAHMIKFRGHFLIEGDLNPDNSDVDKLFIQLVQTYNQLFEENPINASGVDAKAILSARLSKSRRLENLIAQLPGEKKNGLFGNLIALSLGLTPNFKSNFDLAEDAKLQLSKDTYDDDLDNLLAQIGDQYADLFLAAKNLSDAILLSDILRVNTEITKAPLSASMIKRYDEHHQDLTLLKALVRQQLPEKYKEIFFDQSKNGYAGYIDGGASQEEFYKFIKPILEKMDGTEELLVKLNREDLLRKQRTFDNGSIPHQIHLGELHAILRRQEDFYPFLKDNREKIEKILTFRIPYYVGPLARGNSRFAWMTRKSEETITPWNFEEVVDKGASAQSFIERMTNFDKNLPNEKVLPKHSLLYEYFTVYNELTKVKYVTEGMRKPAFLSGEQKKAIVDLLFKTNRKVTVKQLKEDYFKKIECFDSVEISGVEDRFNASLGTYHDLLKIIKDKDFLDNEENEDILEDIVLTLTLFEDREMIEERLKTYAHLFDDKVMKQLKRRRYTGWGRLSRKLINGIRDKQSGKTILDFLKSDGFANRNFMQLIHDDSLTFKEDIQKAQVSGQGDSLHEHIANLAGSPAIKKGILQTVKVVDELVKVMGRHKPENIVIEMARENQTTQKGQKNSRERMKRIEEGIKELGSQILKEHPVENTQLQNEKLYLYYLQNGRDMYVDQELDINRLSDYDVDHIVPQSFLKDDSIDNKVLTRSDKARGKSDNVPSEEVVKKMKNYWRQLLNAKLITQRKFDNLTKAERGGLSELDKAGFIKRQLVETRQITKHVAQILDSRMNTKYDENDKLIREVKVITLKSKLVSDFRKDFQFYKVREINNYHHAHDAYLNAVVGTALIKKYPKLESEFVYGDYKVYDVRKMIAKSEQEIGKATAKYFFYSNIMNFFKTEITLANGEIRKRPLIETNGETGEIVWDKGRDFATVRKVLSMPQVNIVKKTEVQTGGFSKESILPKRNSDKLIARKKDWDPKKYGGFDSPTVAYSVLVVAKVEKGKSKKLKSVKELLGITIMERSSFEKNPIDFLEAKGYKEVKKDLIIKLPKYSLFELENGRKRMLASAGELQKGNELALPSKYVNFLYLASHYEKLKGSPEDNEQKQLFVEQHKHYLDEIIEQISEFSKRVILADANLDKVLSAYNKHRDKPIREQAENIIHLFTLTNLGAPAAFKYFDTTIDRKRYTSTKEVLDATLIHQSITGLYETRIDLSQLGGDGGPAPEAAAKGGLLGRDLLTKLKAQIQFSTEGPQVTWEDRPAMCLVLNLEEEYRLHEKPVPPSIDPSWLQLFPMVWAEKAGMGLANQVPPVVVELKSDASPVAVRQYPMSKEAREGIRPHIQRFLDLGILVPCQSPWNTPLLPVKKPGTNDYRPVQDLREVNKRVQDIHPTVPNPYNLLSSLPPSHTWYSVLDLKDAFFCLKLHPNSQPLFAFEWRDPEKGNTGQLTWTRLPQGFKNSPTLFNEALHRDLASFRALNPQVVMLQYVDDLLVAAPTYRDCKEGTRRLLQELSKLGYRVSAKKAQLCREEVTYLGYLLKGGKRWLTPARKATVMKIPTPTTPRQVREFLGTAGFCRLWIPGFASLAAPLYPLTRPKVPFTWTEAHQEAFGRIKEALLSAPALALPDLTKPFALYVDEKEGVARGVLTQTLGPWRRPVAYLSKKLDPVASGWPTCLKAIAAVALLLKDADKLTLGQNVLVIAPHNLESIVRQPPDRWMTNARMTHYQSLLLNERVSFAPPAILNPATLLPVESDDTPIHICSEILAEETGTRPDLRDQPLPGVPAWYTDGSSFIMDGRRQAGAAIVDNKRTVWASNLPEGTSAQKAELIALTQALRLAEGKSINIYTDSRYAFATAHVHGAIYKQRGWLTSAGKDIKNKEEILALLEAIHLPKRVAIIHCPGHQRGTDPVATGNRKADEAAKQAAQSTRILTETTKNAGKRTADGSEFEKRTADGSEFESPKKKAKVE

SEQ ID NO: 6787 - protein, 2215 aa, synthetic construct
MPAAKRVKLDGGDKKYSIGLDIGTNSVGWAVITDEYKVPSKKFKVLGNTDRHSIKKNLIGALLFDSGETAEATRLKRTARRRYTRRKNRICYLQEIFSNEMAKVDDSFFHRLEESFLVEEDKKHERHPIFGNIVDEVAYHEKYPTIYHLRKKLVDSTDKADLRLIYLALAHMIKFRGHFLIEGDLNPDNSDVDKLFIQLVQTYNQLFEENPINASGVDAKAILSARLSKSRRLENLIAQLPGEKKNGLFGNLIALSLGLTPNFKSNFDLAEDAKLQLSKDTYDDDLDNLLAQIGDQYADLFLAAKNLSDAILLSDILRVNTEITKAPLSASMIKRYDEHHQDLTLLKALVRQQLPEKYKEIFFDQSKNGYAGYIDGGASQEEFYKFIKPILEKMDGTEELLVKLNREDLLRKQRTFDNGSIPHQIHLGELHAILRRQEDFYPFLKDNREKIEKILTFRIPYYVGPLARGNSRFAWMTRKSEETITPWNFEEVVDKGASAQSFIERMTNFDKNLPNEKVLPKHSLLYEYFTVYNELTKVKYVTEGMRKPAFLSGEQKKAIVDLLFKTNRKVTVKQLKEDYFKKIECFDSVEISGVEDRFNASLGTYHDLLKIIKDKDFLDNEENEDILEDIVLTLTLFEDREMIEERLKTYAHLFDDKVMKQLKRRRYTGWGRLSRKLINGIRDKQSGKTILDFLKSDGFANRNFMQLIHDDSLTFKEDIQKAQVSGQGDSLHEHIANLAGSPAIKKGILQTVKVVDELVKVMGRHKPENIVIEMARENQTTQKGQKNSRERMKRIEEGIKELGSQILKEHPVENTQLQNEKLYLYYLQNGRDMYVDQELDINRLSDYDVDHIVPQSFLKDDSIDNKVLTRSDKARGKSDNVPSEEVVKKMKNYWRQLLNAKLITQRKFDNLTKAERGGLSELDKAGFIKRQLVETRQITKHVAQILDSRMNTKYDENDKLIREVKVITLKSKLVSDFRKDFQFYKVREINNYHHAHDAYLNAVVGTALIKKYPKLESEFVYGDYKVYDVRKMIAKSEQEIGKATAKYFFYSNIMNFFKTEITLANGEIRKRPLIETNGETGEIVWDKGRDFATVRKVLSMPQVNIVKKTEVQTGGFSKESILPKRNSDKLIARKKDWDPKKYGGFDSPTVAYSVLVVAKVEKGKSKKLKSVKELLGITIMERSSFEKNPIDFLEAKGYKEVKKDLIIKLPKYSLFELENGRKRMLASAGELQKGNELALPSKYVNFLYLASHYEKLKGSPEDNEQKQLFVEQHKHYLDEIIEQISEFSKRVILADANLDKVLSAYNKHRDKPIREQAENIIHLFTLTNLGAPAAFKYFDTTIDRKRYTSTKEVLDATLIHQSITGLYETRIDLSQLGGDGGPAPEAAAKGGTLGDQGSRGSDPLPEPRVTLTVEGIPTEFLVNTGAEHSVLTKPMGKMGSKRTVVAGATGSKVYPWTTKRLLKIGQKQVTHSFLVIPECPAPLLGRDLLTKLKAQIQFSTEGPQVTWEDRPAMCLVLNLEEEYRLHEKPVPPSIDPSWLQLFPMVWAEKAGMGLANQVPPVVVELKSDASPVAVRQYPMSKEAREGIRPHIQRFLDLGILVPCQSPWNTPLLPVKKPGTNDYRPVQDLREVNKRVQDIHPTVPNPYNLLSSLPPSHTWYSVLDLKDAFFCLKLHPNSQPLFAFEWRDPEKGNTGQLTWTRLPQGFKNSPTLFNEALHRDLASFRALNPQVVMLQYVDDLLVAAPTYRDCKEGTRRLLQELSKLGYRVSAKKAQLCREEVTYLGYLLKGGKRWLTPARKATVMKIPTPTTPRQVREFLGKAGFCRLFIPGFASLAAPLYPLTRPKVPFTWTEAHQEAFGRIKEALLSAPALALPDLTKPFALYVDEKEGVARGVLTQTLGPWRRPVAYLSKKLDPVASGWPTCLKAIAAVALLLKDADKLTLGQNVLVIAPHNLESIVRQPPDRWMTNARMTHYQSLLLNERVSFAPPAILNPATLLPVESDDTPIHICSEILAEETGTRPDLRDQPLPGVPAWYTDGSSFIMDGRRQAGAAIVDNKRTVWASNLPEGTSAQKAELIALTQALRLAEGKSINIYTDSRYAFATAHVHGAIYKQRGWLTSAGKDIKNKEEILALLEAIHLPKRVAIIHCPGHQRGTDPVATGNRKADEAAKQAAQSTRILTETTKNAGKRTADGSEFEKRTADGSEFESPKKKAKVE

SEQ ID NO: 6788 - protein, 2093 aa, synthetic construct; identical to SEQ ID NO: 4516

SEQ ID NO: 6789 - protein, 2093 aa, synthetic construct
MPAAKRVKLDGGDKKYSIGLDIGTNSVGWAVITDEYKVPSKKFKVLGNTDRHSIKKNLIGALLFDSGETAEATRLKRTARRRYTRRKNRICYLQEIFSNEMAKVDDSFFHRLEESFLVEEDKKHERHPIFGNIVDEVAYHEKYPTIYHLRKKLVDSTDKADLRLIYLALAHMIKFRGHFLIEGDLNPDNSDVDKLFIQLVQTYNQLFEENPINASGVDAKAILSARLSKSRRLENLIAQLPGEKKNGLFGNLIALSLGLTPNFKSNFDLAEDAKLQLSKDTYDDDLDNLLAQIGDQYADLFLAAKNLSDAILLSDILRVNTEITKAPLSASMIKRYDEHHQDLTLLKALVRQQLPEKYKEIFFDQSKNGYAGYIDGGASQEEFYKFIKPILEKMDGTEELLVKLNREDLLRKQRTFDNGSIPHQIHLGELHAILRRQEDFYPFLKDNREKIEKILTFRIPYYVGPLARGNSRFAWMTRKSEETITPWNFEEVVDKGASAQSFIERMTNFDKNLPNEKVLPKHSLLYEYFTVYNELTKVKYVTEGMRKPAFLSGEQKKAIVDLLFKTNRKVTVKQLKEDYFKKIECFDSVEISGVEDRFNASLGTYHDLLKIIKDKDFLDNEENEDILEDIVLTLTLFEDREMIEERLKTYAHLFDDKVMKQLKRRRYTGWGRLSRKLINGIRDKQSGKTILDFLKSDGFANRNFMQLIHDDSLTFKEDIQKAQVSGQGDSLHEHIANLAGSPAIKKGILQTVKVVDELVKVMGRHKPENIVIEMARENQTTQKGQKNSRERMKRIEEGIKELGSQILKEHPVENTQLQNEKLYLYYLQNGRDMYVDQELDINRLSDYDVDHIVPQSFLKDDSIDNKVLTRSDKARGKSDNVPSEEVVKKMKNYWRQLLNAKLITQRKFDNLTKAERGGLSELDKAGFIKRQLVETRQITKHVAQILDSRMNTKYDENDKLIREVKVITLKSKLVSDFRKDFQFYKVREINNYHHAHDAYLNAVVGTALIKKYPKLESEFVYGDYKVYDVRKMIAKSEQEIGKATAKYFFYSNIMNFFKTEITLANGEIRKRPLIETNGETGEIVWDKGRDFATVRKVLSMPQVNIVKKTEVQTGGFSKESILPKRNSDKLIARKKDWDPKKYGGFDSPTVAYSVLVVAKVEKGKSKKLKSVKELLGITIMERSSFEKNPIDFLEAKGYKEVKKDLIIKLPKYSLFELENGRKRMLASAGELQKGNELALPSKYVNFLYLASHYEKLKGSPEDNEQKQLFVEQHKHYLDEIIEQISEFSKRVILADANLDKVLSAYNKHRDKPIREQAENIIHLFTLTNLGAPAAFKYFDTTIDRKRYTSTKEVLDATLIHQSITGLYETRIDLSQLGGDGGPAPEAAAKGGTLNIEDEYRLHETSKEPDVSLGSTWLSDFPQAWAETGGMGLAVRQAPLIIPLKATSTPVSIKQYPMSQEARLGIKPHIQRLLDQGILVPCQSPWNTPLLPVKKPGTNDYRPVQDLREVNKRVEDIHPTVPNPYNLLSGLPPSHQWYTVLDLKDAFFCLRLHPTSQPLFAFEWRDPEMGISGQLTWTRLPQGFKNSPTLFNEALHRDLAGFRIQHPDLILLQYVDDLLLAATSELDCQQGTRALLQTLGDLGYRASAKKAQICQKQVKYLGYLLKEGQRWLTEARKETVMGQPIPKTPRQLREFLGTAGFCRLWIPGFAEMAAPLYPLTKPGTLFNWGPDQQKAFQEIKQALLTAPALGLPDLTKPFELFVDEKQGYAKGVLTQKLGPWRRPVAYLSKKLDPVAAGWPPCLRMVAAIAVLTKDAGKLTMGQPLVILAPHAVEALVKQPPDRWLSNARMTHYQALLLDTDRVQFGPVVALNPATLLPLPEEGLQHDCLDILAEAHGTRSDLMDQPLPDADHTWYTDGSSFLQEGQRKAGAAVTTETEVIWARALPAGTSAQRAELIALTQALKMAEGKKLNVYTDSRYAFATAHIHGEIYRRRGWLTSEGKEIKNKDEILALLKALFLPKRLSIIHCPGHQKGNSAEARGNRMADQAAREVATRETPETSTLLAGKRTADGSEFEKRTADGSEFESPKKKAKVE

SEQ ID NO: 6790 - protein, 2113 aa, synthetic construct
MPAAKRVKLDGGDKKYSIGLDIGTNSVGWAVITDEYKVPSKKFKVLGNTDRHSIKKNLIGALLFDSGETAEATRLKRTARRRYTRRKNRICYLQEIFSNEMAKVDDSFFHRLEESFLVEEDKKHERHPIFGNIVDEVAYHEKYPTIYHLRKKLVDSTDKADLRLIYLALAHMIKFRGHFLIEGDLNPDNSDVDKLFIQLVQTYNQLFEENPINASGVDAKAILSARLSKSRRLENLIAQLPGEKKNGLFGNLIALSLGLTPNFKSNFDLAEDAKLQLSKDTYDDDLDNLLAQIGDQYADLFLAAKNLSDAILLSDILRVNTEITKAPLSASMIKRYDEHHQDLTLLKALVRQQLPEKYKEIFFDQSKNGYAGYIDGGASQEEFYKFIKPILEKMDGTEELLVKLNREDLLRKQRTFDNGSIPHQIHLGELHAILRRQEDFYPFLKDNREKIEKILTFRIPYYVGPLARGNSRFAWMTRKSEETITPWNFEEVVDKGASAQSFIERMTNFDKNLPNEKVLPKHSLLYEYFTVYNELTKVKYVTEGMRKPAFLSGEQKKAIVDLLFKTNRKVTVKQLKEDYFKKIECFDSVEISGVEDRFNASLGTYHDLLKIIKDKDFLDNEENEDILEDIVLTLTLFEDREMIEERLKTYAHLFDDKVMKQLKRRRYTGWGRLSRKLINGIRDKQSGKTILDFLKSDGFANRNFMQLIHDDSLTFKEDIQKAQVSGQGDSLHEHIANLAGSPAIKKGILQTVKVVDELVKVMGRHKPENIVIEMARENQTTQKGQKNSRERMKRIEEGIKELGSQILKEHPVENTQLQNEKLYLYYLQNGRDMYVDQELDINRLSDYDVDHIVPQSFLKDDSIDNKVLTRSDKARGKSDNVPSEEVVKKMKNYWRQLLNAKLITQRKFDNLTKAERGGLSELDKAGFIKRQLVETRQITKHVAQILDSRMNTKYDENDKLIREVKVITLKSKLVSDFRKDFQFYKVREINNYHHAHDAYLNAVVGTALIKKYPKLESEFVYGDYKVYDVRKMIAKSEQEIGKATAKYFFYSNIMNFFKTEITLANGEIRKRPLIETNGETGEIVWDKGRDFATVRKVLSMPQVNIVKKTEVQTGGFSKESILPKRNSDKLIARKKDWDPKKYGGFDSPTVAYSVLVVAKVEKGKSKKLKSVKELLGITIMERSSFEKNPIDFLEAKGYKEVKKDLIIKLPKYSLFELENGRKRMLASAGELQKGNELALPSKYVNFLYLASHYEKLKGSPEDNEQKQLFVEQHKHYLDEIIEQISEFSKRVILADANLDKVLSAYNKHRDKPIREQAENIIHLFTLTNLGAPAAFKYFDTTIDRKRYTSTKEVLDATLIHQSITGLYETRIDLSQLGGDGGPAPEAAAKGGVQEISDSRPMLHIYLNGRRFLGLLDTGADKTCIAGRDWPANWPIHQTESSLQGLGMACGVARSSQPLRWQHEDKSGIIHPFVIPTLPFTLWGRDIMKDIKVRLMTDSPDDSQDLMIGAIESNLFADQISWKSDQPVWLNQWPLKQEKLQALQQLVTEQLQLGHLEESNSPWNTPVFVIKKKSGKWRLLQDLRAVNATMHDMGALQPGLPSPVAVPKGWEIIIIDLQDCFFNIKLHPEDCKRFAFSVPSPNFKRPYQRFQWKVLPQGMKNSPTLCQKFVDKAILTVRDKYQDSYIVHYMDDILLAHPSRSIVDEILTSMIQALNKHGLVVSTEKIQKYDNLKYLGTHIQGDSVSYQKLQIRTDKLRTLNDFQKLLGNINWIRPFLKLTTGELKPLFEILNPDSNPISTRKLTPEACKALQLMNERLSTARVKRLDLSQPWSLCILKTEYTPTACLWQDGVVEWIHLPHISPKVITPYDIFCTQLIIKGRHRSKELFSKDPDYIVVPYTKVQFDLLLQEKEDWPISLLGFLGEVHFHLPKDPLLTFTLQTAIIFPHMTSTTPLEKGIVIFTDGSANGRSVTYIQGREPIIKENTQNTAQQAEIVAVITAFEEVSQPFNLYTDSKYVTGLFPEIETATLSPRTKIYTELKHLQRLIHKRQEKFYIGHIRGHTGLPGPLAQGNAYADSLTRILTAAGKRTADGSEFEKRTADGSEFESPKKKAKVE

SEQ ID NO: 6791 - protein, 2085 aa, synthetic construct
MPAAKRVKLDGGDKKYSIGLDIGTNSVGWAVITDEYKVPSKKFKVLGNTDRHSIKKNLIGALLFDSGETAEATRLKRTARRRYTRRKNRICYLQEIFSNEMAKVDDSFFHRLEESFLVEEDKKHERHPIFGNIVDEVAYHEKYPTIYHLRKKLVDSTDKADLRLIYLALAHMIKFRGHFLIEGDLNPDNSDVDKLFIQLVQTYNQLFEENPINASGVDAKAILSARLSKSRRLENLIAQLPGEKKNGLFGNLIALSLGLTPNFKSNFDLAEDAKLQLSKDTYDDDLDNLLAQIGDQYADLFLAAKNLSDAILLSDILRVNTEITKAPLSASMIKRYDEHHQDLTLLKALVRQQLPEKYKEIFFDQSKNGYAGYIDGGASQEEFYKFIKPILEKMDGTEELLVKLNREDLLRKQRTFDNGSIPHQIHLGELHAILRRQEDFYPFLKDNREKIEKILTFRIPYYVGPLARGNSRFAWMTRKSEETITPWNFEEVVDKGASAQSFIERMTNFDKNLPNEKVLPKHSLLYEYFTVYNELTKVKYVTEGMRKPAFLSGEQKKAIVDLLFKTNRKVTVKQLKEDYFKKIECFDSVEISGVEDRFNASLGTYHDLLKIIKDKDFLDNEENEDILEDIVLTLTLFEDREMIEERLKTYAHLFDDKVMKQLKRRRYTGWGRLSRKLINGIRDKQSGKTILDFLKSDGFANRNFMQLIHDDSLTFKEDIQKAQVSGQGDSLHEHIANLAGSPAIKKGILQTVKVVDELVKVMGRHKPENIVIEMARENQTTQKGQKNSRERMKRIEEGIKELGSQILKEHPVENTQLQNEKLYLYYLQNGRDMYVDQELDINRLSDYDVDHIVPQSFLKDDSIDNKVLTRSDKARGKSDNVPSEEVVKKMKNYWRQLLNAKLITQRKFDNLTKAERGGLSELDKAGFIKRQLVETRQITKHVAQILDSRMNTKYDENDKLIREVKVITLKSKLVSDFRKDFQFYKVREINNYHHAHDAYLNAVVGTALIKKYPKLESEFVYGDYKVYDVRKMIAKSEQEIGKATAKYFFYSNIMNFFKTEITLANGEIRKRPLIETNGETGEIVWDKGRDFATVRKVLSMPQVNIVKKTEVQTGGFSKESILPKRNSDKLIARKKDWDPKKYGGFDSPTVAYSVLVVAKVEKGKSKKLKSVKELLGITIMERSSFEKNPIDFLEAKGYKEVKKDLIIKLPKYSLFELENGRKRMLASAGELQKGNELALPSKYVNFLYLASHYEKLKGSPEDNEQKQLFVEQHKHYLDEIIEQISEFSKRVILADANLDKVLSAYNKHRDKPIREQAENIIHLFTLTNLGAPAAFKYFDTTIDRKRYTSTKEVLDATLIHQSITGLYETRIDLSQLGGDGGPAPEAAAKGGLDDEYRLYSPLVKPDQNIQFWLEQFPQAWAETAGMGLAKQVPPQVIQLKASATPVSVRQYPLSKEAQEGIRPHVQRLIQQGILVPVQSPWNTPLLPVRKPGTNDYRPVQDLREVNKRVQDIHPTVPNPYNLLCALPPQRSWYTVLDLKDAFFCLRLHPTSQPLFAFEWRDPGTGRTGQLTWTRLPQGFKNSPTIFNEALHRDLANFRIQHPQVTLLQYVDDLLLAGATKQDCLEGTKALLLELSDLGYRASAKKAQICRREVTYLGYSLRDGQRWLTEARKKTVVQIPAPTTAKQVREFLGKAGFCRLFIPGFATLAAPLYPLTKPKGEFSWAPEHQKAFDAIKKALLSAPALALPDVTKPFTLYVDERKGVARGVLTQTLGPWRRPVAYLSKKLDPVASGWPVCLKAIAAVAILVKDADKLTLGQNITVIAPHALENIVRQPPDRWMTNARMTHYQSLLLTERVTFAPPAALNPATLLPEETDEPVTHDCHQLLIEETGVRKDLTDIPLTGEVLTWFTDGSSYVVEGKRMAGAAVVDGTRTIWASSLPEGTSAQKAELMALTQALRLAEGKSINIYTDSRYAFATAHVHGAIYKQRGWLTSAGREIKNKEEILSLLEALHLPKRLAIIHCPGHQKAKDPISRGNQMADRVAKQAAQGVNLLPAGKRTADGSEFEKRTADGSEFESPKKKAKVE

SEQ ID NO: 6792 - protein, 2087 aa, synthetic construct
MPAAKRVKLDGGDKKYSIGLDIGTNSVGWAVITDEYKVPSKKFKVLGNTDRHSIKKNLIGALLFDSGETAEATRLKRTARRRYTRRKNRICYLQEIFSNEMAKVDDSFFHRLEESFLVEEDKKHERHPIFGNIVDEVAYHEKYPTIYHLRKKLVDSTDKADLRLIYLALAHMIKFRGHFLIEGDLNPDNSDVDKLFIQLVQTYNQLFEENPINASGVDAKAILSARLSKSRRLENLIAQLPGEKKNGLFGNLIALSLGLTPNFKSNFDLAEDAKLQLSKDTYDDDLDNLLAQIGDQYADLFLAAKNLSDAILLSDILRVNTEITKAPLSASMIKRYDEHHQDLTLLKALVRQQLPEKYKEIFFDQSKNGYAGYIDGGASQEEFYKFIKPILEKMDGTEELLVKLNREDLLRKQRTFDNGSIPHQIHLGELHAILRRQEDFYPFLKDNREKIEKILTFRIPYYVGPLARGNSRFAWMTRKSEETITPWNFEEVVDKGASAQSFIERMTNFDKNLPNEKVLPKHSLLYEYFTVYNELTKVKYVTEGMRKPAFLSGEQKKAIVDLLFKTNRKVTVKQLKEDYFKKIECFDSVEISGVEDRFNASLGTYHDLLKIIKDKDFLDNEENEDILEDIVLTLTLFEDREMIEERLKTYAHLFDDKVMKQLKRRRYTGWGRLSRKLINGIRDKQSGKTILDFLKSDGFANRNFMQLIHDDSLTFKEDIQKAQVSGQGDSLHEHIANLAGSPAIKKGILQTVKVVDELVKVMGRHKPENIVIEMARENQTTQKGQKNSRERMKRIEEGIKELGSQILKEHPVENTQLQNEKLYLYYLQNGRDMYVDQELDINRLSDYDVDHIVPQSFLKDDSIDNKVLTRSDKARGKSDNVPSEEVVKKMKNYWRQLLNAKLITQRKFDNLTKAERGGLSELDKAGFIKRQLVETRQITKHVAQILDSRMNTKYDENDKLIREVKVITLKSKLVSDFRKDFQFYKVREINNYHHAHDAYLNAVVGTALIKKYPKLESEFVYGDYKVYDVRKMIAKSEQEIGKATAKYFFYSNIMNFFKTEITLANGEIRKRPLIETNGETGEIVWDKGRDFATVRKVLSMPQVNIVKKTEVQTGGFSKESILPKRNSDKLIARKKDWDPKKYGGFDSPTVAYSVLVVAKVEKGKSKKLKSVKELLGITIMERSSFEKNPIDFLEAKGYKEVKKDLIIKLPKYSLFELENGRKRMLASAGELQKGNELALPSKYVNFLYLASHYEKLKGSPEDNEQKQLFVEQHKHYLDEIIEQISEFSKRVILADANLDKVLSAYNKHRDKPIREQAENIIHLFTLTNLGAPAAFKYFDTTIDRKRYTSTKEVLDATLIHQSITGLYETRIDLSQLGGDGGPAPEAAAKGGTLQLDDEYRLYSPLVKPDQNIQFWLEQFPQAWAETAGMGLAKQVPPQVIQLKASATPVSVRQYPLSKEAQEGIRPHVQRLIQQGILVPVQSPWNTPLLPVRKPGTNDYRPVQDLREVNKRVQDIHPTVPNPYNLLCALPPQRSWYTVLDLKDAFFCLRLHPTSQPLFAFEWRDPGTGRTGQLTWTRLPQGFKNSPTIFDEALHRDLANFRIQHPQVTLLQYVDDLLLAGATKQDCLEGTKALLLELSDLGYRASAKKAQICRREVTYLGYSLRDGQRWLTEARKKTVVQIPAPTTAKQVREFLGTAGFCRLWIPGFATLAAPLYPLTKEKGEFSWAPEHQKAFDAIKKALLSAPALALPDVTKPFTLYVDERKGVARGVLTQTLGPWRRPVAYLSKKLDPVASGWPVCLKAIAAVAILVKDADKLTLGQNITVIAPHALENIVRQPPDRWMTNARMTHYQSLLLTERVTFAPPAALNPATLLPEETDEPVTHDCHQLLIEETGVRKDLTDIPLTGEVLTWFTDGSSYVVEGKRMAGAAVVDGTRTIWASSLPEGTSAQKAELMALTQALRLAEGKSINIYTDSRYAFATAHVHGAIYKQRGLLTSAGREIKNKEEILSLLEALHLPKRLAIIHCPGHQKAKDPISRGNQMADRVAKQAAQGVNLLAGKRTADGSEFEKRTADGSEFESPKKKAKVE

SEQ ID NO: 6793 - protein, 2085 aa, synthetic construct; identical to SEQ ID NO: 6791

SEQ ID NO: 6794 - protein, 2087 aa, synthetic construct; identical to SEQ ID NO: 6792

SEQ ID NO: 6795 - protein, 2091 aa, synthetic construct
MPAAKRVKLDGGDKKYSIGLDIGTNSVGWAVITDEYKVPSKKFKVLGNTDRHSIKKNLIGALLFDSGETAEATRLKRTARRRYTRRKNRICYLQEIFSNEMAKVDDSFFHRLEESFLVEEDKKHERHPIFGNIVDEVAYHEKYPTIYHLRKKLVDSTDKADLRLIYLALAHMIKFRGHFLIEGDLNPDNSDVDKLFIQLVQTYNQLFEENPINASGVDAKAILSARLSKSRRLENLIAQLPGEKKNGLFGNLIALSLGLTPNFKSNFDLAEDAKLQLSKDTYDDDLDNLLAQIGDQYADLFLAAKNLSDAILLSDILRVNTEITKAPLSASMIKRYDEHHQDLTLLKALVRQQLPEKYKEIFFDQSKNGYAGYIDGGASQEEFYKFIKPILEKMDGTEELLVKLNREDLLRKQRTFDNGSIPHQIHLGELHAILRRQEDFYPFLKDNREKIEKILTFRIPYYVGPLARGNSRFAWMTRKSEETITPWNFEEVVDKGASAQSFIERMTNFDKNLPNEKVLPKHSLLYEYFTVYNELTKVKYVTEGMRKPAFLSGEQKKAIVDLLFKTNRKVTVKQLKEDYFKKIECFDSVEISGVEDRFNASLGTYHDLLKIIKDKDFLDNEENEDILEDIVLTLTLFEDREMIEERLKTYAHLFDDKVMKQLKRRRYTGWGRLSRKLINGIRDKQSGKTILDFLKSDGFANRNFMQLIHDDSLTFKEDIQKAQVSGQGDSLHEHIANLAGSPAIKKGILQTVKVVDELVKVMGRHKPENIVIEMARENQTTQKGQKNSRERMKRIEEGIKELGSQILKEHPVENTQLQNEKLYLYYLQNGRDMYVDQELDINRLSDYDVDHIVPQSFLKDDSIDNKVLTRSDKARGKSDNVPSEEVVKKMKNYWRQLLNAKLITQRKFDNLTKAERGGLSELDKAGFIKRQLVETRQITKHVAQILDSRMNTKYDENDKLIREVKVITLKSKLVSDFRKDFQFYKVREINNYHHAHDAYLNAVVGTALIKKYPKLESEFVYGDYKVYDVRKMIAKSEQEIGKATAKYFFYSNIMNFFKTEITLANGEIRKRPLIETNGETGEIVWDKGRDFATVRKVLSMPQVNIVKKTEVQTGGFSKESILPKRNSDKLIARKKDWDPKKYGGFDSPTVAYSVLVVAKVEKGKSKKLKSVKELLGITIMERSSFEKNPIDFLEAKGYKEVKKDLIIKLPKYSLFELENGRKRMLASAGELQKGNELALPSKYVNFLYLASHYEKLKGSPEDNEQKQLFVEQHKHYLDEIIEQISEFSKRVILADANLDKVLSAYNKHRDKPIREQAENIIHLFTLTNLGAPAAFKYFDTTIDRKRYTSTKEVLDATLIHQSITGLYETRIDLSQLGGDGGPAPEAAAKGGVLNLEEEYRLHEKPVPSSIDPSWLQLFPTVWAERAGMGLANQVPPVVVELRSGASPVAVRQYPMSKEAREGIRPHIQRFLDLGVLVPCQSPWNTPLLPVKKPGTNDYRPVQDLREINKRVQDIHPTVPNPYNLLSSLPPSHTWYSVLDLKDAFFCLKLHPNSQPLFAFEWRDPEKGNTGQLTWTRLPQGFKNSPTLFDEALHRDLAPFRALNPQVVLLQYVDDLLVAAPTYRDCKEGTQKLLQELSKLGYRVSAKKAQLCQKEVTYLGYLLKEGKRWLTPARKATVMKIPPPTTPRQVREFLGTAGFCRLWIPGFASLAAPLYPLTKESIPFIWTEEHQKAFDRIKEALLSAPALALPDLTKPFTLYVDERAGVARGVLTQTLGPWRRPVAYLSKKLDPVASGWPTCLKAVAAVALLLKDADKLTLGQNVTVIASHSLESIVRQPPDRWMTNARMTHYQSLLLNERVSFAPPAVLNPATLLPVESEATPVHRCSEILAEETGTRRDLKDQPLPGVPAWYTDGSSFIAEGKRRAGAAIVDGKRTVWASSLPEGTSAQKAELVALTQALRLAEGKDINIYTDSRYAFATAHIHGAIYKQRGLLTSAGKDIKNKEEILALLEAIHLPKRVAIIHCPGHQKGNDPVATGNRRADEAAKQAALSTRVLAETTKPAGKRTADGSEFEKRTADGSEFESPKKKAKVE

SEQ ID NO: 6796 - protein, 2093 aa, synthetic construct
MPAAKRVKLDGGDKKYSIGLDIGTNSVGWAVITDEYKVPSKKFKVLGNTDRHSIKKNLIGALLFDSGETAEATRLKRTARRRYTRRKNRICYLQEIFSNEMAKVDDSFFHRLEESFLVEEDKKHERHPIFGNIVDEVAYHEKYPTIYHLRKKLVDSTDKADLRLIYLALAHMIKFRGHFLIEGDLNPDNSDVDKLFIQLVQTYNQLFEENPINASGVDAKAILSARLSKSRRLENLIAQLPGEKKNGLFGNLIALSLGLTPNFKSNFDLAEDAKLQLSKDTYDDDLDNLLAQIGDQYADLFLAAKNLSDAILLSDILRVNTEITKAPLSASMIKRYDEHHQDLTLLKALVRQQLPEKYKEIFFDQSKNGYAGYIDGGASQEEFYKFIKPILEKMDGTEELLVKLNREDLLRKQRTFDNGSIPHQIHLGELHAILRRQEDFYPFLKDNREKIEKILTFRIPYYVGPLARGNSRFAWMTRKSEETITPWNFEEVVDKGASAQSFIERMTNFDKNLPNEKVLPKHSLLYEYFTVYNELTKVKYVTEGMRKPAFLSGEQKKAIVDLLFKTNRKVTVKQLKEDYFKKIECFDSVEISGVEDRFNASLGTYHDLLKIIKDKDFLDNEENEDILEDIVLTLTLFEDREMIEERLKTYAHLFDDKVMKQLKRRRYTGWGRLSRKLINGIRDKQSGKTILDFLKSDGFANRNFMQLIHDDSLTFKEDIQKAQVSGQGDSLHEHIANLAGSPAIKKGILQTVKVVDELVKVMGRHKPENIVIEMARENQTTQKGQKNSRERMKRIEEGIKELGSQILKEHPVENTQLQNEKLYLYYLQNGRDMYVDQELDINRLSDYDVDHIVPQSFLKDDSIDNKVLTRSDKARGKSDNVPSEEVVKKMKNYWRQLLNAKLITQRKFDNLTKAERGGLSELDKAGFIKRQLVETRQITKHVAQILDSRMNTKYDENDKLIREVKVITLKSKLVSDFRKDFQFYKVREINNYHHAHDAYLNAVVGTALIKKYPKLESEFVYGDYKVYDVRKMIAKSEQEIGKATAKYFFYSNIMNFFKTEITLANGEIRKRPLIETNGETGEIVWDKGRDFATVRKVLSMPQVNIVKKTEVQTGGFSKESILPKRNSDKLIARKKDWDPKKYGGFDSPTVAYSVLVVAKVEKGKSKKLKSVKELLGITIMERSSFEKNPIDFLEAKGYKEVKKDLIIKLPKYSLFELENGRKRMLASAGELQKGNELALPSKYVNFLYLASHYEKLKGSPEDNEQKQLFVEQHKHYLDEIIEQISEFSKRVILADANLDKVLSAYNKHRDKPIREQAENIIHLFTLTNLGAPAAFKYFDTTIDRKRYTSTKEVLDATLIHQSITGLYETRIDLSQLGGDGGPAPEAAAKGGTLNIEDEYRLHETSKEPDVPLGSTWLSDFPQAWAETGGMGLAVRQAPLIIPLKATSTPVSIKQYPMSQEARLGIKPHIQRLLDQGILVPCQSPWNTPLLPVKKPGTNDYRPVQDLREVNKRVEDIHPTVPNPYNLLSGLPPSHQWYTVLDLKDAFFCLRLHPTSQPLFAFEWRDPEMGISGQLTWTRLPQGFKNSPTLFNEALHRDLADFRIQHPDLILLQYVDDLLLAATSEQDCQRGTRALLQTLGNLGYRASAKKAQICQKQVKYLGYLLKEGQRWLTEARKETVMGQPTPKTPRQLREFLGTAGFCRLWIPGFAEMAAPLYPLTKPGTLFNWGPDQQKAYQEIKQALLTAPALGLPDLTKPFELFVDEKQGYAKGVLTQKLGPWRRPVAYLSKKLDPVAAGWPPCLRMVAAIAVLTKDAGKLTMGQPLVILAPHAVEALVKQPPDRWLSNARMTHYQAMLLDTDRVQFGPVVALNPATLLPLPEKEAPHDCLEILAETHGTRPDLTDQPIPDADYTWYTDGSSFLQEGQRRAGAAVTTETEVIWARALPAGTSAQRAELIALTQALKMAEGKKLNVYTDSRYAFATAHVHGEIYRRRGWLTSEGREIKNKNEILALLKALFLPKRLSIIHCPGHQKGNSAEARGNRMADQAAREAAMKAVLETSTLLAGKRTADGSEFEKRTADGSEFESPKKKAKVE

SEQ ID NO: 6797 - protein, 2093 aa, synthetic construct
MPAAKRVKLDGGDKKYSIGLDIGTNSVGWAVITDEYKVPSKKFKVLGNTDRHSIKKNLIGALLFDSGETAEATRLKRTARRRYTRRKNRICYLQEIFSNEMAKVDDSFFHRLEESFLVEEDKKHERHPIFGNIVDEVAYHEKYPTIYHLRKKLVDSTDKADLRLIYLALAHMIKFRGHFLIEGDLNPDNSDVDKLFIQLVQTYNQLFEENPINASGVDAKAILSARLSKSRRLENLIAQLPGEKKNGLFGNLIALSLGLTPNFKSNFDLAEDAKLQLSKDTYDDDLDNLLAQIGDQYADLFLAAKNLSDAILLSDILRVNTEITKAPLSASMIKRYDEHHQDLTLLKALVRQQLPEKYKEIFFDQSKNGYAGYIDGGASQEEFYKFIKPILEKMDGTEELLVKLNREDLLRKQRTFDNGSIPHQIHLGELHAILRRQEDFYPFLKDNREKIEKILTFRIPYYVGPLARGNSRFAWMTRKSEETITPWNFEEVVDKGASAQSFIERMTNFDKNLPNEKVLPKHSLLYEYFTVYNELTKVKYVTEGMRKPAFLSGEQKKAIVDLLFKTNRKVTVKQLKEDYFKKIECFDSVEISGVEDRFNASLGTYHDLLKIIKDKDFLDNEENEDILEDIVLTLTLFEDREMIEERLKTYAHLFDDKVMKQLKRRRYTGWGRLSRKLINGIRDKQSGKTILDFLKSDGFANRNFMQLIHDDSLTFKEDIQKAQVSGQGDSLHEHIANLAGSPAIKKGILQTVKVVDELVKVMGRHKPENIVIEMARENQTTQKGQKNSRERMKRIEEGIKELGSQILKEHPVENTQLQNEKLYLYYLQNGRDMYVDQELDINRLSDYDVDHIVPQSFLKDDSIDNKVLTRSDKARGKSDNVPSEEVVKKMKNYWRQLLNAKLITQRKFDNLTKAERGGLSELDKAGFIKRQLVETRQITKHVAQILDSRMNTKYDENDKLIREVKVITLKSKLVSDFRKDFQFYKVREINNYHHAHDAYLNAVVGTALIKKYPKLESEFVYGDYKVYDVRKMIAKSEQEIGKATAKYFFYSNIMNFFKTEITLANGEIRKRPLIETNGETGEIVWDKGRDFATVRKVLSMPQVNIVKKTEVQTGGFSKESILPKRNSDKLIARKKDWDPKKYGGFDSPTVAYSVLVVAKVEKGKSKKLKSVKELLGITIMERSSFEKNPIDFLEAKGYKEVKKDLIIKLPKYSLFELENGRKRMLASAGELQKGNELALPSKYVNFLYLASHYEKLKGSPEDNEQKQLFVEQHKHYLDEIIEQISEFSKRVILADANLDKVLSAYNKHRDKPIREQAENIIHLFTLTNLGAPAAFKYFDTTIDRKRYTSTKEVLDATLIHQSITGLYETRIDLSQLGGDGGPAPEAAAKGGTLNIEDEYRLHETSKEPDVPLGSTWLSDFPQAWAETGGMGLAVRQAPLIIPLKATSTPVSIKQYPMSQEARLGIKPHIQRLLDQGILVPCQSPWNTPLLPVKKPGTNDYRPVQDLREVNKRVEDIHPTVPNPYNLLSGLPPSHQWYTVLDLKDAFFCLRLHPTSQPLFAFEWRDPEMGISGQLTWTRLPQGFKNSPTLFNEALHRDLADFRIQHPDLILLQYVDDLLLAATSEQDCQRGTRALLQTLGNLGYRASAKKAQICQKQVKYLGYLLKEGQRWLTEARKETVMGQPTPKTPRQLREFLGKAGFCRLFIPGFAEMAAPLYPLTKPGTLFNWGPDQQKAYQEIKQALLTAPALGLPDLTKPFELFVDEKQGYAKGVLTQKLGPWRRPVAYLSKKLDPVAAGWPPCLRMVAAIAVLTKDAGKLTMGQPLVILAPHAVEALVKQPPDRWLSNARMTHYQAMLLDTDRVQFGPVVALNPATLLPLPEKEAPHDCLEILAETHGTRPDLTDQPIPDADYTWYTDGSSFLQEGQRRAGAAVTTETEVIWARALPAGTSAQRAELIALTQALKMAEGKKLNVYTDSRYAFATAHVHGEIYRRRGWLTSEGREIKNKNEILALLKALFLPKRLSIIHCPGHQKGNSAEARGNRMADQAAREAAMKAVLETSTLLAGKRTADGSEFEKRTADGSEFESPKKKAKVE

SEQ ID NO: 6798 - protein, 2096 aa, synthetic construct
MPAAKRVKLDGGDKKYSIGLDIGTNSVGWAVITDEYKVPSKKFKVLGNTDRHSIKKNLIGALLFDSGETAEATRLKRTARRRYTRRKNRICYLQEIFSNEMAKVDDSFFHRLEESFLVEEDKKHERHPIFGNIVDEVAYHEKYPTIYHLRKKLVDSTDKADLRLIYLALAHMIKFRGHFLIEGDLNPDNSDVDKLFIQLVQTYNQLFEENPINASGVDAKAILSARLSKSRRLENLIAQLPGEKKNGLFGNLIALSLGLTPNFKSNFDLAEDAKLQLSKDTYDDDLDNLLAQIGDQYADLFLAAKNLSDAILLSDILRVNTEITKAPLSASMIKRYDEHHQDLTLLKALVRQQLPEKYKEIFFDQSKNGYAGYIDGGASQEEFYKFIKPILEKMDGTEELLVKLNREDLLRKQRTFDNGSIPHQIHLGELHAILRRQEDFYPFLKDNREKIEKILTFRIPYYVGPLARGNSRFAWMTRKSEETITPWNFEEVVDKGASAQSFIERMTNFDKNLPNEKVLPKHSLLYEYFTVYNELTKVKYVTEGMRKPAFLSGEQKKAIVDLLFKTNRKVTVKQLKEDYFKKIECFDSVEISGVEDRFNASLGTYHDLLKIIKDKDFLDNEENEDILEDIVLTLTLFEDREMIEERLKTYAHLFDDKVMKQLKRRRYTGWGRLSRKLINGIRDKQSGKTILDFLKSDGFANRNFMQLIHDDSLTFKEDIQKAQVSGQGDSLHEHIANLAGSPAIKKGILQTVKVVDELVKVMGRHKPENIVIEMARENQTTQKGQKNSRERMKRIEEGIKELGSQILKEHPVENTQLQNEKLYLYYLQNGRDMYVDQELDINRLSDYDVDHIVPQSFLKDDSIDNKVLTRSDKARGKSDNVPSEEVVKKMKNYWRQLLNAKLITQRKFDNLTKAERGGLSELDKAGFIKRQLVETRQITKHVAQILDSRMNTKYDENDKLIREVKVITLKSKLVSDFRKDFQFYKVREINNYHHAHDAYLNAVVGTALIKKYPKLESEFVYGDYKVYDVRKMIAKSEQEIGKATAKYFFYSNIMNFFKTEITLANGEIRKRPLIETNGETGEIVWDKGRDFATVRKVLSMPQVNIVKKTEVQTGGFSKESILPKRNSDKLIARKKDWDPKKYGGFDSPTVAYSVLVVAKVEKGKSKKLKSVKELLGITIMERSSFEKNPIDFLEAKGYKEVKKDLIIKLPKYSLFELENGRKRMLASAGELQKGNELALPSKYVNFLYLASHYEKLKGSPEDNEQKQLFVEQHKHYLDEIIEQISEFSKRVILADANLDKVLSAYNKHRDKPIREQAENIIHLFTLTNLGAPAAFKYFDTTIDRKRYTSTKEVLDATLIHQSITGLYETRIDLSQLGGDGGGGSGGGGSSGGTAPLEEEYRLFLEAPIQNVTLLEQWKREIPKVWAEINPPGLASTQAPIHVQLLSTALPVRVRQYPITLEAKRSLRETIRKFRAAGILRPVHSPWNTPLLPVRKSGTSEYRMVQDLREVNKRVETIHPTVPNPYTLLSLLPPDRIWYSVLDLKDAFFCIPLAPESQLIFAFEWADAEEGESGQLTWTRLPQGFKNSPTLFNEALNRDLQGFRLDHPSVSLLQYVDDLLIAADTQAACLSATRDLLMTLAELGYRVSGKKAQLCQEEVTYLGFKIHKGSRSLSNSRTQAILQIPVPKTKRQVREFLGKIGYCRLFIPGFAELAQPLYAATRPGNDPLVWGEKEEEAFQSLKLALTQPPALALPSLDKPFQLFVEETSGAAKGVLTQALGPWKRPVAYLSKRLDPVAAGWPRCLRAIAAAALLTREASKLTFGQDIEITSSHNLESLLRSPPDKWLTNARITQYQVLLLDPPRVRFKQTAALNPATLLPETDDTLPIHHCLDTLDSLTSTRPDLTDQPLAQAEATLFTDGSSYIRDGKRYAGAAVVTLDSVIWAEPLPIGTSAQKAELIALTKALEWSKDKSVNIYTDSRYAFATLHVHGMIYRERGWLTAGGKAIKNAPEILALLTAVWLPKRVAVMHCKGHQKDDAPTSTGNRRADEVAREVAIRPLSTQATISAGKRTADGSEFEKRTADGSEFESPKKKAKVE

SEQ ID NO: 6799 - protein, 2100 aa, synthetic construct
MPAAKRVKLDGGDKKYSIGLDIGTNSVGWAVITDEYKVPSKKFKVLGNTDRHSIKKNLIGALLFDSGETAEATRLKRTARRRYTRRKNRICYLQEIFSNEMAKVDDSFFHRLEESFLVEEDKKHERHPIFGNIVDEVAYHEKYPTIYHLRKKLVDSTDKADLRLIYLALAHMIKFRGHFLIEGDLNPDNSDVDKLFIQLVQTYNQLFEENPINASGVDAKAILSARLSKSRRLENLIAQLPGEKKNGLFGNLIALSLGLTPNFKSNFDLAEDAKLQLSKDTYDDDLDNLLAQIGDQYADLFLAAKNLSDAILLSDILRVNTEITKAPLSASMIKRYDEHHQDLTLLKALVRQQLPEKYKEIFFDQSKNGYAGYIDGGASQEEFYKFIKPILEKMDGTEELLVKLNREDLLRKQRTFDNGSIPHQIHLGELHAILRRQEDFYPFLKDNREKIEKILTFRIPYYVGPLARGNSRFAWMTRKSEETITPWNFEEVVDKGASAQSFIERMTNFDKNLPNEKVLPKHSLLYEYFTVYNELTKVKYVTEGMRKPAFLSGEQKKAIVDLLFKTNRKVTVKQLKEDYFKKIECFDSVEISGVEDRFNASLGTYHDLLKIIKDKDFLDNEENEDILEDIVLTLTLFEDREMIEERLKTYAHLFDDKVMKQLKRRRYTGWGRLSRKLINGIRDKQSGKTILDFLKSDGFANRNFMQLIHDDSLTFKEDIQKAQVSGQGDSLHEHIANLAGSPAIKKGILQTVKVVDELVKVMGRHKPENIVIEMARENQTTQKGQKNSRERMKRIEEGIKELGSQILKEHPVENTQLQNEKLYLYYLQNGRDMYVDQELDINRLSDYDVDHIVPQSFLKDDSIDNKVLTRSDKARGKSDNVPSEEVVKKMKNYWRQLLNAKLITQRKFDNLTKAERGGLSELDKAGFIKRQLVETRQITKHVAQILDSRMNTKYDENDKLIREVKVITLKSKLVSDFRKDFQFYKVREINNYHHAHDAYLNAVVGTALIKKYPKLESEFVYGDYKVYDVRKMIAKSEQEIGKATAKYFFYSNIMNFFKTEITLANGEIRKRPLIETNGETGEIVWDKGRDFATVRKVLSMPQVNIVKKTEVQTGGFSKESILPKRNSDKLIARKKDWDPKKYGGFDSPTVAYSVLVVAKVEKGKSKKLKSVKELLGITIMERSSFEKNPIDFLEAKGYKEVKKDLIIKLPKYSLFELENGRKRMLASAGELQKGNELALPSKYVNFLYLASHYEKLKGSPEDNEQKQLFVEQHKHYLDEIIEQISEFSKRVILADANLDKVLSAYNKHRDKPIREQAENIIHLFTLTNLGAPAAFKYFDTTIDRKRYTSTKEVLDATLIHQSITGLYETRIDLSQLGGDGGGGSGGGGSSGGTVSLQDEHRLFDIPVTTSLPDVWLQDFPQAWAETGGLGRAKCQAPIIIDLKPTAVPVSIKQYPMSLEAHMGIRQHIIKFLELGVLRPCRSPWNTPLLPVKKPGTQDYRPVQDLREINKRTVDIHPTVPNPYNLLSTLKPDYSWYTVLDLKDAFFCLPLAPQSQELFAFEWKDPERGISGQLTWTRLPQGFKNSPTLFDEALHRDLTDFRTQHPEVTLLQYVDDLLLAAPTKKACTQGTRHLLQELGEKGYRASAKKAQICQTKVTYLGYILSEGKRWLTPGRIETVARIPPPRNPREVREFLGTAGFCRLWIPGFAELAAPLYALTKESTPFTWQTEHQLAFEALKKALLSAPALGLPDTSKPFTLFLDERQGIAKGVLTQKLGPWKRPVAYLSKKLDPVAAGWPPCLRIMAATAMLVKDSAKLTLGQPLTVITPHTLEAIVRQPPDRWITNARLTHYQALLLDTDRVQFGPPVTLNPATLLPVPENQPSPHDCRQVLAETHGTREDLKDQELPDADHTWYTDGSSYLDSGTRRAGAAVVDGHNTIWAQSLPPGTSAQKAELIALTKALELSKGKKANIYTDSRYAFATAHTHGSIYERRGLLTSEGKEIKNKAEIIALLKALFLPQEVAIIHCPGHQKGQDPVAVGNRQADRVARQAAMAEVLTLATEPDNTSHITAGKRTADGSEFEKRTADGSEFESPKKKAKVE

SEQ ID NO: 6800 - protein, 1999 aa, synthetic construct
MPAAKRVKLDGGDKKYSIGLDIGTNSVGWAVITDEYKVPSKKFKVLGNTDRHSIKKNLIGALLFDSGETAEATRLKRTARRRYTRRKNRICYLQEIFSNEMAKVDDSFFHRLEESFLVEEDKKHERHPIFGNIVDEVAYHEKYPTIYHLRKKLVDSTDKADLRLIYLALAHMIKFRGHFLIEGDLNPDNSDVDKLFIQLVQTYNQLFEENPINASGVDAKAILSARLSKSRRLENLIAQLPGEKKNGLFGNLIALSLGLTPNFKSNFDLAEDAKLQLSKDTYDDDLDNLLAQIGDQYADLFLAAKNLSDAILLSDILRVNTEITKAPLSASMIKRYDEHHQDLTLLKALVRQQLPEKYKEIFFDQSKNGYAGYIDGGASQEEFYKFIKPILEKMDGTEELLVKLNREDLLRKQRTFDNGSIPHQIHLGELHAILRRQEDFYPFLKDNREKIEKILTFRIPYYVGPLARGNSRFAWMTRKSEETITPWNFEEVVDKGASAQSFIERMTNFDKNLPNEKVLPKHSLLYEYFTVYNELTKVKYVTEGMRKPAFLSGEQKKAIVDLLFKTNRKVTVKQLKEDYFKKIECFDSVEISGVEDRFNASLGTYHDLLKIIKDKDFLDNEENEDILEDIVLTLTLFEDREMIEERLKTYAHLFDDKVMKQLKRRRYTGWGRLSRKLINGIRDKQSGKTILDFLKSDGFANRNFMQLIHDDSLTFKEDIQKAQVSGQGDSLHEHIANLAGSPAIKKGILQTVKVVDELVKVMGRHKPENIVIEMARENQTTQKGQKNSRERMKRIEEGIKELGSQILKEHPVENTQLQNEKLYLYYLQNGRDMYVDQELDINRLSDYDVDHIVPQSFLKDDSIDNKVLTRSDKARGKSDNVPSEEVVKKMKNYWRQLLNAKLITQRKFDNLTKAERGGLSELDKAGFIKRQLVETRQITKHVAQILDSRMNTKYDENDKLIREVKVITLKSKLVSDFRKDFQFYKVREINNYHHAHDAYLNAVVGTALIKKYPKLESEFVYGDYKVYDVRKMIAKSEQEIGKATAKYFFYSNIMNFFKTEITLANGEIRKRPLIETNGETGEIVWDKGRDFATVRKVLSMPQVNIVKKTEVQTGGFSKESILPKRNSDKLIARKKDWDPKKYGGFDSPTVAYSVLVVAKVEKGKSKKLKSVKELLGITIMERSSFEKNPIDFLEAKGYKEVKKDLIIKLPKYSLFELENGRKRMLASAGELQKGNELALPSKYVNFLYLASHYEKLKGSPEDNEQKQLFVEQHKHYLDEIIEQISEFSKRVILADANLDKVLSAYNKHRDKPIREQAENIIHLFTLTNLGAPAAFKYFDTTIDRKRYTSTKEVLDATLIHQSITGLYETRIDLSQLGGDGGGGSGGGGSSGGGVLDTPPSHIGLEHLPPPPEVPQFPLNLERLQALQDLVHRSLEAGYISPWDGPGNNPVFPVRKPNGAWRFVHDLRATNALTKPIPALSPGPPDLTAPPTHPPHIICLDLKDAFFQIPVEDRFRFYLSFTLPSPGGLQPHRRFAWRVLPQGFINSPALFQRALQEPLRQVSAAFSQSLLVSYMDDILYASPTEEQRSQCYQALAARLRDLGFQVASEKTSQTPSPVPFLGQMVHEQIVTYQSLPTLQISSPISLHQLQAVLGDLQWVSRGTPTTRRPLQLLYSSLKRHHDPRAIIQLSPEQLQGIAELRQALSHNARSRYNEQEPLLAYVHLTRAGSTLVLFQKGAQFPLAYFQTPLTDNQASPWGLLLLLGCQYLQTQALSSYAKPILKYYHNLPKTSLDNWIQSSEDPRVQELLQLWPQISSQGIQPPGPWKTLITRAEVFLTPQFSPDPIPAALCLFSDGATGRGAYCLWKDHLLDFQAVPAPESAQKGELAGLLAGLAAAPPEPVNIWVDSKYLYSLLRTWVLGAWLQPDPVPSYALLYKSLLRHPAIVVGHVRSHSSASHPIASLNNYVDQLAGKRTADGSEFEKRTADGSEFESPKKKAKVE

SEQ ID NO: 6801 - protein, 2085 aa, synthetic construct
MPAAKRVKLDGGDKKYSIGLDIGTNSVGWAVITDEYKVPSKKFKVLGNTDRHSIKKNLIGALLFDSGETAEATRLKRTARRRYTRRKNRICYLQEIFSNEMAKVDDSFFHRLEESFLVEEDKKHERHPIFGNIVDEVAYHEKYPTIYHLRKKLVDSTDKADLRLIYLALAHMIKFRGHFLIEGDLNPDNSDVDKLFIQLVQTYNQLFEENPINASGVDAKAILSARLSKSRRLENLIAQLPGEKKNGLFGNLIALSLGLTPNFKSNFDLAEDAKLQLSKDTYDDDLDNLLAQIGDQYADLFLAAKNLSDAILLSDILRVNTEITKAPLSASMIKRYDEHHQDLTLLKALVRQQLPEKYKEIFFDQSKNGYAGYIDGGASQEEFYKFIKPILEKMDGTEELLVKLNREDLLRKQRTFDNGSIPHQIHLGELHAILRRQEDFYPFLKDNREKIEKILTFRIPYYVGPLARGNSRFAWMTRKSEETITPWNFEEVVDKGASAQSFIERMTNFDKNLPNEKVLPKHSLLYEYFTVYNELTKVKYVTEGMRKPAFLSGEQKKAIVDLLFKTNRKVTVKQLKEDYFKKIECFDSVEISGVEDRFNASLGTYHDLLKIIKDKDFLDNEENEDILEDIVLTLTLFEDREMIEERLKTYAHLFDDKVMKQLKRRRYTGWGRLSRKLINGIRDKQSGKTILDFLKSDGFANRNFMQLIHDDSLTFKEDIQKAQVSGQGDSLHEHIANLAGSPAIKKGILQTVKVVDELVKVMGRHKPENIVIEMARENQTTQKGQKNSRERMKRIEEGIKELGSQILKEHPVENTQLQNEKLYLYYLQNGRDMYVDQELDINRLSDYDVDHIVPQSFLKDDSIDNKVLTRSDKARGKSDNVPSEEVVKKMKNYWRQLLNAKLITQRKFDNLTKAERGGLSELDKAGFIKRQLVETRQITKHVAQILDSRMNTKYDENDKLIREVKVITLKSKLVSDFRKDFQFYKVREINNYHHAHDAYLNAVVGTALIKKYPKLESEFVYGDYKVYDVRKMIAKSEQEIGKATAKYFFYSNIMNFFKTEITLANGEIRKRPLIETNGETGEIVWDKGRDFATVRKVLSMPQVNIVKKTEVQTGGFSKESILPKRNSDKLIARKKDWDPKKYGGFDSPTVAYSVLVVAKVEKGKSKKLKSVKELLGITIMERSSFEKNPIDFLEAKGYKEVKKDLIIKLPKYSLFELENGRKRMLASAGELQKGNELALPSKYVNFLYLASHYEKLKGSPEDNEQKQLFVEQHKHYLDEIIEQISEFSKRVILADANLDKVLSAYNKHRDKPIREQAENIIHLFTLTNLGAPAAFKYFDTTIDRKRYTSTKEVLDATLIHQSITGLYETRIDLSQLGGDGGGGSGGGGSSGGVPWILKKPLELTIKLDLEEQQGTLLNNSILSKKGKEELKQLFEKYSALWQSWENQVGHRRIRPHKIATGTVKPTPQKQYHINPKAKPDIQIVINDLLKQGVLIQKESTMNTPVYPVPKPNGRWRMVLDYRAVNKVTPLIAVQNQHSYGILGSLFKGRYKTTIDLSNGFWAHPIVPEDYWITAFTWQGKQYCWTVLPQGFLNSPGLFTGDVVDLLQGIPNVEVYVDDVYISHDSEKEHLEYLDILFNRLKEAGYIISLKKSNIANSIVDFLGFQITNEGRGLTDTFKEKLENITAPTTLKQLQSILGLLNFARNFIPDFTELIAPLYALIPKSTKNYVPWQIEHSTTLETLITKLNGAEYLQGRKGDKTLIMKVNASYTTGYIRYYNEGEKKPISYVSIVFSKTELKFTELEKLLTTVHKGLLKALDLSMGQNIHVYSPIVSMQNIQKTPQTAKKALASRWLSWLSYLEDPRIRFFYDPQMPALKDLPAVDTGKDNKKHPSNFQHIFYTDGSAITSPTKEGHLNAGMGIVYFINKDGNLQKQQEWSISLGNHTAQFAEIAAFEFALKKCLPLGGNILVVTDSNYVAKAYNEELDVWASNGFVNNRKKPLKHISKWKSVADLKRLRPDVVVTHEPGHQKLDSSPHAYGNNLADQLATQASFKVHAGKRTADGSEFEKRTADGSEFESPKKKAKVE

SEQ ID NO: 6802 - protein, 2093 aa, synthetic construct
MPAAKRVKLDGGDKKYSIGLDIGTNSVGWAVITDEYKVPSKKFKVLGNTDRHSIKKNLIGALLFDSGETAEATRLKRTARRRYTRRKNRICYLQEIFSNEMAKVDDSFFHRLEESFLVEEDKKHERHPIFGNIVDEVAYHEKYPTIYHLRKKLVDSTDKADLRLIYLALAHMIKFRGHFLIEGDLNPDNSDVDKLFIQLVQTYNQLFEENPINASGVDAKAILSARLSKSRRLENLIAQLPGEKKNGLFGNLIALSLGLTPNFKSNFDLAEDAKLQLSKDTYDDDLDNLLAQIGDQYADLFLAAKNLSDAILLSDILRVNTEITKAPLSASMIKRYDEHHQDLTLLKALVRQQLPEKYKEIFFDQSKNGYAGYIDGGASQEEFYKFIKPILEKMDGTEELLVKLNREDLLRKQRTFDNGSIPHQIHLGELHAILRRQEDFYPFLKDNREKIEKILTFRIPYYVGPLARGNSRFAWMTRKSEETITPWNFEEVVDKGASAQSFIERMTNFDKNLPNEKVLPKHSLLYEYFTVYNELTKVKYVTEGMRKPAFLSGEQKKAIVDLLFKTNRKVTVKQLKEDYFKKIECFDSVEISGVEDRFNASLGTYHDLLKIIKDKDFLDNEENEDILEDIVLTLTLFEDREMIEERLKTYAHLFDDKVMKQLKRRRYTGWGRLSRKLINGIRDKQSGKTILDFLKSDGFANRNFMQLIHDDSLTFKEDIQKAQVSGQGDSLHEHIANLAGSPAIKKGILQTVKVVDELVKVMGRHKPENIVIEMARENQTTQKGQKNSRERMKRIEEGIKELGSQILKEHPVENTQLQNEKLYLYYLQNGRDMYVDQELDINRLSDYDVDHIVPQSFLKDDSIDNKVLTRSDKARGKSDNVPSEEVVKKMKNYWRQLLNAKLITQRKFDNLTKAERGGLSELDKAGFIKRQLVETRQITKHVAQILDSRMNTKYDENDKLIREVKVITLKSKLVSDFRKDFQFYKVREINNYHHAHDAYLNAVVGTALIKKYPKLESEFVYGDYKVYDVRKMIAKSEQEIGKATAKYFFYSNIMNFFKTEITLANGEIRKRPLIETNGETGEIVWDKGRDFATVRKVLSMPQVNIVKKTEVQTGGFSKESILPKRNSDKLIARKKDWDPKKYGGFDSPTVAYSVLVVAKVEKGKSKKLKSVKELLGITIMERSSFEKNPIDFLEAKGYKEVKKDLIIKLPKYSLFELENGRKRMLASAGELQKGNELALPSKYVNFLYLASHYEKLKGSPEDNEQKQLFVEQHKHYLDEIIEQISEFSKRVILADANLDKVLSAYNKHRDKPIREQAENIIHLFTLTNLGAPAAFKYFDTTIDRKRYTSTKEVLDATLIHQSITGLYETRIDLSQLGGDGGGGSGGGGSSGGTLQLEEEYRLFEPESTQKQEMDIWLKNFPQAWAETGGMGTAHCQAPVLIQLKATATPISIRQYPMPHEAYQGIKPHIRRMLDQGILKPCQSPWNTPLLPVKKPGTEDYRPVQDLREVNKRVEDIHPTVPNPYNLLSTLPPSHPWYTVLDLKDAFFCLRLHSESQLLFAFEWRDPEIGLSGQLTWTRLPQGFKNSPTLFNEALHSDLADFRVRYPALVLLQYVDDLLLAAATRTECLEGTKALLETLGNKGYRASAKKAQICLQEVTYLGYSLKDGQRWLTKARKEAILSIPVPKNSRQVREFLGTAGYCRLWIPGFAELAAPLYPLTRPGTLFQWGTEQQLAFEDIKKALLSSPALGLPDITKPFELFIDENSGFAKGVLVQKLGPWKRPVAYLSKKLDTVASGWPPCLRMVAAIAILVKDAGKLTLGQPLTILTSHPVEALVRQPPNKWLSNARMTHYQAMLLDAERVHFGPTVSLNPATLLPLPSGGNHHDCLQILAETHGTRPDLTDQPLPDADLTWYTDGSSFIRNGEREAGAAVTTESEVIWAAPLPPGTSAQRAELIALTQALKMAEGKKLTVYTDSRYAFATTHVHGEIYRRRGWLTSEGKEIKNKNEILALLEALFLPKRLSIIHCPGHQKGDSPQAKGNRLADDTAKKAATETHSSLTVLPAGKRTADGSEFEKRTADGSEFESPKKKAKVE

SEQ ID NO: 6803 - protein, 2125 aa, synthetic construct
MPAAKRVKLDGGDKKYSIGLDIGTNSVGWAVITDEYKVPSKKFKVLGNTDRHSIKKNLIGALLFDSGETAEATRLKRTARRRYTRRKNRICYLQEIFSNEMAKVDDSFFHRLEESFLVEEDKKHERHPIFGNIVDEVAYHEKYPTIYHLRKKLVDSTDKADLRLIYLALAHMIKFRGHFLIEGDLNPDNSDVDKLFIQLVQTYNQLFEENPINASGVDAKAILSARLSKSRRLENLIAQLPGEKKNGLFGNLIALSLGLTPNFKSNFDLAEDAKLQLSKDTYDDDLDNLLAQIGDQYADLFLAAKNLSDAILLSDILRVNTEITKAPLSASMIKRYDEHHQDLTLLKALVRQQLPEKYKEIFFDQSKNGYAGYIDGGASQEEFYKFIKPILEKMDGTEELLVKLNREDLLRKQRTFDNGSIPHQIHLGELHAILRRQEDFYPFLKDNREKIEKILTFRIPYYVGPLARGNSRFAWMTRKSEETITPWNFEEVVDKGASAQSFIERMTNFDKNLPNEKVLPKHSLLYEYFTVYNELTKVKYVTEGMRKPAFLSGEQKKAIVDLLFKTNRKVTVKQLKEDYFKKIECFDSVEISGVEDRFNASLGTYHDLLKIIKDKDFLDNEENEDILEDIVLTLTLFEDREMIEERLKTYAHLFDDKVMKQLKRRRYTGWGRLSRKLINGIRDKQSGKTILDFLKSDGFANRNFMQLIHDDSLTFKEDIQKAQVSGQGDSLHEHIANLAGSPAIKKGILQTVKVVDELVKVMGRHKPENIVIEMARENQTTQKGQKNSRERMKRIEEGIKELGSQILKEHPVENTQLQNEKLYLYYLQNGRDMYVDQELDINRLSDYDVDHIVPQSFLKDDSIDNKVLTRSDKARGKSDNVPSEEVVKKMKNYWRQLLNAKLITQRKFDNLTKAERGGLSELDKAGFIKRQLVETRQITKHVAQILDSRMNTKYDENDKLIREVKVITLKSKLVSDFRKDFQFYKVREINNYHHAHDAYLNAVVGTALIKKYPKLESEFVYGDYKVYDVRKMIAKSEQEIGKATAKYFFYSNIMNFFKTEITLANGEIRKRPLIETNGETGEIVWDKGRDFATVRKVLSMPQVNIVKKTEVQTGGFSKESILPKRNSDKLIARKKDWDPKKYGGFDSPTVAYSVLVVAKVEKGKSKKLKSVKELLGITIMERSSFEKNPIDFLEAKGYKEVKKDLIIKLPKYSLFELENGRKRMLASAGELQKGNELALPSKYVNFLYLASHYEKLKGSPEDNEQKQLFVEQHKHYLDEIIEQISEFSKRVILADANLDKVLSAYNKHRDKPIREQAENIIHLFTLTNLGAPAAFKYFDTTIDRKRYTSTKEVLDATLIHQSITGLYETRIDLSQLGGDGGGGSGGGGSSGGLLGRDLLTKLKAQIQFSTEGPQVTWEDRPAMCLVLNLEEEYRLHEKPVPPSIDPSWLQLFPMVWAEKAGMGLANQVPPVVVELKSDASPVAVRQYPMSKEAREGIRPHIQRFLDLGILVPCQSPWNTPLLPVKKPGTNDYRPVQDLREVNKRVQDIHPTVPNPYNLLSSLPPSHTWYSVLDLKDAFFCLKLHPNSQPLFAFEWRDPEKGNTGQLTWTRLPQGFKNSPTLFNEALHRDLASFRALNPQVVMLQYVDDLLVAAPTYRDCKEGTRRLLQELSKLGYRVSAKKAQLCREEVTYLGYLLKGGKRWLTPARKATVMKIPTPTTPRQVREFLGTAGFCRLWIPGFASLAAPLYPLTRPKVPFTWTEAHQEAFGRIKEALLSAPALALPDLTKPFALYVDEKEGVARGVLTQTLGPWRRPVAYLSKKLDPVASGWPTCLKAIAAVALLLKDADKLTLGQNVLVIAPHNLESIVRQPPDRWMTNARMTHYQSLLLNERVSFAPPAILNPATLLPVESDDTPIHICSEILAEETGTRPDLRDQPLPGVPAWYTDGSSFIMDGRRQAGAAIVDNKRTVWASNLPEGTSAQKAELIALTQALRLAEGKSINIYTDSRYAFATAHVHGAIYKQRGWLTSAGKDIKNKEEILALLEAIHLPKRVAIIHCPGHQRGTDPVATGNRKADEAAKQAAQSTRILTETTKNAGKRTADGSEFEKRTADGSEFESPKKKAKVE

SEQ ID NO: 6804 - protein, 2125 aa, synthetic construct
MPAAKRVKLDGGDKKYSIGLDIGTNSVGWAVITDEYKVPSKKFKVLGNTDRHSIKKNLIGALLFDSGETAEATRLKRTARRRYTRRKNRICYLQEIFSNEMAKVDDSFFHRLEESFLVEEDKKHERHPIFGNIVDEVAYHEKYPTIYHLRKKLVDSTDKADLRLIYLALAHMIKFRGHFLIEGDLNPDNSDVDKLFIQLVQTYNQLFEENPINASGVDAKAILSARLSKSRRLENLIAQLPGEKKNGLFGNLIALSLGLTPNFKSNFDLAEDAKLQLSKDTYDDDLDNLLAQIGDQYADLFLAAKNLSDAILLSDILRVNTEITKAPLSASMIKRYDEHHQDLTLLKALVRQQLPEKYKEIFFDQSKNGYAGYIDGGASQEEFYKFIKPILEKMDGTEELLVKLNREDLLRKQRTFDNGSIPHQIHLGELHAILRRQEDFYPFLKDNREKIEKILTFRIPYYVGPLARGNSRFAWMTRKSEETITPWNFEEVVDKGASAQSFIERMTNFDKNLPNEKVLPKHSLLYEYFTVYNELTKVKYVTEGMRKPAFLSGEQKKAIVDLLFKTNRKVTVKQLKEDYFKKIECFDSVEISGVEDRFNASLGTYHDLLKIIKDKDFLDNEENEDILEDIVLTLTLFEDREMIEERLKTYAHLFDDKVMKQLKRRRYTGWGRLSRKLINGIRDKQSGKTILDFLKSDGFANRNFMQLIHDDSLTFKEDIQKAQVSGQGDSLHEHIANLAGSPAIKKGILQTVKVVDELVKVMGRHKPENIVIEMARENQTTQKGQKNSRERMKRIEEGIKELGSQILKEHPVENTQLQNEKLYLYYLQNGRDMYVDQELDINRLSDYDVDHIVPQSFLKDDSIDNKVLTRSDKARGKSDNVPSEEVVKKMKNYWRQLLNAKLITQRKFDNLTKAERGGLSELDKAGFIKRQLVETRQITKHVAQILDSRMNTKYDENDKLIREVKVITLKSKLVSDFRKDFQFYKVREINNYHHAHDAYLNAVVGTALIKKYPKLESEFVYGDYKVYDVRKMIAKSEQEIGKATAKYFFYSNIMNFFKTEITLANGEIRKRPLIETNGETGEIVWDKGRDFATVRKVLSMPQVNIVKKTEVQTGGFSKESILPKRNSDKLIARKKDWDPKKYGGFDSPTVAYSVLVVAKVEKGKSKKLKSVKELLGITIMERSSFEKNPIDFLEAKGYKEVKKDLIIKLPKYSLFELENGRKRMLASAGELQKGNELALPSKYVNFLYLASHYEKLKGSPEDNEQKQLFVEQHKHYLDEIIEQISEFSKRVILADANLDKVLSAYNKHRDKPIREQAENIIHLFTLTNLGAPAAFKYFDTTIDRKRYTSTKEVLDATLIHQSITGLYETRIDLSQLGGDGGGGSGGGGSSGGLLGRDLLTKLKAQIQFSTEGPQVTWEDRPAMCLVLNLEEEYRLHEKPVPPSIDPSWLQLFPMVWAEKAGMGLANQVPPVVVELKSDASPVAVRQYPMSKEAREGIRPHIQRFLDLGILVPCQSPWNTPLLPVKKPGTNDYRPVQDLREVNKRVQDIHPTVPNPYNLLSSLPPSHTWYSVLDLKDAFFCLKLHPNSQPLFAFEWRDPEKGNTGQLTWTRLPQGFKNSPTLFNEALHRDLASFRALNPQVVMLQYVDDLLVAAPTYRDCKEGTRRLLQELSKLGYRVSAKKAQLCREEVTYLGYLLKGGKRWLTPARKATVMKIPTPTTPRQVREFLGKAGFCRLFIPGFASLAAPLYPLTRPKVPFTWTEAHQEAFGRIKEALLSAPALALPDLTKPFALYVDEKEGVARGVLTQTLGPWRRPVAYLSKKLDPVASGWPTCLKAIAAVALLLKDADKLTLGQNVLVIAPHNLESIVRQPPDRWMTNARMTHYQSLLLNERVSFAPPAILNPATLLPVESDDTPIHICSEILAEETGTRPDLRDQPLPGVPAWYTDGSSFIMDGRRQAGAAIVDNKRTVWASNLPEGTSAQKAELIALTQALRLAEGKSINIYTDSRYAFATAHVHGAIYKQRGWLTSAGKDIKNKEEILALLEAIHLPKRVAIIHCPGHQRGTDPVATGNRKADEAAKQAAQSTRILTETTKNAGKRTADGSEFEKRTADGSEFESPKKKAKVE

SEQ ID NO: 6805 - protein, 2094 aa, synthetic construct
MPAAKRVKLDGGDKKYSIGLDIGTNSVGWAVITDEYKVPSKKFKVLGNTDRHSIKKNLIGALLFDSGETAEATRLKRTARRRYTRRKNRICYLQEIFSNEMAKVDDSFFHRLEESFLVEEDKKHERHPIFGNIVDEVAYHEKYPTIYHLRKKLVDSTDKADLRLIYLALAHMIKFRGHFLIEGDLNPDNSDVDKLFIQLVQTYNQLFEENPINASGVDAKAILSARLSKSRRLENLIAQLPGEKKNGLFGNLIALSLGLTPNFKSNFDLAEDAKLQLSKDTYDDDLDNLLAQIGDQYADLFLAAKNLSDAILLSDILRVNTEITKAPLSASMIKRYDEHHQDLTLLKALVRQQLPEKYKEIFFDQSKNGYAGYIDGGASQEEFYKFIKPILEKMDGTEELLVKLNREDLLRKQRTFDNGSIPHQIHLGELHAILRRQEDFYPFLKDNREKIEKILTFRIPYYVGPLARGNSRFAWMTRKSEETITPWNFEEVVDKGASAQSFIERMTNFDKNLPNEKVLPKHSLLYEYFTVYNELTKVKYVTEGMRKPAFLSGEQKKAIVDLLFKTNRKVTVKQLKEDYFKKIECFDSVEISGVEDRFNASLGTYHDLLKIIKDKDFLDNEENEDILEDIVLTLTLFEDREMIEERLKTYAHLFDDKVMKQLKRRRYTGWGRLSRKLINGIRDKQSGKTILDFLKSDGFANRNFMQLIHDDSLTFKEDIQKAQVSGQGDSLHEHIANLAGSPAIKKGILQTVKVVDELVKVMGRHKPENIVIEMARENQTTQKGQKNSRERMKRIEEGIKELGSQILKEHPVENTQLQNEKLYLYYLQNGRDMYVDQELDINRLSDYDVDHIVPQSFLKDDSIDNKVLTRSDKARGKSDNVPSEEVVKKMKNYWRQLLNAKLITQRKFDNLTKAERGGLSELDKAGFIKRQLVETRQITKHVAQILDSRMNTKYDENDKLIREVKVITLKSKLVSDFRKDFQFYKVREINNYHHAHDAYLNAVVGTALIKKYPKLESEFVYGDYKVYDVRKMIAKSEQEIGKATAKYFFYSNIMNFFKTEITLANGEIRKRPLIETNGETGEIVWDKGRDFATVRKVLSMPQVNIVKKTEVQTGGFSKESILPKRNSDKLIARKKDWDPKKYGGFDSPTVAYSVLVVAKVEKGKSKKLKSVKELLGITIMERSSFEKNPIDFLEAKGYKEVKKDLIIKLPKYSLFELENGRKRMLASAGELQKGNELALPSKYVNFLYLASHYEKLKGSPEDNEQKQLFVEQHKHYLDEIIEQISEFSKRVILADANLDKVLSAYNKHRDKPIREQAENIIHLFTLTNLGAPAAFKYFDTTIDRKRYTSTKEVLDATLIHQSITGLYETRIDLSQLGGDGGGGSGGGGSSGGTLNLEDEYRLYETSAEPEVSPGSTWLSDFPQAWAETGGMGLAVRQAPLIIPLKATSTPVSIKQYPMSQEAKLGIKPHIQRLLDQGILVPCQSPWNTPLLPVKKPGTNDYRPVQDLREVNKRVEDIHPTVPNPYNLLSGLPPSHRWYTVLDLKDAFFCLRLHPTSQPLFAFEWRDPGMGISGQLTWTRLPQGFKNSPTLFNEALHRDLADFRIQHPDLILLQYVDDILLAATSELDCQQGTRALLLTLGNLGYRASAKKAQLCQKQVKYLGYLLKEGQRWLTEARKETVMGQPTPKTPRQLREFLGKAGFCRLFIPGFAEMAAPLYPLTKPGTLFNWGPDQQKAYQEIKQALLTAPALGLPDLTKPFELFVDEKQGYAKGVLTQKLGPWRRPVAYLSKKLDPVAAGWPPCLRMVAAIAVLRKDAGKLTMGQPLVILAPHAVEALVKQPPDRWLSNARMTHYQAMLLDTDRVQFGPVVALNPATLLPLPEEGAPHDCLEILAETHGTRPDLTDQPIPDADHTWYTDGSSFLQEGQRKAGAAVTTETEVIWARALPAGTSAQRAELIALTQALKMAEGKRLNVYTDSRYAFATAHIHGEIYRRRGWLTSEGREIKNKSEILALLKALFLPKRLSIIHCLGHQKGDSAEARGNRLADQAAREAAIKTPPDTSTLLAGKRTADGSEFEKRTADGSEFESPKKKAKVE

SEQ ID NO: 6806 - protein, 2094 aa, synthetic construct
MPAAKRVKLDGGDKKYSIGLDIGTNSVGWAVITDEYKVPSKKFKVLGNTDRHSIKKNLIGALLFDSGETAEATRLKRTARRRYTRRKNRICYLQEIFSNEMAKVDDSFFHRLEESFLVEEDKKHERHPIFGNIVDEVAYHEKYPTIYHLRKKLVDSTDKADLRLIYLALAHMIKFRGHFLIEGDLNPDNSDVDKLFIQLVQTYNQLFEENPINASGVDAKAILSARLSKSRRLENLIAQLPGEKKNGLFGNLIALSLGLTPNFKSNFDLAEDAKLQLSKDTYDDDLDNLLAQIGDQYADLFLAAKNLSDAILLSDILRVNTEITKAPLSASMIKRYDEHHQDLTLLKALVRQQLPEKYKEIFFDQSKNGYAGYIDGGASQEEFYKFIKPILEKMDGTEELLVKLNREDLLRKQRTFDNGSIPHQIHLGELHAILRRQEDFYPFLKDNREKIEKILTFRIPYYVGPLARGNSRFAWMTRKSEETITPWNFEEVVDKGASAQSFIERMTNFDKNLPNEKVLPKHSLLYEYFTVYNELTKVKYVTEGMRKPAFLSGEQKKAIVDLLFKTNRKVTVKQLKEDYFKKIECFDSVEISGVEDRFNASLGTYHDLLKIIKDKDFLDNEENEDILEDIVLTLTLFEDREMIEERLKTYAHLFDDKVMKQLKRRRYTGWGRLSRKLINGIRDKQSGKTILDFLKSDGFANRNFMQLIHDDSLTFKEDIQKAQVSGQGDSLHEHIANLAGSPAIKKGILQTVKVVDELVKVMGRHKPENIVIEMARENQTTQKGQKNSRERMKRIEEGIKELGSQILKEHPVENTQLQNEKLYLYYLQNGRDMYVDQELDINRLSDYDVDHIVPQSFLKDDSIDNKVLTRSDKARGKSDNVPSEEVVKKMKNYWRQLLNAKLITQRKFDNLTKAERGGLSELDKAGFIKRQLVETRQITKHVAQILDSRMNTKYDENDKLIREVKVITLKSKLVSDFRKDFQFYKVREINNYHHAHDAYLNAVVGTALIKKYPKLESEFVYGDYKVYDVRKMIAKSEQEIGKATAKYFFYSNIMNFFKTEITLANGEIRKRPLIETNGETGEIVWDKGRDFATVRKVLSMPQVNIVKKTEVQTGGFSKESILPKRNSDKLIARKKDWDPKKYGGFDSPTVAYSVLVVAKVEKGKSKKLKSVKELLGITIMERSSFEKNPIDFLEAKGYKEVKKDLIIKLPKYSLFELENGRKRMLASAGELQKGNELALPSKYVNFLYLASHYEKLKGSPEDNEQKQLFVEQHKHYLDEIIEQISEFSKRVILADANLDKVLSAYNKHRDKPIREQAENIIHLFTLTNLGAPAAFKYFDTTIDRKRYTSTKEVLDATLIHQSITGLYETRIDLSQLGGDGGGGSGGGGSSGGTLGIEDEYRLHETSTEPDVSLGSTWLSDFPQAWAETGGMGLAVRQAPLIIPLKATSTPVSIQQYPMSHEARLGIKPHIQRLLDQGILVPCQSPWNTPLLPVKKPGTNDYRPVQDLREVNKRVEDIHPTVPNPYNLLSGLPPSHQWYTVLDLKDAFFCLRLHPTSQPLFAFEWRDPGMGISGQLTWTRLPQGFKNSPTLFNEALHRDLADFRIQHPDLILLQYVDDILLAATSELDCQQGTRALLQTLGDLGYRASAKKAQICQKQVKYLGYLLREGQRWLTEARKETVMGQPVPKTPRQLREFLGTAGFCRLWIPGFAEMAAPLYPLTKPGTLFSWGPDQQKAYQEIKQALLTAPALGLPDLTKPFELFVDEKQGYAKGVLTQKLGPWRRPVAYLSKKLDPVAAGWPPCLRMVAAIAVLTKDAGKLTMGQPLVILAPHAVEALVKQPPDRWLSNARMTHYQAMLLDTDRVQFGPVVALNPATLLPLPEEGAPHDCLEILAETHGTRPDLTDQPIPDADHTWYTDGSSFLQEGQRKAGAAVTTETEVIWAGALPAGTSAQRAELIALTQALKMAEGKRLNVYTDSRYAFATAHIHGEIYRRRGWLTSEGREIKNKSEILALLKALFLPKRLSIIHCLGHQKGDSAEARGNRLADQAAREAAIKTPPDTSTLLAGKRTADGSEFEKRTADGSEFESPKKKAKVE

SEQ ID NO: 6807 - protein, 2094 aa, synthetic construct; identical to SEQ ID NO: 6806

SEQ ID NO: 6808 - protein, 2094 aa, synthetic construct
MPAAKRVKLDGGDKKYSIGLDIGTNSVGWAVITDEYKVPSKKFKVLGNTDRHSIKKNLIGALLFDSGETAEATRLKRTARRRYTRRKNRICYLQEIFSNEMAKVDDSFFHRLEESFLVEEDKKHERHPIFGNIVDEVAYHEKYPTIYHLRKKLVDSTDKADLRLIYLALAHMIKFRGHFLIEGDLNPDNSDVDKLFIQLVQTYNQLFEENPINASGVDAKAILSARLSKSRRLENLIAQLPGEKKNGLFGNLIALSLGLTPNFKSNFDLAEDAKLQLSKDTYDDDLDNLLAQIGDQYADLFLAAKNLSDAILLSDILRVNTEITKAPLSASMIKRYDEHHQDLTLLKALVRQQLPEKYKEIFFDQSKNGYAGYIDGGASQEEFYKFIKPILEKMDGTEELLVKLNREDLLRKQRTFDNGSIPHQIHLGELHAILRRQEDFYPFLKDNREKIEKILTFRIPYYVGPLARGNSRFAWMTRKSEETITPWNFEEVVDKGASAQSFIERMTNFDKNLPNEKVLPKHSLLYEYFTVYNELTKVKYVTEGMRKPAFLSGEQKKAIVDLLFKTNRKVTVKQLKEDYFKKIECFDSVEISGVEDRFNASLGTYHDLLKIIKDKDFLDNEENEDILEDIVLTLTLFEDREMIEERLKTYAHLFDDKVMKQLKRRRYTGWGRLSRKLINGIRDKQSGKTILDFLKSDGFANRNFMQLIHDDSLTFKEDIQKAQVSGQGDSLHEHIANLAGSPAIKKGILQTVKVVDELVKVMGRHKPENIVIEMARENQTTQKGQKNSRERMKRIEEGIKELGSQILKEHPVENTQLQNEKLYLYYLQNGRDMYVDQELDINRLSDYDVDHIVPQSFLKDDSIDNKVLTRSDKARGKSDNVPSEEVVKKMKNYWRQLLNAKLITQRKFDNLTKAERGGLSELDKAGFIKRQLVETRQITKHVAQILDSRMNTKYDENDKLIREVKVITLKSKLVSDFRKDFQFYKVREINNYHHAHDAYLNAVVGTALIKKYPKLESEFVYGDYKVYDVRKMIAKSEQEIGKATAKYFFYSNIMNFFKTEITLANGEIRKRPLIETNGETGEIVWDKGRDFATVRKVLSMPQVNIVKKTEVQTGGFSKESILPKRNSDKLIARKKDWDPKKYGGFDSPTVAYSVLVVAKVEKGKSKKLKSVKELLGITIMERSSFEKNPIDFLEAKGYKEVKKDLIIKLPKYSLFELENGRKRMLASAGELQKGNELALPSKYVNFLYLASHYEKLKGSPEDNEQKQLFVEQHKHYLDEIIEQISEFSKRVILADANLDKVLSAYNKHRDKPIREQAENIIHLFTLTNLGAPAAFKYFDTTIDRKRYTSTKEVLDATLIHQSITGLYETRIDLSQLGGDGGGGSGGGGSSGGTLNIEDEYRLHETSKEPDVSLGSTWLSDFPQAWAETGGMGLAVRQAPLIIPLKATSTPVSIKQYPMSQEARLGIKPHIQRLLDQGILVPCQSPWNTPLLPVKKPGTNDYRPVQDLREVNKRVEDIHPTVPNPYNLLSGLPPSHQWYTVLDLKDAFFCLRLHPTSQPLFAFEWRDPEMGISGQLTWTRLPQGFKNSPTLFNEALHRDLAGFRIQHPDLILLQYVDDLLLAATSELDCQQGTRALLQTLGDLGYRASAKKAQICQKQVKYLGYLLKEGQRWLTEARKETVMGQPIPKTPRQLREFLGTAGFCRLWIPGFAEMAAPLYPLTKPGTLFNWGPDQQKAFQEIKQALLTAPALGLPDLTKPFELFVDEKQGYAKGVLTQKLGPWRRPVAYLSKKLDPVAAGWPPCLRMVAAIAVLTKDAGKLTMGQPLVILAPHAVEALVKQPPDRWLSNARMTHYQALLLDTDRVQFGPVVALNPATLLPLPEEGLQHDCLDILAEAHGTRSDLMDQPLPDADHTWYTDGSSFLQEGQRKAGAAVTTETEVIWARALPAGTSAQRAELIALTQALKMAEGKKLNVYTDSRYAFATAHIHGEIYRRRGWLTSEGKEIKNKDEILALLKALFLPKRLSIIHCPGHQKGNSAEARGNRMADQAAREVATRETPETSTLLAGKRTADGSEFEKRTADGSEFESPKKKAKVE

SEQ ID NO: 6809 - protein, 2094 aa, synthetic construct
MPAAKRVKLDGGDKKYSIGLDIGTNSVGWAVITDEYKVPSKKFKVLGNTDRHSIKKNLIGALLFDSGETAEATRLKRTARRRYTRRKNRICYLQEIFSNEMAKVDDSFFHRLEESFLVEEDKKHERHPIFGNIVDEVAYHEKYPTIYHLRKKLVDSTDKADLRLIYLALAHMIKFRGHFLIEGDLNPDNSDVDKLFIQLVQTYNQLFEENPINASGVDAKAILSARLSKSRRLENLIAQLPGEKKNGLFGNLIALSLGLTPNFKSNFDLAEDAKLQLSKDTYDDDLDNLLAQIGDQYADLFLAAKNLSDAILLSDILRVNTEITKAPLSASMIKRYDEHHQDLTLLKALVRQQLPEKYKEIFFDQSKNGYAGYIDGGASQEEFYKFIKPILEKMDGTEELLVKLNREDLLRKQRTFDNGSIPHQIHLGELHAILRRQEDFYPFLKDNREKIEKILTFRIPYYVGPLARGNSRFAWMTRKSEETITPWNFEEVVDKGASAQSFIERMTNFDKNLPNEKVLPKHSLLYEYFTVYNELTKVKYVTEGMRKPAFLSGEQKKAIVDLLFKTNRKVTVKQLKEDYFKKIECFDSVEISGVEDRFNASLGTYHDLLKIIKDKDFLDNEENEDILEDIVLTLTLFEDREMIEERLKTYAHLFDDKVMKQLKRRRYTGWGRLSRKLINGIRDKQSGKTILDFLKSDGFANRNFMQLIHDDSLTFKEDIQKAQVSGQGDSLHEHIANLAGSPAIKKGILQTVKVVDELVKVMGRHKPENIVIEMARENQTTQKGQKNSRERMKRIEEGIKELGSQILKEHPVENTQLQNEKLYLYYLQNGRDMYVDQELDINRLSDYDVDHIVPQSFLKDDSIDNKVLTRSDKARGKSDNVPSEEVVKKMKNYWRQLLNAKLITQRKFDNLTKAERGGLSELDKAGFIKRQLVETRQITKHVAQILDSRMNTKYDENDKLIREVKVITLKSKLVSDFRKDFQFYKVREINNYHHAHDAYLNAVVGTALIKKYPKLESEFVYGDYKVYDVRKMIAKSEQEIGKATAKYFFYSNIMNFFKTEITLANGEIRKRPLIETNGETGEIVWDKGRDFATVRKVLSMPQVNIVKKTEVQTGGFSKESILPKRNSDKLIARKKDWDPKKYGGFDSPTVAYSVLVVAKVEKGKSKKLKSVKELLGITIMERSSFEKNPIDFLEAKGYKEVKKDLIIKLPKYSLFELENGRKRMLASAGELQKGNELALPSKYVNFLYLASHYEKLKGSPEDNEQKQLFVEQHKHYLDEIIEQISEFSKRVILADANLDKVLSAYNKHRDKPIREQAENIIHLFTLTNLGAPAAFKYFDTTIDRKRYTSTKEVLDATLIHQSITGLYETRIDLSQLGGDGGGGSGGGGSSGGTLNIEDEHRLHETSKEPDVSLGSTWLSDFPQAWAETGGMGLAVRQAPLIIPLKATSTPVSIKQYPMSQEARLGIKPHIQRLLDQGILVPCQSPWNTPLLPVKKPGTNDYRPVQDLREVNKRVEDIHPTVPNPYNLLSGLPPSHQWYTVLDLKDAFFCLRLHPTSQPLFAFEWRDPEMGISGQLTWTRLPQGFKNSPTLFNEALHRDLADFRIQHPDLILLQYVDDLLLAATSELDCQQGTRALLQTLGNLGYRASAKKAQICQKQVKYLGYLLKEGQRWLTEARKETVMGQPTPKTPRQLREFLGTAGFCRLWIPGFAEMAAPLYPLTKPGTLFNWGPDQQKAYQEIKQALLTAPALGLPDLTKPFELFVDEKQGYAKGVLTQKLGPWRRPVAYLSKKLDPVAAGWPPCLRMVAAIAVLTKDAGKLTMGQPLVILAPHAVEALVKQPPDRWLSNARMTHYQALLLDTDRVQFGPVVALNPATLLPLPEEGLQHNCLDILAEAHGTRPDLTDQPLPDADHTWYTDGSSLLQEGQRKAGAAVTTETEVIWAKALPAGTSAQRAELIALTQALKMAEGKKLNVYTDSRYAFATAHIHGEIYRRRGWLTSEGKEIKNKDEILALLKALFLPKRLSIIHCPGHQKGHSAEARGNRMADQAARKAAITETPDTSTLLAGKRTADGSEFEKRTADGSEFESPKKKAKVE

SEQ ID NO: 6810 - protein, 2088 aa, synthetic construct
MPAAKRVKLDGGDKKYSIGLDIGTNSVGWAVITDEYKVPSKKFKVLGNTDRHSIKKNLIGALLFDSGETAEATRLKRTARRRYTRRKNRICYLQEIFSNEMAKVDDSFFHRLEESFLVEEDKKHERHPIFGNIVDEVAYHEKYPTIYHLRKKLVDSTDKADLRLIYLALAHMIKFRGHFLIEGDLNPDNSDVDKLFIQLVQTYNQLFEENPINASGVDAKAILSARLSKSRRLENLIAQLPGEKKNGLFGNLIALSLGLTPNFKSNFDLAEDAKLQLSKDTYDDDLDNLLAQIGDQYADLFLAAKNLSDAILLSDILRVNTEITKAPLSASMIKRYDEHHQDLTLLKALVRQQLPEKYKEIFFDQSKNGYAGYIDGGASQEEFYKFIKPILEKMDGTEELLVKLNREDLLRKQRTFDNGSIPHQIHLGELHAILRRQEDFYPFLKDNREKIEKILTFRIPYYVGPLARGNSRFAWMTRKSEETITPWNFEEVVDKGASAQSFIERMTNFDKNLPNEKVLPKHSLLYEYFTVYNELTKVKYVTEGMRKPAFLSGEQKKAIVDLLFKTNRKVTVKQLKEDYFKKIECFDSVEISGVEDRFNASLGTYHDLLKIIKDKDFLDNEENEDILEDIVLTLTLFEDREMIEERLKTYAHLFDDKVMKQLKRRRYTGWGRLSRKLINGIRDKQSGKTILDFLKSDGFANRNFMQLIHDDSLTFKEDIQKAQVSGQGDSLHEHIANLAGSPAIKKGILQTVKVVDELVKVMGRHKPENIVIEMARENQTTQKGQKNSRERMKRIEEGIKELGSQILKEHPVENTQLQNEKLYLYYLQNGRDMYVDQELDINRLSDYDVDHIVPQSFLKDDSIDNKVLTRSDKARGKSDNVPSEEVVKKMKNYWRQLLNAKLITQRKFDNLTKAERGGLSELDKAGFIKRQLVETRQITKHVAQILDSRMNTKYDENDKLIREVKVITLKSKLVSDFRKDFQFYKVREINNYHHAHDAYLNAVVGTALIKKYPKLESEFVYGDYKVYDVRKMIAKSEQEIGKATAKYFFYSNIMNFFKTEITLANGEIRKRPLIETNGETGEIVWDKGRDFATVRKVLSMPQVNIVKKTEVQTGGFSKESILPKRNSDKLIARKKDWDPKKYGGFDSPTVAYSVLVVAKVEKGKSKKLKSVKELLGITIMERSSFEKNPIDFLEAKGYKEVKKDLIIKLPKYSLFELENGRKRMLASAGELQKGNELALPSKYVNFLYLASHYEKLKGSPEDNEQKQLFVEQHKHYLDEIIEQISEFSKRVILADANLDKVLSAYNKHRDKPIREQAENIIHLFTLTNLGAPAAFKYFDTTIDRKRYTSTKEVLDATLIHQSITGLYETRIDLSQLGGDGGGGSGGGGSSGGTLQLDDEYRLYSPLVKPDQNIQFWLEQFPQAWAETAGMGLAKQVPPQVIQLKASATPVSVRQYPLSKEAQEGIRPHVQRLIQQGILVPVQSPWNTPLLPVRKPGTNDYRPVQDLREVNKRVQDIHPTVPNPYNLLCALPPQRSWYTVLDLKDAFFCLRLHPTSQPLFAFEWRDPGTGRTGQLTWTRLPQGFKNSPTIFDEALHRDLANFRIQHPQVTLLQYVDDLLLAGATKQDCLEGTKALLLELSDLGYRASAKKAQICRREVTYLGYSLRDGQRWLTEARKKTVVQIPAPTTAKQVREFLGTAGFCRLWIPGFATLAAPLYPLTKEKGEFSWAPEHQKAFDAIKKALLSAPALALPDVTKPFTLYVDERKGVARGVLTQTLGPWRRPVAYLSKKLDPVASGWPVCLKAIAAVAILVKDADKLTLGQNITVIAPHALENIVRQPPDRWMTNARMTHYQSLLLTERVTFAPPAALNPATLLPEETDEPVTHDCHQLLIEETGVRKDLTDIPLTGEVLTWFTDGSSYVVEGKRMAGAAVVDGTRTIWASSLPEGTSAQKAELMALTQALRLAEGKSINIYTDSRYAFATAHVHGAIYKQRGLLTSAGREIKNKEEILSLLEALHLPKRLAIIHCPGHQKAKDPISRGNQMADRVAKQAAQGVNLLAGKRTADGSEFEKRTADGSEFESPKKKAKVE

SEQ ID NO: 6811 - protein, 2088 aa, synthetic construct; identical to SEQ ID NO: 6810

SEQ ID NO: 6812 - protein, 2174 aa, synthetic construct
MPAAKRVKLDGGDKKYSIGLDIGTNSVGWAVITDEYKVPSKKFKVLGNTDRHSIKKNLIGALLFDSGETAEATRLKRTARRRYTRRKNRICYLQEIFSNEMAKVDDSFFHRLEESFLVEEDKKHERHPIFGNIVDEVAYHEKYPTIYHLRKKLVDSTDKADLRLIYLALAHMIKFRGHFLIEGDLNPDNSDVDKLFIQLVQTYNQLFEENPINASGVDAKAILSARLSKSRRLENLIAQLPGEKKNGLFGNLIALSLGLTPNFKSNFDLAEDAKLQLSKDTYDDDLDNLLAQIGDQYADLFLAAKNLSDAILLSDILRVNTEITKAPLSASMIKRYDEHHQDLTLLKALVRQQLPEKYKEIFFDQSKNGYAGYIDGGASQEEFYKFIKPILEKMDGTEELLVKLNREDLLRKQRTFDNGSIPHQIHLGELHAILRRQEDFYPFLKDNREKIEKILTFRIPYYVGPLARGNSRFAWMTRKSEETITPWNFEEVVDKGASAQSFIERMTNFDKNLPNEKVLPKHSLLYEYFTVYNELTKVKYVTEGMRKPAFLSGEQKKAIVDLLFKTNRKVTVKQLKEDYFKKIECFDSVEISGVEDRFNASLGTYHDLLKIIKDKDFLDNEENEDILEDIVLTLTLFEDREMIEERLKTYAHLFDDKVMKQLKRRRYTGWGRLSRKLINGIRDKQSGKTILDFLKSDGFANRNFMQLIHDDSLTFKEDIQKAQVSGQGDSLHEHIANLAGSPAIKKGILQTVKVVDELVKVMGRHKPENIVIEMARENQTTQKGQKNSRERMKRIEEGIKELGSQILKEHPVENTQLQNEKLYLYYLQNGRDMYVDQELDINRLSDYDVDHIVPQSFLKDDSIDNKVLTRSDKARGKSDNVPSEEVVKKMKNYWRQLLNAKLITQRKFDNLTKAERGGLSELDKAGFIKRQLVETRQITKHVAQILDSRMNTKYDENDKLIREVKVITLKSKLVSDFRKDFQFYKVREINNYHHAHDAYLNAVVGTALIKKYPKLESEFVYGDYKVYDVRKMIAKSEQEIGKATAKYFFYSNIMNFFKTEITLANGEIRKRPLIETNGETGEIVWDKGRDFATVRKVLSMPQVNIVKKTEVQTGGFSKESILPKRNSDKLIARKKDWDPKKYGGFDSPTVAYSVLVVAKVEKGKSKKLKSVKELLGITIMERSSFEKNPIDFLEAKGYKEVKKDLIIKLPKYSLFELENGRKRMLASAGELQKGNELALPSKYVNFLYLASHYEKLKGSPEDNEQKQLFVEQHKHYLDEIIEQISEFSKRVILADANLDKVLSAYNKHRDKPIREQAENIIHLFTLTNLGAPAAFKYFDTTIDRKRYTSTKEVLDATLIHQSITGLYETRIDLSQLGGDGGGGSGGGGSSGGMDPLQLLQPLEAEIKGTKLKAHWNSGATITCVPEAFLEDERPIQTMLIKTIHGEKQQDVYYLTFKVQGRKVEAEVLASPYDYILLNPSDVPWLMKKPLQLTVLVPLHEYQERLLQQTALPKEQKELLQKLFLKYDALWQHWENQVGHRRIKPHNIATGTLAPRPQKQYPINPKAKPSIQIVIDDLLKQGVLIQQNSTMNTPVYPVPKPDGKWRMVLDYREVNKTIPLIAAQNQHSAGILSSIYRGKYKTTLDLTNGFWAHPITPESYWLTAFTWQGKQYCWTRLPQGFLNSPALFTADVVDLLKEIPNVQAYVDDIYISHDDPQEHLEQLEKIFSILLNAGYVVSLKKSEIAQREVEFLGFNITKEGRGLTDTFKQKLLNITPPKDLKQLQSILGLLNFARNFIPNYSELVKPLYTIVANANGKFISWTEDNSNQLQHIISVLNQADNLEERNPETRLIIKVNSSPSAGYIRYYNEGSKRPIMYVNYIFSKAEAKFTQTEKLLTTMHKGLIKAMDLAMGQEILVYSPIVSMTKIQRTPLPERKALPVRWITWMTYLEDPRIQFHYDKSLPELQQIPNVTEDVIAKTKHPSEFAMVFYTDGSAIKHPDVNKSHSAGMGIAQVQFIPEYKIVHQWSIPLGDHTAQLAEIAAVEFACKKALKISGPVLIVTDSFYVAESANKELPYWKSNGFLNNKKKPLRHVSKWKSIAECLQLKPDIIIMHEKGHQQPMTTLHTEGNNLADKLATQGSYVVHAGKRTADGSEFEKRTADGSEFESPKKKAKVE

SEQ ID NO: 6813 - protein, 2085 aa, synthetic construct
MPAAKRVKLDGGDKKYSIGLDIGTNSVGWAVITDEYKVPSKKFKVLGNTDRHSIKKNLIGALLFDSGETAEATRLKRTARRRYTRRKNRICYLQEIFSNEMAKVDDSFFHRLEESFLVEEDKKHERHPIFGNIVDEVAYHEKYPTIYHLRKKLVDSTDKADLRLIYLALAHMIKFRGHFLIEGDLNPDNSDVDKLFIQLVQTYNQLFEENPINASGVDAKAILSARLSKSRRLENLIAQLPGEKKNGLFGNLIALSLGLTPNFKSNFDLAEDAKLQLSKDTYDDDLDNLLAQIGDQYADLFLAAKNLSDAILLSDILRVNTEITKAPLSASMIKRYDEHHQDLTLLKALVRQQLPEKYKEIFFDQSKNGYAGYIDGGASQEEFYKFIKPILEKMDGTEELLVKLNREDLLRKQRTFDNGSIPHQIHLGELHAILRRQEDFYPFLKDNREKIEKILTFRIPYYVGPLARGNSRFAWMTRKSEETITPWNFEEVVDKGASAQSFIERMTNFDKNLPNEKVLPKHSLLYEYFTVYNELTKVKYVTEGMRKPAFLSGEQKKAIVDLLFKTNRKVTVKQLKEDYFKKIECFDSVEISGVEDRFNASLGTYHDLLKIIKDKDFLDNEENEDILEDIVLTLTLFEDREMIEERLKTYAHLFDDKVMKQLKRRRYTGWGRLSRKLINGIRDKQSGKTILDFLKSDGFANRNFMQLIHDDSLTFKEDIQKAQVSGQGDSLHEHIANLAGSPAIKKGILQTVKVVDELVKVMGRHKPENIVIEMARENQTTQKGQKNSRERMKRIEEGIKELGSQILKEHPVENTQLQNEKLYLYYLQNGRDMYVDQELDINRLSDYDVDHIVPQSFLKDDSIDNKVLTRSDKARGKSDNVPSEEVVKKMKNYWRQLLNAKLITQRKFDNLTKAERGGLSELDKAGFIKRQLVETRQITKHVAQILDSRMNTKYDENDKLIREVKVITLKSKLVSDFRKDFQFYKVREINNYHHAHDAYLNAVVGTALIKKYPKLESEFVYGDYKVYDVRKMIAKSEQEIGKATAKYFFYSNIMNFFKTEITLANGEIRKRPLIETNGETGEIVWDKGRDFATVRKVLSMPQVNIVKKTEVQTGGFSKESILPKRNSDKLIARKKDWDPKKYGGFDSPTVAYSVLVVAKVEKGKSKKLKSVKELLGITIMERSSFEKNPIDFLEAKGYKEVKKDLIIKLPKYSLFELENGRKRMLASAGELQKGNELALPSKYVNFLYLASHYEKLKGSPEDNEQKQLFVEQHKHYLDEIIEQISEFSKRVILADANLDKVLSAYNKHRDKPIREQAENIIHLFTLTNLGAPAAFKYFDTTIDRKRYTSTKEVLDATLIHQSITGLYETRIDLSQLGGDGGGGSGGGGSSGGVPWLMKKPLQLTVLVPLHEYQERLLQQTALPKEQKELLQKLFLKYDALWQHWENQVGHRRIKPHNIATGTLAPRPQKQYPINPKAKPSIQIVIDDLLKQGVLIQQNSTMNTPVYPVPKPDGKWRMVLDYREVNKTIPLIAAQNQHSAGILSSIYRGKYKTTLDLTNGFWAHPITPESYWLTAFTWQGKQYCWTRLPQGFLNSPALFTADVVDLLKEIPNVQAYVDDIYISHDDPQEHLEQLEKIFSILLNAGYVVSLKKSEIAQREVEFLGFNITKEGRGLTDTFKQKLLNITPPKDLKQLQSILGLLNFARNFIPNYSELVKPLYTIVANANGKFISWTEDNSNQLQHIISVLNQADNLEERNPETRLIIKVNSSPSAGYIRYYNEGSKRPIMYVNYIFSKAEAKFTQTEKLLTTMHKGLIKAMDLAMGQEILVYSPIVSMTKIQRTPLPERKALPVRWITWMTYLEDPRIQFHYDKSLPELQQIPNVTEDVIAKTKHPSEFAMVFYTDGSAIKHPDVNKSHSAGMGIAQVQFIPEYKIVHQWSIPLGDHTAQLAEIAAVEFACKKALKISGPVLIVTDSFYVAESANKELPYWKSNGFLNNKKKPLRHVSKWKSIAECLQLKPDIIIMHEKGHQQPMTTLHTEGNNLADKLATQGSYVVHAGKRTADGSEFEKRTADGSEFESPKKKAKVE

SEQ ID NO: 6814 - protein, 2085 aa, synthetic construct
MPAAKRVKLDGGDKKYSIGLDIGTNSVGWAVITDEYKVPSKKFKVLGNTDRHSIKKNLIGALLFDSGETAEATRLKRTARRRYTRRKNRICYLQEIFSNEMAKVDDSFFHRLEESFLVEEDKKHERHPIFGNIVDEVAYHEKYPTIYHLRKKLVDSTDKADLRLIYLALAHMIKFRGHFLIEGDLNPDNSDVDKLFIQLVQTYNQLFEENPINASGVDAKAILSARLSKSRRLENLIAQLPGEKKNGLFGNLIALSLGLTPNFKSNFDLAEDAKLQLSKDTYDDDLDNLLAQIGDQYADLFLAAKNLSDAILLSDILRVNTEITKAPLSASMIKRYDEHHQDLTLLKALVRQQLPEKYKEIFFDQSKNGYAGYIDGGASQEEFYKFIKPILEKMDGTEELLVKLNREDLLRKQRTFDNGSIPHQIHLGELHAILRRQEDFYPFLKDNREKIEKILTFRIPYYVGPLARGNSRFAWMTRKSEETITPWNFEEVVDKGASAQSFIERMTNFDKNLPNEKVLPKHSLLYEYFTVYNELTKVKYVTEGMRKPAFLSGEQKKAIVDLLFKTNRKVTVKQLKEDYFKKIECFDSVEISGVEDRFNASLGTYHDLLKIIKDKDFLDNEENEDILEDIVLTLTLFEDREMIEERLKTYAHLFDDKVMKQLKRRRYTGWGRLSRKLINGIRDKQSGKTILDFLKSDGFANRNFMQLIHDDSLTFKEDIQKAQVSGQGDSLHEHIANLAGSPAIKKGILQTVKVVDELVKVMGRHKPENIVIEMARENQTTQKGQKNSRERMKRIEEGIKELGSQILKEHPVENTQLQNEKLYLYYLQNGRDMYVDQELDINRLSDYDVDHIVPQSFLKDDSIDNKVLTRSDKARGKSDNVPSEEVVKKMKNYWRQLLNAKLITQRKFDNLTKAERGGLSELDKAGFIKRQLVETRQITKHVAQILDSRMNTKYDENDKLIREVKVITLKSKLVSDFRKDFQFYKVREINNYHHAHDAYLNAVVGTALIKKYPKLESEFVYGDYKVYDVRKMIAKSEQEIGKATAKYFFYSNIMNFFKTEITLANGEIRKRPLIETNGETGEIVWDKGRDFATVRKVLSMPQVNIVKKTEVQTGGFSKESILPKRNSDKLIARKKDWDPKKYGGFDSPTVAYSVLVVAKVEKGKSKKLKSVKELLGITIMERSSFEKNPIDFLEAKGYKEVKKDLIIKLPKYSLFELENGRKRMLASAGELQKGNELALPSKYVNFLYLASHYEKLKGSPEDNEQKQLFVEQHKHYLDEIIEQISEFSKRVILADANLDKVLSAYNKHRDKPIREQAENIIHLFTLTNLGAPAAFKYFDTTIDRKRYTSTKEVLDATLIHQSITGLYETRIDLSQLGGDGGGGSGGGGSSGGIPWLMKKPLQLTTLVPLQEYEERLLKQTMLTGSYKEKLQSLFLKYDALWQHWENQVGHRRIKPHHIATGTVNPRPQKQYPINPKAKASIQTVINDLLKQGVLIQQNSIMNTPVYPVPKPDGKWRMVLDYREVNKTIPLIAAQNQHSAGILSSIFRGKYKTTLDLSNGFWAHSITPESYWLTAFTWLGQQYCWTRLPQGFLNSPALFNADVVDLLKEVPNVQVYVDDIYISHDDPREHLEQLEKVFSLLLNAGYVVSLKKSEIAQHEVEFLGFNITKEGRGLTETFKQKLLNITPPRDLKQLQSILGKLNFARNFIPNFSELVKPLYNIIATAPGKYITWTTDNSQQLQNIISMLNSAENLEERNPEVRLIMKVNTSPSAGYIRFYNEFAKRPIMYLNYVYTKAEVKFTNTEKLLTTIHKGLIKALDLGMGQEILVYSPIVSMTKIQKTPLPERKALPIRWITWMSYLEDPRIQFHYDKTLPELQQVPTVTDDIIAKIKHPSEFSMVFYTDGSAIKHPNVNKSHNAGMGIAQVQFKPEFTVINTWSIPLGDHTAQLAEVAAVEFACKKALKIDGPVLIVTDSFYVAESVNKELPYWQSNGFFNNKKKPLKHVSKWKSIADCIQLKPDIIIIHEKGHQPTASTFHTEGNNLADKLATQGSYVVNAGKRTADGSEFEKRTADGSEFESPKKKAKVE

SEQ ID NO: 6815 - protein, 2094 aa, synthetic construct
MPAAKRVKLDGGDKKYSIGLDIGTNSVGWAVITDEYKVPSKKFKVLGNTDRHSIKKNLIGALLFDSGETAEATRLKRTARRRYTRRKNRICYLQEIFSNEMAKVDDSFFHRLEESFLVEEDKKHERHPIFGNIVDEVAYHEKYPTIYHLRKKLVDSTDKADLRLIYLALAHMIKFRGHFLIEGDLNPDNSDVDKLFIQLVQTYNQLFEENPINASGVDAKAILSARLSKSRRLENLIAQLPGEKKNGLFGNLIALSLGLTPNFKSNFDLAEDAKLQLSKDTYDDDLDNLLAQIGDQYADLFLAAKNLSDAILLSDILRVNTEITKAPLSASMIKRYDEHHQDLTLLKALVRQQLPEKYKEIFFDQSKNGYAGYIDGGASQEEFYKFIKPILEKMDGTEELLVKLNREDLLRKQRTFDNGSIPHQIHLGELHAILRRQEDFYPFLKDNREKIEKILTFRIPYYVGPLARGNSRFAWMTRKSEETITPWNFEEVVDKGASAQSFIERMTNFDKNLPNEKVLPKHSLLYEYFTVYNELTKVKYVTEGMRKPAFLSGEQKKAIVDLLFKTNRKVTVKQLKEDYFKKIECFDSVEISGVEDRFNASLGTYHDLLKIIKDKDFLDNEENEDILEDIVLTLTLFEDREMIEERLKTYAHLFDDKVMKQLKRRRYTGWGRLSRKLINGIRDKQSGKTILDFLKSDGFANRNFMQLIHDDSLTFKEDIQKAQVSGQGDSLHEHIANLAGSPAIKKGILQTVKVVDELVKVMGRHKPENIVIEMARENQTTQKGQKNSRERMKRIEEGIKELGSQILKEHPVENTQLQNEKLYLYYLQNGRDMYVDQELDINRLSDYDVDHIVPQSFLKDDSIDNKVLTRSDKARGKSDNVPSEEVVKKMKNYWRQLLNAKLITQRKFDNLTKAERGGLSELDKAGFIKRQLVETRQITKHVAQILDSRMNTKYDENDKLIREVKVITLKSKLVSDFRKDFQFYKVREINNYHHAHDAYLNAVVGTALIKKYPKLESEFVYGDYKVYDVRKMIAKSEQEIGKATAKYFFYSNIMNFFKTEITLANGEIRKRPLIETNGETGEIVWDKGRDFATVRKVLSMPQVNIVKKTEVQTGGFSKESILPKRNSDKLIARKKDWDPKKYGGFDSPTVAYSVLVVAKVEKGKSKKLKSVKELLGITIMERSSFEKNPIDFLEAKGYKEVKKDLIIKLPKYSLFELENGRKRMLASAGELQKGNELALPSKYVNFLYLASHYEKLKGSPEDNEQKQLFVEQHKHYLDEIIEQISEFSKRVILADANLDKVLSAYNKHRDKPIREQAENIIHLFTLTNLGAPAAFKYFDTTIDRKRYTSTKEVLDATLIHQSITGLYETRIDLSQLGGDGGGGSGGGGSSGGTLNIEDEYRLHETSKEPDVPLGSTWLSDFPQAWAETGGMGLAVRQAPLIIPLKATSTPVSIKQYPMSQEARLGIKPHIQRLLDQGILVPCQSPWNTPLLPVKKPGTNDYRPVQDLREVNKRVEDIHPTVPNPYNLLSGLPPSHQWYTVLDLKDAFFCLRLHPTSQPLFAFEWRDPEMGISGQLTWTRLPQGFKNSPTLFNEALHRDLADFRIQHPDLILLQYVDDLLLAATSEQDCQRGTRALLQTLGNLGYRASAKKAQICQKQVKYLGYLLKEGQRWLTEARKETVMGQPTPKTPRQLREFLGTAGFCRLWIPGFAEMAAPLYPLTKPGTLFNWGPDQQKAYQEIKQALLTAPALGLPDLTKPFELFVDEKQGYAKGVLTQKLGPWRRPVAYLSKKLDPVAAGWPPCLRMVAAIAVLTKDAGKLTMGQPLVILAPHAVEALVKQPPDRWLSNARMTHYQAMLLDTDRVQFGPVVALNPATLLPLPEKEAPHDCLEILAETHGTRPDLTDQPIPDADYTWYTDGSSFLQEGQRRAGAAVTTETEVIWARALPAGTSAQRAELIALTQALKMAEGKKLNVYTDSRYAFATAHVHGEIYRRRGWLTSEGREIKNKNEILALLKALFLPKRLSIIHCPGHQKGNSAEARGNRMADQAAREAAMKAVLETSTLLAGKRTADGSEFEKRTADGSEFESPKKKAKVE

SEQ ID NO: 6816 - protein, 2094 aa, synthetic construct
MPAAKRVKLDGGDKKYSIGLDIGTNSVGWAVITDEYKVPSKKFKVLGNTDRHSIKKNLIGALLFDSGETAEATRLKRTARRRYTRRKNRICYLQEIFSNEMAKVDDSFFHRLEESFLVEEDKKHERHPIFGNIVDEVAYHEKYPTIYHLRKKLVDSTDKADLRLIYLALAHMIKFRGHFLIEGDLNPDNSDVDKLFIQLVQTYNQLFEENPINASGVDAKAILSARLSKSRRLENLIAQLPGEKKNGLFGNLIALSLGLTPNFKSNFDLAEDAKLQLSKDTYDDDLDNLLAQIGDQYADLFLAAKNLSDAILLSDILRVNTEITKAPLSASMIKRYDEHHQDLTLLKALVRQQLPEKYKEIFFDQSKNGYAGYIDGGASQEEFYKFIKPILEKMDGTEELLVKLNREDLLRKQRTFDNGSIPHQIHLGELHAILRRQEDFYPFLKDNREKIEKILTFRIPYYVGPLARGNSRFAWMTRKSEETITPWNFEEVVDKGASAQSFIERMTNFDKNLPNEKVLPKHSLLYEYFTVYNELTKVKYVTEGMRKPAFLSGEQKKAIVDLLFKTNRKVTVKQLKEDYFKKIECFDSVEISGVEDRFNASLGTYHDLLKIIKDKDFLDNEENEDILEDIVLTLTLFEDREMIEERLKTYAHLFDDKVMKQLKRRRYTGWGRLSRKLINGIRDKQSGKTILDFLKSDGFANRNFMQLIHDDSLTFKEDIQKAQVSGQGDSLHEHIANLAGSPAIKKGILQTVKVVDELVKVMGRHKPENIVIEMARENQTTQKGQKNSRERMKRIEEGIKELGSQILKEHPVENTQLQNEKLYLYYLQNGRDMYVDQELDINRLSDYDVDHIVPQSFLKDDSIDNKVLTRSDKARGKSDNVPSEEVVKKMKNYWRQLLNAKLITQRKFDNLTKAERGGLSELDKAGFIKRQLVETRQITKHVAQILDSRMNTKYDENDKLIREVKVITLKSKLVSDFRKDFQFYKVREINNYHHAHDAYLNAVVGTALIKKYPKLESEFVYGDYKVYDVRKMIAKSEQEIGKATAKYFFYSNIMNFFKTEITLANGEIRKRPLIETNGETGEIVWDKGRDFATVRKVLSMPQVNIVKKTEVQTGGFSKESILPKRNSDKLIARKKDWDPKKYGGFDSPTVAYSVLVVAKVEKGKSKKLKSVKELLGITIMERSSFEKNPIDFLEAKGYKEVKKDLIIKLPKYSLFELENGRKRMLASAGELQKGNELALPSKYVNFLYLASHYEKLKGSPEDNEQKQLFVEQHKHYLDEIIEQISEFSKRVILADANLDKVLSAYNKHRDKPIREQAENIIHLFTLTNLGAPAAFKYFDTTIDRKRYTSTKEVLDATLIHQSITGLYETRIDLSQLGGDGGGGSGGGGSSGGTLNIEDEYRLHETSKEPDVPLGSTWLSDFPQAWAETGGMGLAVRQAPLIIPLKATSTPVSIKQYPMSQEARLGIKPHIQRLLDQGILVPCQSPWNTPLLPVKKPGTNDYRPVQDLREVNKRVEDIHPTVPNPYNLLSGLPPSHQWYTVLDLKDAFFCLRLHPTSQPLFAFEWRDPEMGISGQLTWTRLPQGFKNSPTLFNEALHRDLADFRIQHPDLILLQYVDDLLLAATSEQDCQRGTRALLQTLGNLGYRASAKKAQICQKQVKYLGYLLKEGQRWLTEARKETVMGQPTPKTPRQLREFLGKAGFCRLFIPGFAEMAAPLYPLTKPGTLFNWGPDQQKAYQEIKQALLTAPALGLPDLTKPFELFVDEKQGYAKGVLTQKLGPWRRPVAYLSKKLDPVAAGWPPCLRMVAAIAVLTKDAGKLTMGQPLVILAPHAVEALVKQPPDRWLSNARMTHYQAMLLDTDRVQFGPVVALNPATLLPLPEKEAPHDCLEILAETHGTRPDLTDQPIPDADYTWYTDGSSFLQEGQRRAGAAVTTETEVIWARALPAGTSAQRAELIALTQALKMAEGKKLNVYTDSRYAFATAHVHGEIYRRRGWLTSEGREIKNKNEILALLKALFLPKRLSIIHCPGHQKGNSAEARGNRMADQAAREAAMKAVLETSTLLAGKRTADGSEFEKRTADGSEFESPKKKAKVE

SEQ ID NO: 6817 - protein, 2096 aa, synthetic construct
MPAAKRVKLDGGDKKYSIGLDIGTNSVGWAVITDEYKVPSKKFKVLGNTDRHSIKKNLIGALLFDSGETAEATRLKRTARRRYTRRKNRICYLQEIFSNEMAKVDDSFFHRLEESFLVEEDKKHERHPIFGNIVDEVAYHEKYPTIYHLRKKLVDSTDKADLRLIYLALAHMIKFRGHFLIEGDLNPDNSDVDKLFIQLVQTYNQLFEENPINASGVDAKAILSARLSKSRRLENLIAQLPGEKKNGLFGNLIALSLGLTPNFKSNFDLAEDAKLQLSKDTYDDDLDNLLAQIGDQYADLFLAAKNLSDAILLSDILRVNTEITKAPLSASMIKRYDEHHQDLTLLKALVRQQLPEKYKEIFFDQSKNGYAGYIDGGASQEEFYKFIKPILEKMDGTEELLVKLNREDLLRKQRTFDNGSIPHQIHLGELHAILRRQEDFYPFLKDNREKIEKILTFRIPYYVGPLARGNSRFAWMTRKSEETITPWNFEEVVDKGASAQSFIERMTNFDKNLPNEKVLPKHSLLYEYFTVYNELTKVKYVTEGMRKPAFLSGEQKKAIVDLLFKTNRKVTVKQLKEDYFKKIECFDSVEISGVEDRFNASLGTYHDLLKIIKDKDFLDNEENEDILEDIVLTLTLFEDREMIEERLKTYAHLFDDKVMKQLKRRRYTGWGRLSRKLINGIRDKQSGKTILDFLKSDGFANRNFMQLIHDDSLTFKEDIQKAQVSGQGDSLHEHIANLAGSPAIKKGILQTVKVVDELVKVMGRHKPENIVIEMARENQTTQKGQKNSRERMKRIEEGIKELGSQILKEHPVENTQLQNEKLYLYYLQNGRDMYVDQELDINRLSDYDVDHIVPQSFLKDDSIDNKVLTRSDKARGKSDNVPSEEVVKKMKNYWRQLLNAKLITQRKFDNLTKAERGGLSELDKAGFIKRQLVETRQITKHVAQILDSRMNTKYDENDKLIREVKVITLKSKLVSDFRKDFQFYKVREINNYHHAHDAYLNAVVGTALIKKYPKLESEFVYGDYKVYDVRKMIAKSEQEIGKATAKYFFYSNIMNFFKTEITLANGEIRKRPLIETNGETGEIVWDKGRDFATVRKVLSMPQVNIVKKTEVQTGGFSKESILPKRNSDKLIARKKDWDPKKYGGFDSPTVAYSVLVVAKVEKGKSKKLKSVKELLGITIMERSSFEKNPIDFLEAKGYKEVKKDLIIKLPKYSLFELENGRKRMLASAGELQKGNELALPSKYVNFLYLASHYEKLKGSPEDNEQKQLFVEQHKHYLDEIIEQISEFSKRVILADANLDKVLSAYNKHRDKPIREQAENIIHLFTLTNLGAPAAFKYFDTTIDRKRYTSTKEVLDATLIHQSITGLYETRIDLSQLGGDGGGGSGSSGGGGGTAPLEEEYRLFLEAPIQNVTLLEQWKREIPKVWAEINPPGLASTQAPIHVQLLSTALPVRVRQYPITLEAKRSLRETIRKFRAAGILRPVHSPWNTPLLPVRKSGTSEYRMVQDLREVNKRVETIHPTVPNPYTLLSLLPPDRIWYSVLDLKDAFFCIPLAPESQLIFAFEWADAEEGESGQLTWTRLPQGFKNSPTLFNEALNRDLQGFRLDHPSVSLLQYVDDLLIAADTQAACLSATRDLLMTLAELGYRVSGKKAQLCQEEVTYLGFKIHKGSRSLSNSRTQAILQIPVPKTKRQVREFLGTIGYCRLWIPGFAELAQPLYAATRPGNDPLVWGEKEEEAFQSLKLALTQPPALALPSLDKPFQLFVEETSGAAKGVLTQALGPWKRPVAYLSKRLDPVAAGWPRCLRAIAAAALLTREASKLTFGQDIEITSSHNLESLLRSPPDKWLTNARITQYQVLLLDPPRVRFKQTAALNPATLLPETDDTLPIHHCLDTLDSLTSTRPDLTDQPLAQAEATLFTDGSSYIRDGKRYAGAAVVTLDSVIWAEPLPIGTSAQKAELIALTKALEWSKDKSVNIYTDSRYAFATLHVHGMIYRERGWLTAGGKAIKNAPEILALLTAVWLPKRVAVMHCKGHQKDDAPTSTGNRRADEVAREVAIRPLSTQATISAGKRTADGSEFEKRTADGSEFESPKKKAKVE

SEQ ID NO: 6818 - protein, 2100 aa, synthetic construct
MPAAKRVKLDGGDKKYSIGLDIGTNSVGWAVITDEYKVPSKKFKVLGNTDRHSIKKNLIGALLFDSGETAEATRLKRTARRRYTRRKNRICYLQEIFSNEMAKVDDSFFHRLEESFLVEEDKKHERHPIFGNIVDEVAYHEKYPTIYHLRKKLVDSTDKADLRLIYLALAHMIKFRGHFLIEGDLNPDNSDVDKLFIQLVQTYNQLFEENPINASGVDAKAILSARLSKSRRLENLIAQLPGEKKNGLFGNLIALSLGLTPNFKSNFDLAEDAKLQLSKDTYDDDLDNLLAQIGDQYADLFLAAKNLSDAILLSDILRVNTEITKAPLSASMIKRYDEHHQDLTLLKALVRQQLPEKYKEIFFDQSKNGYAGYIDGGASQEEFYKFIKPILEKMDGTEELLVKLNREDLLRKQRTFDNGSIPHQIHLGELHAILRRQEDFYPFLKDNREKIEKILTFRIPYYVGPLARGNSRFAWMTRKSEETITPWNFEEVVDKGASAQSFIERMTNFDKNLPNEKVLPKHSLLYEYFTVYNELTKVKYVTEGMRKPAFLSGEQKKAIVDLLFKTNRKVTVKQLKEDYFKKIECFDSVEISGVEDRFNASLGTYHDLLKIIKDKDFLDNEENEDILEDIVLTLTLFEDREMIEERLKTYAHLFDDKVMKQLKRRRYTGWGRLSRKLINGIRDKQSGKTILDFLKSDGFANRNFMQLIHDDSLTFKEDIQKAQVSGQGDSLHEHIANLAGSPAIKKGILQTVKVVDELVKVMGRHKPENIVIEMARENQTTQKGQKNSRERMKRIEEGIKELGSQILKEHPVENTQLQNEKLYLYYLQNGRDMYVDQELDINRLSDYDVDHIVPQSFLKDDSIDNKVLTRSDKARGKSDNVPSEEVVKKMKNYWRQLLNAKLITQRKFDNLTKAERGGLSELDKAGFIKRQLVETRQITKHVAQILDSRMNTKYDENDKLIREVKVITLKSKLVSDFRKDFQFYKVREINNYHHAHDAYLNAVVGTALIKKYPKLESEFVYGDYKVYDVRKMIAKSEQEIGKATAKYFFYSNIMNFFKTEITLANGEIRKRPLIETNGETGEIVWDKGRDFATVRKVLSMPQVNIVKKTEVQTGGFSKESILPKRNSDKLIARKKDWDPKKYGGFDSPTVAYSVLVVAKVEKGKSKKLKSVKELLGITIMERSSFEKNPIDFLEAKGYKEVKKDLIIKLPKYSLFELENGRKRMLASAGELQKGNELALPSKYVNFLYLASHYEKLKGSPEDNEQKQLFVEQHKHYLDEIIEQISEFSKRVILADANLDKVLSAYNKHRDKPIREQAENIIHLFTLTNLGAPAAFKYFDTTIDRKRYTSTKEVLDATLIHQSITGLYETRIDLSQLGGDGGGGSGSSGGGGGTVSLQDEHRLFDIPVTTSLPDVWLQDFPQAWAETGGLGRAKCQAPIIIDLKPTAVPVSIKQYPMSLEAHMGIRQHIIKFLELGVLRPCRSPWNTPLLPVKKPGTQDYRPVQDLREINKRTVDIHPTVPNPYNLLSTLKPDYSWYTVLDLKDAFFCLPLAPQSQELFAFEWKDPERGISGQLTWTRLPQGFKNSPTLFDEALHRDLTDFRTQHPEVTLLQYVDDLLLAAPTKKACTQGTRHLLQELGEKGYRASAKKAQICQTKVTYLGYILSEGKRWLTPGRIETVARIPPPRNPREVREFLGTAGFCRLWIPGFAELAAPLYALTKESTPFTWQTEHQLAFEALKKALLSAPALGLPDTSKPFTLFLDERQGIAKGVLTQKLGPWKRPVAYLSKKLDPVAAGWPPCLRIMAATAMLVKDSAKLTLGQPLTVITPHTLEAIVRQPPDRWITNARLTHYQALLLDTDRVQFGPPVTLNPATLLPVPENQPSPHDCRQVLAETHGTREDLKDQELPDADHTWYTDGSSYLDSGTRRAGAAVVDGHNTIWAQSLPPGTSAQKAELIALTKALELSKGKKANIYTDSRYAFATAHTHGSIYERRGLLTSEGKEIKNKAEIIALLKALFLPQEVAIIHCPGHQKGQDPVAVGNRQADRVARQAAMAEVLTLATEPDNTSHITAGKRTADGSEFEKRTADGSEFESPKKKAKVE

SEQ ID NO: 6819 - protein, 2094 aa, synthetic construct
MPAAKRVKLDGGDKKYSIGLDIGTNSVGWAVITDEYKVPSKKFKVLGNTDRHSIKKNLIGALLFDSGETAEATRLKRTARRRYTRRKNRICYLQEIFSNEMAKVDDSFFHRLEESFLVEEDKKHERHPIFGNIVDEVAYHEKYPTIYHLRKKLVDSTDKADLRLIYLALAHMIKFRGHFLIEGDLNPDNSDVDKLFIQLVQTYNQLFEENPINASGVDAKAILSARLSKSRRLENLIAQLPGEKKNGLFGNLIALSLGLTPNFKSNFDLAEDAKLQLSKDTYDDDLDNLLAQIGDQYADLFLAAKNLSDAILLSDILRVNTEITKAPLSASMIKRYDEHHQDLTLLKALVRQQLPEKYKEIFFDQSKNGYAGYIDGGASQEEFYKFIKPILEKMDGTEELLVKLNREDLLRKQRTFDNGSIPHQIHLGELHAILRRQEDFYPFLKDNREKIEKILTFRIPYYVGPLARGNSRFAWMTRKSEETITPWNFEEVVDKGASAQSFIERMTNFDKNLPNEKVLPKHSLLYEYFTVYNELTKVKYVTEGMRKPAFLSGEQKKAIVDLLFKTNRKVTVKQLKEDYFKKIECFDSVEISGVEDRFNASLGTYHDLLKIIKDKDFLDNEENEDILEDIVLTLTLFEDREMIEERLKTYAHLFDDKVMKQLKRRRYTGWGRLSRKLINGIRDKQSGKTILDFLKSDGFANRNFMQLIHDDSLTFKEDIQKAQVSGQGDSLHEHIANLAGSPAIKKGILQTVKVVDELVKVMGRHKPENIVIEMARENQTTQKGQKNSRERMKRIEEGIKELGSQILKEHPVENTQLQNEKLYLYYLQNGRDMYVDQELDINRLSDYDVDHIVPQSFLKDDSIDNKVLTRSDKARGKSDNVPSEEVVKKMKNYWRQLLNAKLITQRKFDNLTKAERGGLSELDKAGFIKRQLVETRQITKHVAQILDSRMNTKYDENDKLIREVKVITLKSKLVSDFRKDFQFYKVREINNYHHAHDAYLNAVVGTALIKKYPKLESEFVYGDYKVYDVRKMIAKSEQEIGKATAKYFFYSNIMNFFKTEITLANGEIRKRPLIETNGETGEIVWDKGRDFATVRKVLSMPQVNIVKKTEVQTGGFSKESILPKRNSDKLIARKKDWDPKKYGGFDSPTVAYSVLVVAKVEKGKSKKLKSVKELLGITIMERSSFEKNPIDFLEAKGYKEVKKDLIIKLPKYSLFELENGRKRMLASAGELQKGNELALPSKYVNFLYLASHYEKLKGSPEDNEQKQLFVEQHKHYLDEIIEQISEFSKRVILADANLDKVLSAYNKHRDKPIREQAENIIHLFTLTNLGAPAAFKYFDTTIDRKRYTSTKEVLDATLIHQSITGLYETRIDLSQLGGDGGGGSGSSGGGGGTLNLEDEYRLYETSAEPEVSPGSTWLSDFPQAWAETGGMGLAVRQAPLIIPLKATSTPVSIKQYPMSQEAKLGIKPHIQRLLDQGILVPCQSPWNTPLLPVKKPGTNDYRPVQDLREVNKRVEDIHPTVPNPYNLLSGLPPSHRWYTVLDLKDAFFCLRLHPTSQPLFAFEWRDPGMGISGQLTWTRLPQGFKNSPTLFNEALHRDLADFRIQHPDLILLQYVDDILLAATSELDCQQGTRALLLTLGNLGYRASAKKAQLCQKQVKYLGYLLKEGQRWLTEARKETVMGQPTPKTPRQLREFLGKAGFCRLFIPGFAEMAAPLYPLTKPGTLFNWGPDQQKAYQEIKQALLTAPALGLPDLTKPFELFVDEKQGYAKGVLTQKLGPWRRPVAYLSKKLDPVAAGWPPCLRMVAAIAVLRKDAGKLTMGQPLVILAPHAVEALVKQPPDRWLSNARMTHYQAMLLDTDRVQFGPVVALNPATLLPLPEEGAPHDCLEILAETHGTRPDLTDQPIPDADHTWYTDGSSFLQEGQRKAGAAVTTETEVIWARALPAGTSAQRAELIALTQALKMAEGKRLNVYTDSRYAFATAHIHGEIYRRRGWLTSEGREIKNKSEILALLKALFLPKRLSIIHCLGHQKGDSAEARGNRLADQAAREAAIKTPPDTSTLLAGKRTADGSEFEKRTADGSEFESPKKKAKVE

SEQ ID NO: 6820 - protein, 2094 aa, synthetic construct
MPAAKRVKLDGGDKKYSIGLDIGTNSVGWAVITDEYKVPSKKFKVLGNTDRHSIKKNLIGALLFDSGETAEATRLKRTARRRYTRRKNRICYLQEIFSNEMAKVDDSFFHRLEESFLVEEDKKHERHPIFGNIVDEVAYHEKYPTIYHLRKKLVDSTDKADLRLIYLALAHMIKFRGHFLIEGDLNPDNSDVDKLFIQLVQTYNQLFEENPINASGVDAKAILSARLSKSRRLENLIAQLPGEKKNGLFGNLIALSLGLTPNFKSNFDLAEDAKLQLSKDTYDDDLDNLLAQIGDQYADLFLAAKNLSDAILLSDILRVNTEITKAPLSASMIKRYDEHHQDLTLLKALVRQQLPEKYKEIFFDQSKNGYAGYIDGGASQEEFYKFIKPILEKMDGTEELLVKLNREDLLRKQRTFDNGSIPHQIHLGELHAILRRQEDFYPFLKDNREKIEKILTFRIPYYVGPLARGNSRFAWMTRKSEETITPWNFEEVVDKGASAQSFIERMTNFDKNLPNEKVLPKHSLLYEYFTVYNELTKVKYVTEGMRKPAFLSGEQKKAIVDLLFKTNRKVTVKQLKEDYFKKIECFDSVEISGVEDRFNASLGTYHDLLKIIKDKDFLDNEENEDILEDIVLTLTLFEDREMIEERLKTYAHLFDDKVMKQLKRRRYTGWGRLSRKLINGIRDKQSGKTILDFLKSDGFANRNFMQLIHDDSLTFKEDIQKAQVSGQGDSLHEHIANLAGSPAIKKGILQTVKVVDELVKVMGRHKPENIVIEMARENQTTQKGQKNSRERMKRIEEGIKELGSQILKEHPVENTQLQNEKLYLYYLQNGRDMYVDQELDINRLSDYDVDHIVPQSFLKDDSIDNKVLTRSDKARGKSDNVPSEEVVKKMKNYWRQLLNAKLITQRKFDNLTKAERGGLSELDKAGFIKRQLVETRQITKHVAQILDSRMNTKYDENDKLIREVKVITLKSKLVSDFRKDFQFYKVREINNYHHAHDAYLNAVVGTALIKKYPKLESEFVYGDYKVYDVRKMIAKSEQEIGKATAKYFFYSNIMNFFKTEITLANGEIRKRPLIETNGETGEIVWDKGRDFATVRKVLSMPQVNIVKKTEVQTGGFSKESILPKRNSDKLIARKKDWDPKKYGGFDSPTVAYSVLVVAKVEKGKSKKLKSVKELLGITIMERSSFEKNPIDFLEAKGYKEVKKDLIIKLPKYSLFELENGRKRMLASAGELQKGNELALPSKYVNFLYLASHYEKLKGSPEDNEQKQLFVEQHKHYLDEIIEQISEFSKRVILADANLDKVLSAYNKHRDKPIREQAENIIHLFTLTNLGAPAAFKYFDTTIDRKRYTSTKEVLDATLIHQSITGLYETRIDLSQLGGDGGGGSGSSGGGGGLGIEDEYRLHETSTEPDVSLGSTWLSDFPQAWAETGGMGLAVRQAPLIIPLKATSTPVSIQQYPMSHEARLGIKPHIQRLLDQGILVPCQSPWNTPLLPVKKPGTNDYRPVQDLREVNKRVEDIHPTVPNPYNLLSGLPPSHQWYTVLDLKDAFFCLRLHPTSQPLFAFEWRDPGMGISGQLTWTRLPQGFKNSPTLFNEALHRDLADFRIQHPDLILLQYVDDILLAATSELDCQQGTRALLQTLGDLGYRASAKKAQICQKQVKYLGYLLREGQRWLTEARKETVMGQPVPKTPRQLREFLGKAGFCRLFIPGFAEMAAPLYPLTKPGTLFSWGPDQQKAYQEIKQALLTAPALGLPDLTKPFELFVDEKQGYAKGVLTQKLGPWRRPVAYLSKKLDPVAAGWPPCLRMVAAIAVLTKDAGKLTMGQPLVILAPHAVEALVKQPPDRWLSNARMTHYQAMLLDTDRVQFGPVVALNPATLLPLPEEGAPHDCLEILAETHGTRPDLTDQPIPDADHTWYTDGSSFLQEGQRKAGAAVTTETEVIWAGALPAGTSAQRAELIALTQALKMAEGKRLNVYTDSRYAFATAHIHGEIYRRRGWLTSEGREIKNKSEILALLKALFLPKRLSIIHCLGHQKGDSAEARGNRLADQAAREAAIKTPPDTSTLLIAGKRTADGSEFEKRTADGSEFESPKKKAKVE

SEQ ID NO: 6821 - protein, 2174 aa, synthetic construct
MPAAKRVKLDGGDKKYSIGLDIGTNSVGWAVITDEYKVPSKKFKVLGNTDRHSIKKNLIGALLFDSGETAEATRLKRTARRRYTRRKNRICYLQEIFSNEMAKVDDSFFHRLEESFLVEEDKKHERHPIFGNIVDEVAYHEKYPTIYHLRKKLVDSTDKADLRLIYLALAHMIKFRGHFLIEGDLNPDNSDVDKLFIQLVQTYNQLFEENPINASGVDAKAILSARLSKSRRLENLIAQLPGEKKNGLFGNLIALSLGLTPNFKSNFDLAEDAKLQLSKDTYDDDLDNLLAQIGDQYADLFLAAKNLSDAILLSDILRVNTEITKAPLSASMIKRYDEHHQDLTLLKALVRQQLPEKYKEIFFDQSKNGYAGYIDGGASQEEFYKFIKPILEKMDGTEELLVKLNREDLLRKQRTFDNGSIPHQIHLGELHAILRRQEDFYPFLKDNREKIEKILTFRIPYYVGPLARGNSRFAWMTRKSEETITPWNFEEVVDKGASAQSFIERMTNFDKNLPNEKVLPKHSLLYEYFTVYNELTKVKYVTEGMRKPAFLSGEQKKAIVDLLFKTNRKVTVKQLKEDYFKKIECFDSVEISGVEDRFNASLGTYHDLLKIIKDKDFLDNEENEDILEDIVLTLTLFEDREMIEERLKTYAHLFDDKVMKQLKRRRYTGWGRLSRKLINGIRDKQSGKTILDFLKSDGFANRNFMQLIHDDSLTFKEDIQKAQVSGQGDSLHEHIANLAGSPAIKKGILQTVKVVDELVKVMGRHKPENIVIEMARENQTTQKGQKNSRERMKRIEEGIKELGSQILKEHPVENTQLQNEKLYLYYLQNGRDMYVDQELDINRLSDYDVDHIVPQSFLKDDSIDNKVLTRSDKARGKSDNVPSEEVVKKMKNYWRQLLNAKLITQRKFDNLTKAERGGLSELDKAGFIKRQLVETRQITKHVAQILDSRMNTKYDENDKLIREVKVITLKSKLVSDFRKDFQFYKVREINNYHHAHDAYLNAVVGTALIKKYPKLESEFVYGDYKVYDVRKMIAKSEQEIGKATAKYFFYSNIMNFFKTEITLANGEIRKRPLIETNGETGEIVWDKGRDFATVRKVLSMPQVNIVKKTEVQTGGFSKESILPKRNSDKLIARKKDWDPKKYGGFDSPTVAYSVLVVAKVEKGKSKKLKSVKELLGITIMERSSFEKNPIDFLEAKGYKEVKKDLIIKLPKYSLFELENGRKRMLASAGELQKGNELALPSKYVNFLYLASHYEKLKGSPEDNEQKQLFVEQHKHYLDEIIEQISEFSKRVILADANLDKVLSAYNKHRDKPIREQAENIIHLFTLTNLGAPAAFKYFDTTIDRKRYTSTKEVLDATLIHQSITGLYETRIDLSQLGGDGGGGSGSSGGGGGMDPLQLLQPLEAEIKGTKLKAHWNSGATITCVPEAFLEDERPIQTMLIKTIHGEKQQDVYYLTFKVQGRKVEAEVLASPYDYILLNPSDVPWLMKKPLQLTVLVPLHEYQERLLQQTALPKEQKELLQKLFLKYDALWQHWENQVGHRRIKPHNIATGTLAPRPQKQYPINPKAKPSIQIVIDDLLKQGVLIQQNSTMNTPVYPVPKPDGKWRMVLDYREVNKTIPLIAAQNQHSAGILSSIYRGKYKTTLDLTNGFWAHPITPESYWLTAFTWQGKQYCWTRLPQGFLNSPALFNADVVDLLKEIPNVQAYVDDIYISHDDPQEHLEQLEKIFSILLNAGYVVSLKKSEIAQREVEFLGFNITKEGRGLTDTFKQKLLNITPPKDLKQLQSILGLLNFARNFIPNYSELVKPLYTIVAPANGKFISWTEDNSNQLQHIISVLNQADNLEERNPETRLIIKVNSSPSAGYIRYYNEGSKRPIMYVNYIFSKAEAKFTQTEKLLTTMHKGLIKAMDLAMGQEILVYSPIVSMTKIQRTPLPERKALPVRWITWMTYLEDPRIQFHYDKSLPELQQIPNVTEDVIAKTKHPSEFAMVFYTDGSAIKHPDVNKSHSAGMGIAQVQFIPEYKIVHQWSIPLGDHTAQLAEIAAVEFACKKALKISGPVLIVTDSFYVAESANKELPYWKSNGFLNNKKKPLRHVSKWKSIAECLQLKPDIIIMHEKGHQQPMTTLHTEGNNLADKLATQGSYVVHAGKRTADGSEFEKRTADGSEFESPKKKAKVE

SEQ ID NO: 6822 - protein, 2096 aa, synthetic construct
MPAAKRVKLDGGDKKYSIGLDIGTNSVGWAVITDEYKVPSKKFKVLGNTDRHSIKKNLIGALLFDSGETAEATRLKRTARRRYTRRKNRICYLQEIFSNEMAKVDDSFFHRLEESFLVEEDKKHERHPIFGNIVDEVAYHEKYPTIYHLRKKLVDSTDKADLRLIYLALAHMIKFRGHFLIEGDLNPDNSDVDKLFIQLVQTYNQLFEENPINASGVDAKAILSARLSKSRRLENLIAQLPGEKKNGLFGNLIALSLGLTPNFKSNFDLAEDAKLQLSKDTYDDDLDNLLAQIGDQYADLFLAAKNLSDAILLSDILRVNTEITKAPLSASMIKRYDEHHQDLTLLKALVRQQLPEKYKEIFFDQSKNGYAGYIDGGASQEEFYKFIKPILEKMDGTEELLVKLNREDLLRKQRTFDNGSIPHQIHLGELHAILRRQEDFYPFLKDNREKIEKILTFRIPYYVGPLARGNSRFAWMTRKSEETITPWNFEEVVDKGASAQSFIERMTNFDKNLPNEKVLPKHSLLYEYFTVYNELTKVKYVTEGMRKPAFLSGEQKKAIVDLLFKTNRKVTVKQLKEDYFKKIECFDSVEISGVEDRFNASLGTYHDLLKIIKDKDFLDNEENEDILEDIVLTLTLFEDREMIEERLKTYAHLFDDKVMKQLKRRRYTGWGRLSRKLINGIRDKQSGKTILDFLKSDGFANRNFMQLIHDDSLTFKEDIQKAQVSGQGDSLHEHIANLAGSPAIKKGILQTVKVVDELVKVMGRHKPENIVIEMARENQTTQKGQKNSRERMKRIEEGIKELGSQILKEHPVENTQLQNEKLYLYYLQNGRDMYVDQELDINRLSDYDVDHIVPQSFLKDDSIDNKVLTRSDKARGKSDNVPSEEVVKKMKNYWRQLLNAKLITQRKFDNLTKAERGGLSELDKAGFIKRQLVETRQITKHVAQILDSRMNTKYDENDKLIREVKVITLKSKLVSDFRKDFQFYKVREINNYHHAHDAYLNAVVGTALIKKYPKLESEFVYGDYKVYDVRKMIAKSEQEIGKATAKYFFYSNIMNFFKTEITLANGEIRKRPLIETNGETGEIVWDKGRDFATVRKVLSMPQVNIVKKTEVQTGGFSKESILPKRNSDKLIARKKDWDPKKYGGFDSPTVAYSVLVVAKVEKGKSKKLKSVKELLGITIMERSSFEKNPIDFLEAKGYKEVKKDLIIKLPKYSLFELENGRKRMLASAGELQKGNELALPSKYVNFLYLASHYEKLKGSPEDNEQKQLFVEQHKHYLDEIIEQISEFSKRVILADANLDKVLSAYNKHRDKPIREQAENIIHLFTLTNLGAPAAFKYFDTTIDRKRYTSTKEVLDATLIHQSITGLYETRIDLSQLGGDGGGGGGGSGSSGGTAPLEEEYRLFLEAPIQNVTLLEQWKREIPKVWAEINPPGLASTQAPIHVQLLSTALPVRVRQYPITLEAKRSLRETIRKFRAAGILRPVHSPWNTPLLPVRKSGTSEYRMVQDLREVNKRVETIHPTVPNPYTLLSLLPPDRIWYSVLDLKDAFFCIPLAPESQLIFAFEWADAEEGESGQLTWTRLPQGFKNSPTLFDEALNRDLQGFRLDHPSVSLLQYVDDLLIAADTQAACLSATRDLLMTLAELGYRVSGKKAQLCQEEVTYLGFKIHKGSRSLSNSRTQAILQIPVPKTKRQVREFLGTIGYCRLWIPGFAELAQPLYAATRGGNDPLVWGEKEEEAFQSLKLALTQPPALALPSLDKPFQLFVEETSGAAKGVLTQALGPWKRPVAYLSKRLDPVAAGWPRCLRAIAAAALLTREASKLTFGQDIEITSSHNLESLLRSPPDKWLTNARITQYQVLLLDPPRVRFKQTAALNPATLLPETDDTLPIHHCLDTLDSLTSTRPDLTDQPLAQAEATLFTDGSSYIRDGKRYAGAAVVTLDSVIWAEPLPIGTSAQKAELIALTKALEWSKDKSVNIYTDSRYAFATLHVHGMIYRERGLLTAGGKAIKNAPEILALLTAVWLPKRVAVMHCKGHQKDDAPTSTGNRRADEVAREVAIRPLSTQATISAGKRTADGSEFEKRTADGSEFESPKKKAKVE

SEQ ID NO: 6823 - protein, 2096 aa, synthetic construct
MPAAKRVKLDGGDKKYSIGLDIGTNSVGWAVITDEYKVPSKKFKVLGNTDRHSIKKNLIGALLFDSGETAEATRLKRTARRRYTRRKNRICYLQEIFSNEMAKVDDSFFHRLEESFLVEEDKKHERHPIFGNIVDEVAYHEKYPTIYHLRKKLVDSTDKADLRLIYLALAHMIKFRGHFLIEGDLNPDNSDVDKLFIQLVQTYNQLFEENPINASGVDAKAILSARLSKSRRLENLIAQLPGEKKNGLFGNLIALSLGLTPNFKSNFDLAEDAKLQLSKDTYDDDLDNLLAQIGDQYADLFLAAKNLSDAILLSDILRVNTEITKAPLSASMIKRYDEHHQDLTLLKALVRQQLPEKYKEIFFDQSKNGYAGYIDGGASQEEFYKFIKPILEKMDGTEELLVKLNREDLLRKQRTFDNGSIPHQIHLGELHAILRRQEDFYPFLKDNREKIEKILTFRIPYYVGPLARGNSRFAWMTRKSEETITPWNFEEVVDKGASAQSFIERMTNFDKNLPNEKVLPKHSLLYEYFTVYNELTKVKYVTEGMRKPAFLSGEQKKAIVDLLFKTNRKVTVKQLKEDYFKKIECFDSVEISGVEDRFNASLGTYHDLLKIIKDKDFLDNEENEDILEDIVLTLTLFEDREMIEERLKTYAHLFDDKVMKQLKRRRYTGWGRLSRKLINGIRDKQSGKTILDFLKSDGFANRNFMQLIHDDSLTFKEDIQKAQVSGQGDSLHEHIANLAGSPAIKKGILQTVKVVDELVKVMGRHKPENIVIEMARENQTTQKGQKNSRERMKRIEEGIKELGSQILKEHPVENTQLQNEKLYLYYLQNGRDMYVDQELDINRLSDYDVDHIVPQSFLKDDSIDNKVLTRSDKARGKSDNVPSEEVVKKMKNYWRQLLNAKLITQRKFDNLTKAERGGLSELDKAGFIKRQLVETRQITKHVAQILDSRMNTKYDENDKLIREVKVITLKSKLVSDFRKDFQFYKVREINNYHHAHDAYLNAVVGTALIKKYPKLESEFVYGDYKVYDVRKMIAKSEQEIGKATAKYFFYSNIMNFFKTEITLANGEIRKRPLIETNGETGEIVWDKGRDFATVRKVLSMPQVNIVKKTEVQTGGFSKESILPKRNSDKLIARKKDWDPKKYGGFDSPTVAYSVLVVAKVEKGKSKKLKSVKELLGITIMERSSFEKNPIDFLEAKGYKEVKKDLIIKLPKYSLFELENGRKRMLASAGELQKGNELALPSKYVNFLYLASHYEKLKGSPEDNEQKQLFVEQHKHYLDEIIEQISEFSKRVILADANLDKVLSAYNKHRDKPIREQAENIIHLFTLTNLGAPAAFKYFDTTIDRKRYTSTKEVLDATLIHQSITGLYETRIDLSQLGGDGGGGGGGSGSSGGTAPLEEEYRLFLEAPIQNVTLLEQWKREIPKVWAEINPPGLASTQAPIHVQLLSTALPVRVRQYPITLEAKRSLRETIRKFRAAGILRPVHSPWNTPLLPVRKSGTSEYRMVQDLREVNKRVETIHPTVPNPYTLLSLLPPDRIWYSVLDLKDAFFCIPLAPESQLIFAFEWADAEEGESGQLTWTRLPQGFKNSPTLFNEALNRDLQGFRLDHPSVSLLQYVDDLLIAADTQAACLSATRDLLMTLAELGYRVSGKKAQLCQEEVTYLGFKIHKGSRSLSNSRTQAILQIPVPKTKRQVREFLGTIGYCRLWIPGFAELAQPLYAATRPGNDPLVWGEKEEEAFQSLKLALTQPPALALPSLDKPFQLFVEETSGAAKGVLTQALGPWKRPVAYLSKRLDPVAAGWPRCLRAIAAAALLTREASKLTFGQDIEITSSHNLESLLRSPPDKWLTNARITQYQVLLLDPPRVRFKQTAALNPATLLPETDDTLPIHHCLDTLDSLTSTRPDLTDQPLAQAEATLFTDGSSYIRDGKRYAGAAVVTLDSVIWAEPLPIGTSAQKAELIALTKALEWSKDKSVNIYTDSRYAFATLHVHGMIYRERGWLTAGGKAIKNAPEILALLTAVWLPKRVAVMHCKGHQKDDAPTSTGNRRADEVAREVAIRPLSTQATISAGKRTADGSEFEKRTADGSEFESPKKKAKVE

SEQ ID NO: 6824 - protein, 2096 aa, synthetic construct
MPAAKRVKLDGGDKKYSIGLDIGTNSVGWAVITDEYKVPSKKFKVLGNTDRHSIKKNLIGALLFDSGETAEATRLKRTARRRYTRRKNRICYLQEIFSNEMAKVDDSFFHRLEESFLVEEDKKHERHPIFGNIVDEVAYHEKYPTIYHLRKKLVDSTDKADLRLIYLALAHMIKFRGHFLIEGDLNPDNSDVDKLFIQLVQTYNQLFEENPINASGVDAKAILSARLSKSRRLENLIAQLPGEKKNGLFGNLIALSLGLTPNFKSNFDLAEDAKLQLSKDTYDDDLDNLLAQIGDQYADLFLAAKNLSDAILLSDILRVNTEITKAPLSASMIKRYDEHHQDLTLLKALVRQQLPEKYKEIFFDQSKNGYAGYIDGGASQEEFYKFIKPILEKMDGTEELLVKLNREDLLRKQRTFDNGSIPHQIHLGELHAILRRQEDFYPFLKDNREKIEKILTFRIPYYVGPLARGNSRFAWMTRKSEETITPWNFEEVVDKGASAQSFIERMTNFDKNLPNEKVLPKHSLLYEYFTVYNELTKVKYVTEGMRKPAFLSGEQKKAIVDLLFKTNRKVTVKQLKEDYFKKIECFDSVEISGVEDRFNASLGTYHDLLKIIKDKDFLDNEENEDILEDIVLTLTLFEDREMIEERLKTYAHLFDDKVMKQLKRRRYTGWGRLSRKLINGIRDKQSGKTILDFLKSDGFANRNFMQLIHDDSLTFKEDIQKAQVSGQGDSLHEHIANLAGSPAIKKGILQTVKVVDELVKVMGRHKPENIVIEMARENQTTQKGQKNSRERMKRIEEGIKELGSQILKEHPVENTQLQNEKLYLYYLQNGRDMYVDQELDINRLSDYDVDHIVPQSFLKDDSIDNKVLTRSDKARGKSDNVPSEEVVKKMKNYWRQLLNAKLITQRKFDNLTKAERGGLSELDKAGFIKRQLVETRQITKHVAQILDSRMNTKYDENDKLIREVKVITLKSKLVSDFRKDFQFYKVREINNYHHAHDAYLNAVVGTALIKKYPKLESEFVYGDYKVYDVRKMIAKSEQEIGKATAKYFFYSNIMNFFKTEITLANGEIRKRPLIETNGETGEIVWDKGRDFATVRKVLSMPQVNIVKKTEVQTGGFSKESILPKRNSDKLIARKKDWDPKKYGGFDSPTVAYSVLVVAKVEKGKSKKLKSVKELLGITIMERSSFEKNPIDFLEAKGYKEVKKDLIIKLPKYSLFELENGRKRMLASAGELQKGNELALPSKYVNFLYLASHYEKLKGSPEDNEQKQLFVEQHKHYLDEIIEQISEFSKRVILADANLDKVLSAYNKHRDKPIREQAENIIHLFTLTNLGAPAAFKYFDTTIDRKRYTSTKEVLDATLIHQSITGLYETRIDLSQLGGDGGGGGGGSGSSGGTAPLEEEYRLFLEAPIQNVTLLEQWKREIPKVWAEINPPGLASTQAPIHVQLLSTALPVRVRQYPITLEAKRSLRETIRKFRAAGILRPVHSPWNTPLLPVRKSGTSEYRMVQDLREVNKRVETIHPTVPNPYTLLSLLPPDRIWYSVLDLKDAFFCIPLAPESQLIFAFEWADAEEGESGQLTWTRLPQGFKNSPTLFNEALNRDLQGFRLDHPSVSLLQYVDDLLIAADTQAACLSATRDLLMTLAELGYRVSGKKAQLCQEEVTYLGFKIHKGSRSLSNSRTQAILQIPVPKTKRQVREFLGKIGYCRLFIPGFAELAQPLYAATRPGNDPLVWGEKEEEAFQSLKLALTQPPALALPSLDKPFQLFVEETSGAAKGVLTQALGPWKRPVAYLSKRLDPVAAGWPRCLRAIAAAALLTREASKLTFGQDIEITSSHNLESLLRSPPDKWLTNARITQYQVLLLDPPRVRFKQTAALNPATLLPETDDTLPIHHCLDTLDSLTSTRPDLTDQPLAQAEATLFTDGSSYIRDGKRYAGAAVVTLDSVIWAEPLPIGTSAQKAELIALTKALEWSKDKSVNIYTDSRYAFATLHVHGMIYRERGWLTAGGKAIKNAPEILALLTAVWLPKRVAVMHCKGHQKDDAPTSTGNRRADEVAREVAIRPLSTQATISAGKRTADGSEFEKRTADGSEFESPKKKAKVE

SEQ ID NO: 6825 - protein, 2100 aa, synthetic construct
MPAAKRVKLDGGDKKYSIGLDIGTNSVGWAVITDEYKVPSKKFKVLGNTDRHSIKKNLIGALLFDSGETAEATRLKRTARRRYTRRKNRICYLQEIFSNEMAKVDDSFFHRLEESFLVEEDKKHERHPIFGNIVDEVAYHEKYPTIYHLRKKLVDSTDKADLRLIYLALAHMIKFRGHFLIEGDLNPDNSDVDKLFIQLVQTYNQLFEENPINASGVDAKAILSARLSKSRRLENLIAQLPGEKKNGLFGNLIALSLGLTPNFKSNFDLAEDAKLQLSKDTYDDDLDNLLAQIGDQYADLFLAAKNLSDAILLSDILRVNTEITKAPLSASMIKRYDEHHQDLTLLKALVRQQLPEKYKEIFFDQSKNGYAGYIDGGASQEEFYKFIKPILEKMDGTEELLVKLNREDLLRKQRTFDNGSIPHQIHLGELHAILRRQEDFYPFLKDNREKIEKILTFRIPYYVGPLARGNSRFAWMTRKSEETITPWNFEEVVDKGASAQSFIERMTNFDKNLPNEKVLPKHSLLYEYFTVYNELTKVKYVTEGMRKPAFLSGEQKKAIVDLLFKTNRKVTVKQLKEDYFKKIECFDSVEISGVEDRFNASLGTYHDLLKIIKDKDFLDNEENEDILEDIVLTLTLFEDREMIEERLKTYAHLFDDKVMKQLKRRRYTGWGRLSRKLINGIRDKQSGKTILDFLKSDGFANRNFMQLIHDDSLTFKEDIQKAQVSGQGDSLHEHIANLAGSPAIKKGILQTVKVVDELVKVMGRHKPENIVIEMARENQTTQKGQKNSRERMKRIEEGIKELGSQILKEHPVENTQLQNEKLYLYYLQNGRDMYVDQELDINRLSDYDVDHIVPQSFLKDDSIDNKVLTRSDKARGKSDNVPSEEVVKKMKNYWRQLLNAKLITQRKFDNLTKAERGGLSELDKAGFIKRQLVETRQITKHVAQILDSRMNTKYDENDKLIREVKVITLKSKLVSDFRKDFQFYKVREINNYHHAHDAYLNAVVGTALIKKYPKLESEFVYGDYKVYDVRKMIAKSEQEIGKATAKYFFYSNIMNFFKTEITLANGEIRKRPLIETNGETGEIVWDKGRDFATVRKVLSMPQVNIVKKTEVQTGGFSKESILPKRNSDKLIARKKDWDPKKYGGFDSPTVAYSVLVVAKVEKGKSKKLKSVKELLGITIMERSSFEKNPIDFLEAKGYKEVKKDLIIKLPKYSLFELENGRKRMLASAGELQKGNELALPSKYVNFLYLASHYEKLKGSPEDNEQKQLFVEQHKHYLDEIIEQISEFSKRVILADANLDKVLSAYNKHRDKPIREQAENIIHLFTLTNLGAPAAFKYFDTTIDRKRYTSTKEVLDATLIHQSITGLYETRIDLSQLGGDGGGGGGGSGSSGGTVSLQDEHRLFDIPVTTSLPDVWLQDFPQAWAETGGLGRAKCQAPIIIDLKPTAVPVSIKQYPMSLEAHMGIRQHIIKFLELGVLRPCRSPWNTPLLPVKKPGTQDYRPVQDLREINKRTVDIHPTVPNPYNLLSTLKPDYSWYTVLDLKDAFFCLPLAPQSQELFAFEWKDPERGISGQLTWTRLPQGFKNSPTLFNEALHRDLTDFRTQHPEVTLLQYVDDLLLAAPTKKACTQGTRHLLQELGEKGYRASAKKAQICQTKVTYLGYILSEGKRWLTPGRIETVARIPPPRNPREVREFLGTAGFCRLWIPGFAELAAPLYALTKPSTPFTWQTEHQLAFEALKKALLSAPALGLPDTSKPFTLFLDERQGIAKGVLTQKLGPWKRPVAYLSKKLDPVAAGWPPCLRIMAATAMLVKDSAKLTLGQPLTVITPHTLEAIVRQPPDRWITNARLTHYQALLLDTDRVQFGPPVTLNPATLLPVPENQPSPHDCRQVLAETHGTREDLKDQELPDADHTWYTDGSSYLDSGTRRAGAAVVDGHNTIWAQSLPPGTSAQKAELIALTKALELSKGKKANIYTDSRYAFATAHTHGSIYERRGWLTSEGKEIKNKAEIIALLKALFLPQEVAIIHCPGHQKGQDPVAVGNRQADRVARQAAMAEVLTLATEPDNTSHITAGKRTADGSEFEKRTADGSEFESPKKKAKVE

SEQ ID NO: 6826 - protein, 2093 aa, synthetic construct
MPAAKRVKLDGGDKKYSIGLDIGTNSVGWAVITDEYKVPSKKFKVLGNTDRHSIKKNLIGALLFDSGETAEATRLKRTARRRYTRRKNRICYLQEIFSNEMAKVDDSFFHRLEESFLVEEDKKHERHPIFGNIVDEVAYHEKYPTIYHLRKKLVDSTDKADLRLIYLALAHMIKFRGHFLIEGDLNPDNSDVDKLFIQLVQTYNQLFEENPINASGVDAKAILSARLSKSRRLENLIAQLPGEKKNGLFGNLIALSLGLTPNFKSNFDLAEDAKLQLSKDTYDDDLDNLLAQIGDQYADLFLAAKNLSDAILLSDILRVNTEITKAPLSASMIKRYDEHHQDLTLLKALVRQQLPEKYKEIFFDQSKNGYAGYIDGGASQEEFYKFIKPILEKMDGTEELLVKLNREDLLRKQRTFDNGSIPHQIHLGELHAILRRQEDFYPFLKDNREKIEKILTFRIPYYVGPLARGNSRFAWMTRKSEETITPWNFEEVVDKGASAQSFIERMTNFDKNLPNEKVLPKHSLLYEYFTVYNELTKVKYVTEGMRKPAFLSGEQKKAIVDLLFKTNRKVTVKQLKEDYFKKIECFDSVEISGVEDRFNASLGTYHDLLKIIKDKDFLDNEENEDILEDIVLTLTLFEDREMIEERLKTYAHLFDDKVMKQLKRRRYTGWGRLSRKLINGIRDKQSGKTILDFLKSDGFANRNFMQLIHDDSLTFKEDIQKAQVSGQGDSLHEHIANLAGSPAIKKGILQTVKVVDELVKVMGRHKPENIVIEMARENQTTQKGQKNSRERMKRIEEGIKELGSQILKEHPVENTQLQNEKLYLYYLQNGRDMYVDQELDINRLSDYDVDHIVPQSFLKDDSIDNKVLTRSDKARGKSDNVPSEEVVKKMKNYWRQLLNAKLITQRKFDNLTKAERGGLSELDKAGFIKRQLVETRQITKHVAQILDSRMNTKYDENDKLIREVKVITLKSKLVSDFRKDFQFYKVREINNYHHAHDAYLNAVVGTALIKKYPKLESEFVYGDYKVYDVRKMIAKSEQEIGKATAKYFFYSNIMNFFKTEITLANGEIRKRPLIETNGETGEIVWDKGRDFATVRKVLSMPQVNIVKKTEVQTGGFSKESILPKRNSDKLIARKKDWDPKKYGGFDSPTVAYSVLVVAKVEKGKSKKLKSVKELLGITIMERSSFEKNPIDFLEAKGYKEVKKDLIIKLPKYSLFELENGRKRMLASAGELQKGNELALPSKYVNFLYLASHYEKLKGSPEDNEQKQLFVEQHKHYLDEIIEQISEFSKRVILADANLDKVLSAYNKHRDKPIREQAENIIHLFTLTNLGAPAAFKYFDTTIDRKRYTSTKEVLDATLIHQSITGLYETRIDLSQLGGDGGGGGGGSGSSGGTLQLEEEYRLFEPESTQKQEMDIWLKNFPQAWAETGGMGTAHCQAPVLIQLKATATPISIRQYPMPHEAYQGIKPHIRRMLDQGILKPCQSPWNTPLLPVKKPGTEDYRPVQDLREVNKRVEDIHPTVPNPYNLLSTLPPSHPWYTVLDLKDAFFCLRLHSESQLLFAFEWRDPEIGLSGQLTWTRLPQGFKNSPTLFNEALHSDLADFRVRYPALVLLQYVDDLLLAAATRTECLEGTKALLETLGNKGYRASAKKAQICLQEVTYLGYSLKDGQRWLTKARKEAILSIPVPKNSRQVREFLGKAGYCRLFIPGFAELAAPLYPLTRPGTLFQWGTEQQLAFEDIKKALLSSPALGLPDITKPFELFIDENSGFAKGVLVQKLGPWKRPVAYLSKKLDTVASGWPPCLRMVAAIAILVKDAGKLTLGQPLTILTSHPVEALVRQPPNKWLSNARMTHYQAMLLDAERVHFGPTVSLNPATLLPLPSGGNHHDCLQILAETHGTRPDLTDQPLPDADLTWYTDGSSFIRNGEREAGAAVTTESEVIWAAPLPPGTSAQRAELIALTQALKMAEGKKLTVYTDSRYAFATTHVHGEIYRRRGWLTSEGKEIKNKNEILALLEALFLPKRLSIIHCPGHQKGDSPQAKGNRLADDTAKKAATETHSSLTVLPAGKRTADGSEFEKRTADGSEFESPKKKAKVE

SEQ ID NO: 6827 - protein, 2174 aa, synthetic construct
MPAAKRVKLDGGDKKYSIGLDIGTNSVGWAVITDEYKVPSKKFKVLGNTDRHSIKKNLIGALLFDSGETAEATRLKRTARRRYTRRKNRICYLQEIFSNEMAKVDDSFFHRLEESFLVEEDKKHERHPIFGNIVDEVAYHEKYPTIYHLRKKLVDSTDKADLRLIYLALAHMIKFRGHFLIEGDLNPDNSDVDKLFIQLVQTYNQLFEENPINASGVDAKAILSARLSKSRRLENLIAQLPGEKKNGLFGNLIALSLGLTPNFKSNFDLAEDAKLQLSKDTYDDDLDNLLAQIGDQYADLFLAAKNLSDAILLSDILRVNTEITKAPLSASMIKRYDEHHQDLTLLKALVRQQLPEKYKEIFFDQSKNGYAGYIDGGASQEEFYKFIKPILEKMDGTEELLVKLNREDLLRKQRTFDNGSIPHQIHLGELHAILRRQEDFYPFLKDNREKIEKILTFRIPYYVGPLARGNSRFAWMTRKSEETITPWNFEEVVDKGASAQSFIERMTNFDKNLPNEKVLPKHSLLYEYFTVYNELTKVKYVTEGMRKPAFLSGEQKKAIVDLLFKTNRKVTVKQLKEDYFKKIECFDSVEISGVEDRFNASLGTYHDLLKIIKDKDFLDNEENEDILEDIVLTLTLFEDREMIEERLKTYAHLFDDKVMKQLKRRRYTGWGRLSRKLINGIRDKQSGKTILDFLKSDGFANRNFMQLIHDDSLTFKEDIQKAQVSGQGDSLHEHIANLAGSPAIKKGILQTVKVVDELVKVMGRHKPENIVIEMARENQTTQKGQKNSRERMKRIEEGIKELGSQILKEHPVENTQLQNEKLYLYYLQNGRDMYVDQELDINRLSDYDVDHIVPQSFLKDDSIDNKVLTRSDKARGKSDNVPSEEVVKKMKNYWRQLLNAKLITQRKFDNLTKAERGGLSELDKAGFIKRQLVETRQITKHVAQILDSRMNTKYDENDKLIREVKVITLKSKLVSDFRKDFQFYKVREINNYHHAHDAYLNAVVGTALIKKYPKLESEFVYGDYKVYDVRKMIAKSEQEIGKATAKYFFYSNIMNFFKTEITLANGEIRKRPLIETNGETGEIVWDKGRDFATVRKVLSMPQVNIVKKTEVQTGGFSKESILPKRNSDKLIARKKDWDPKKYGGFDSPTVAYSVLVVAKVEKGKSKKLKSVKELLGITIMERSSFEKNPIDFLEAKGYKEVKKDLIIKLPKYSLFELENGRKRMLASAGELQKGNELALPSKYVNFLYLASHYEKLKGSPEDNEQKQLFVEQHKHYLDEIIEQISEFSKRVILADANLDKVLSAYNKHRDKPIREQAENIIHLFTLTNLGAPAAFKYFDTTIDRKRYTSTKEVLDATLIHQSITGLYETRIDLSQLGGDGGGGGGGSGSSGGMNPLQLLQPLPAEIKGTKLLAHWNSGATITCIPESFLEDEQPIKKTLIKTIHGEKQQNVYYVTFKVKGRKVEAEVIASPYEYILLSPTDVPWLTQQPLQLTILVPLQEYQEKILSKTALPEDQKQQLKTLFVKYDNLWQHWENQVGHRKIRPHNIATGDYPPRPQKQYPINPKAKPSIQIVIDDLLKQGVLTPQNSTMNTPVYPVPKPDGRWRMVLDYREVNKTIPLTAAQNQHSAGILATIVRQKYKTTLDLANGFWAHPITPESYWLTAFTWQGKQYCWTRLPQGFLNSPALFNADVVDLLKEIPNVQVYVDDIYLSHDDPKEHVQQLEKVFQILLQAGYVVSLKKSEIGQKTVEFLGFNITKEGRGLTDTFKTKLLNITPPKDLKQLQSILGKLNFARNFIPNFAELVQPLYNLIAPAKGKYIEWSEENTKQLNMVIEALNTASNLEERLPEQRLVIKVNTSPSAGYVRYYNETGKKPIMYLNYVFSKAELKFSMLEKLLTTMHKALIKAMDLAMGQEILVYSPIVSMTKIQKTPLPERKALPIRWITWMTYLEDPRIQFHYDKTLPELKHIPDVYTSSQSPVKHPSQYEGVFYTDGSAIKSPDPTKSNNAGMGIVHATYKPEYQVLNQWSIPLGNHTAQMAEIAAVEFACKKALKIPGPVLVITDSFYVAESANKELPYWKSNGFVNNKKKPLKHISKWKSIAECLSMKPDITIQHEKGISLQIPVFILKGNALADKLATQGSYVVNAGKRTADGSEFEKRTADGSEFESPKKKAKVE

SEQ ID NO: 6828 - protein, 2125 aa, synthetic construct
MPAAKRVKLDGGDKKYSIGLDIGTNSVGWAVITDEYKVPSKKFKVLGNTDRHSIKKNLIGALLFDSGETAEATRLKRTARRRYTRRKNRICYLQEIFSNEMAKVDDSFFHRLEESFLVEEDKKHERHPIFGNIVDEVAYHEKYPTIYHLRKKLVDSTDKADLRLIYLALAHMIKFRGHFLIEGDLNPDNSDVDKLFIQLVQTYNQLFEENPINASGVDAKAILSARLSKSRRLENLIAQLPGEKKNGLFGNLIALSLGLTPNFKSNFDLAEDAKLQLSKDTYDDDLDNLLAQIGDQYADLFLAAKNLSDAILLSDILRVNTEITKAPLSASMIKRYDEHHQDLTLLKALVRQQLPEKYKEIFFDQSKNGYAGYIDGGASQEEFYKFIKPILEKMDGTEELLVKLNREDLLRKQRTFDNGSIPHQIHLGELHAILRRQEDFYPFLKDNREKIEKILTFRIPYYVGPLARGNSRFAWMTRKSEETITPWNFEEVVDKGASAQSFIERMTNFDKNLPNEKVLPKHSLLYEYFTVYNELTKVKYVTEGMRKPAFLSGEQKKAIVDLLFKTNRKVTVKQLKEDYFKKIECFDSVEISGVEDRFNASLGTYHDLLKIIKDKDFLDNEENEDILEDIVLTLTLFEDREMIEERLKTYAHLFDDKVMKQLKRRRYTGWGRLSRKLINGIRDKQSGKTILDFLKSDGFANRNFMQLIHDDSLTFKEDIQKAQVSGQGDSLHEHIANLAGSPAIKKGILQTVKVVDELVKVMGRHKPENIVIEMARENQTTQKGQKNSRERMKRIEEGIKELGSQILKEHPVENTQLQNEKLYLYYLQNGRDMYVDQELDINRLSDYDVDHIVPQSFLKDDSIDNKVLTRSDKARGKSDNVPSEEVVKKMKNYWRQLLNAKLITQRKFDNLTKAERGGLSELDKAGFIKRQLVETRQITKHVAQILDSRMNTKYDENDKLIREVKVITLKSKLVSDFRKDFQFYKVREINNYHHAHDAYLNAVVGTALIKKYPKLESEFVYGDYKVYDVRKMIAKSEQEIGKATAKYFFYSNIMNFFKTEITLANGEIRKRPLIETNGETGEIVWDKGRDFATVRKVLSMPQVNIVKKTEVQTGGFSKESILPKRNSDKLIARKKDWDPKKYGGFDSPTVAYSVLVVAKVEKGKSKKLKSVKELLGITIMERSSFEKNPIDFLEAKGYKEVKKDLIIKLPKYSLFELENGRKRMLASAGELQKGNELALPSKYVNFLYLASHYEKLKGSPEDNEQKQLFVEQHKHYLDEIIEQISEFSKRVILADANLDKVLSAYNKHRDKPIREQAENIIHLFTLTNLGAPAAFKYFDTTIDRKRYTSTKEVLDATLIHQSITGLYETRIDLSQLGGDGGGGGGGSGSSGGLLGRDLLTKLKAQIQFSTEGPQVTWEDRPAMCLVLNLEEEYRLHEKPVPPSIDPSWLQLFPMVWAEKAGMGLANQVPPVVVELKSDASPVAVRQYPMSKEAREGIRPHIQRFLDLGILVPCQSPWNTPLLPVKKPGTNDYRPVQDLREVNKRVQDIHPTVPNPYNLLSSLPPSHTWYSVLDLKDAFFCLKLHPNSQPLFAFEWRDPEKGNTGQLTWTRLPQGFKNSPTLFNEALHRDLASFRALNPQVVMLQYVDDLLVAAPTYRDCKEGTRRLLQELSKLGYRVSAKKAQLCREEVTYLGYLLKGGKRWLTPARKATVMKIPTPTTPRQVREFLGTAGFCRLWIPGFASLAAPLYPLTRPKVPFTWTEAHQEAFGRIKEALLSAPALALPDLTKPFALYVDEKEGVARGVLTQTLGPWRRPVAYLSKKLDPVASGWPTCLKAIAAVALLLKDADKLTLGQNVLVIAPHNLESIVRQPPDRWMTNARMTHYQSLLLNERVSFAPPAILNPATLLPVESDDTPIHICSEILAEETGTRPDLRDQPLPGVPAWYTDGSSFIMDGRRQAGAAIVDNKRTVWASNLPEGTSAQKAELIALTQALRLAEGKSINIYTDSRYAFATAHVHGAIYKQRGWLTSAGKDIKNKEEILALLEAIHLPKRVAIIHCPGHQRGTDPVATGNRKADEAAKQAAQSTRILTETTKNAGKRTADGSEFEKRTADGSEFESPKKKAKVE

SEQ ID NO: 6829 - protein, 2125 aa, synthetic construct
MPAAKRVKLDGGDKKYSIGLDIGTNSVGWAVITDEYKVPSKKFKVLGNTDRHSIKKNLIGALLFDSGETAEATRLKRTARRRYTRRKNRICYLQEIFSNEMAKVDDSFFHRLEESFLVEEDKKHERHPIFGNIVDEVAYHEKYPTIYHLRKKLVDSTDKADLRLIYLALAHMIKFRGHFLIEGDLNPDNSDVDKLFIQLVQTYNQLFEENPINASGVDAKAILSARLSKSRRLENLIAQLPGEKKNGLFGNLIALSLGLTPNFKSNFDLAEDAKLQLSKDTYDDDLDNLLAQIGDQYADLFLAAKNLSDAILLSDILRVNTEITKAPLSASMIKRYDEHHQDLTLLKALVRQQLPEKYKEIFFDQSKNGYAGYIDGGASQEEFYKFIKPILEKMDGTEELLVKLNREDLLRKQRTFDNGSIPHQIHLGELHAILRRQEDFYPFLKDNREKIEKILTFRIPYYVGPLARGNSRFAWMTRKSEETITPWNFEEVVDKGASAQSFIERMTNFDKNLPNEKVLPKHSLLYEYFTVYNELTKVKYVTEGMRKPAFLSGEQKKAIVDLLFKTNRKVTVKQLKEDYFKKIECFDSVEISGVEDRFNASLGTYHDLLKIIKDKDFLDNEENEDILEDIVLTLTLFEDREMIEERLKTYAHLFDDKVMKQLKRRRYTGWGRLSRKLINGIRDKQSGKTILDFLKSDGFANRNFMQLIHDDSLTFKEDIQKAQVSGQGDSLHEHIANLAGSPAIKKGILQTVKVVDELVKVMGRHKPENIVIEMARENQTTQKGQKNSRERMKRIEEGIKELGSQILKEHPVENTQLQNEKLYLYYLQNGRDMYVDQELDINRLSDYDVDHIVPQSFLKDDSIDNKVLTRSDKARGKSDNVPSEEVVKKMKNYWRQLLNAKLITQRKFDNLTKAERGGLSELDKAGFIKRQLVETRQITKHVAQILDSRMNTKYDENDKLIREVKVITLKSKLVSDFRKDFQFYKVREINNYHHAHDAYLNAVVGTALIKKYPKLESEFVYGDYKVYDVRKMIAKSEQEIGKATAKYFFYSNIMNFFKTEITLANGEIRKRPLIETNGETGEIVWDKGRDFATVRKVLSMPQVNIVKKTEVQTGGFSKESILPKRNSDKLIARKKDWDPKKYGGFDSPTVAYSVLVVAKVEKGKSKKLKSVKELLGITIMERSSFEKNPIDFLEAKGYKEVKKDLIIKLPKYSLFELENGRKRMLASAGELQKGNELALPSKYVNFLYLASHYEKLKGSPEDNEQKQLFVEQHKHYLDEIIEQISEFSKRVILADANLDKVLSAYNKHRDKPIREQAENIIHLFTLTNLGAPAAFKYFDTTIDRKRYTSTKEVLDATLIHQSITGLYETRIDLSQLGGDGGGGGGGSGSSGGLLGRDLLTKLKAQIQFSTEGPQVTWEDRPAMCLVLNLEEEYRLHEKPVPPSIDPSWLQLFPMVWAEKAGMGLANQVPPVVVELKSDASPVAVRQYPMSKEAREGIRPHIQRFLDLGILVPCQSPWNTPLLPVKKPGTNDYRPVQDLREVNKRVQDIHPTVPNPYNLLSSLPPSHTWYSVLDLKDAFFCLKLHPNSQPLFAFEWRDPEKGNTGQLTWTRLPQGFKNSPTLFNEALHRDLASFRALNPQVVMLQYVDDLLVAAPTYRDCKEGTRRLLQELSKLGYRVSAKKAQLCREEVTYLGYLLKGGKRWLTPARKATVMKIPTPTTPRQVREFLGKAGFCRLFIPGFASLAAPLYPLTRPKVPFTWTEAHQEAFGRIKEALLSAPALALPDLTKPFALYVDEKEGVARGVLTQTLGPWRRPVAYLSKKLDPVASGWPTCLKAIAAVALLLKDADKLTLGQNVLVIAPHNLESIVRQPPDRWMTNARMTHYQSLLLNERVSFAPPAILNPATLLPVESDDTPIHICSEILAEETGTRPDLRDQPLPGVPAWYTDGSSFIMDGRRQAGAAIVDNKRTVWASNLPEGTSAQKAELIALTQALRLAEGKSINIYTDSRYAFATAHVHGAIYKQRGWLTSAGKDIKNKEEILALLEAIHLPKRVAIIHCPGHQRGTDPVATGNRKADEAAKQAAQSTRILTETTKNAGKRTADGSEFEKRTADGSEFESPKKKAKVE

SEQ ID NO: 6830 - protein, 2094 aa, synthetic construct
MPAAKRVKLDGGDKKYSIGLDIGTNSVGWAVITDEYKVPSKKFKVLGNTDRHSIKKNLIGALLFDSGETAEATRLKRTARRRYTRRKNRICYLQEIFSNEMAKVDDSFFHRLEESFLVEEDKKHERHPIFGNIVDEVAYHEKYPTIYHLRKKLVDSTDKADLRLIYLALAHMIKFRGHFLIEGDLNPDNSDVDKLFIQLVQTYNQLFEENPINASGVDAKAILSARLSKSRRLENLIAQLPGEKKNGLFGNLIALSLGLTPNFKSNFDLAEDAKLQLSKDTYDDDLDNLLAQIGDQYADLFLAAKNLSDAILLSDILRVNTEITKAPLSASMIKRYDEHHQDLTLLKALVRQQLPEKYKEIFFDQSKNGYAGYIDGGASQEEFYKFIKPILEKMDGTEELLVKLNREDLLRKQRTFDNGSIPHQIHLGELHAILRRQEDFYPFLKDNREKIEKILTFRIPYYVGPLARGNSRFAWMTRKSEETITPWNFEEVVDKGASAQSFIERMTNFDKNLPNEKVLPKHSLLYEYFTVYNELTKVKYVTEGMRKPAFLSGEQKKAIVDLLFKTNRKVTVKQLKEDYFKKIECFDSVEISGVEDRFNASLGTYHDLLKIIKDKDFLDNEENEDILEDIVLTLTLFEDREMIEERLKTYAHLFDDKVMKQLKRRRYTGWGRLSRKLINGIRDKQSGKTILDFLKSDGFANRNFMQLIHDDSLTFKEDIQKAQVSGQGDSLHEHIANLAGSPAIKKGILQTVKVVDELVKVMGRHKPENIVIEMARENQTTQKGQKNSRERMKRIEEGIKELGSQILKEHPVENTQLQNEKLYLYYLQNGRDMYVDQELDINRLSDYDVDHIVPQSFLKDDSIDNKVLTRSDKARGKSDNVPSEEVVKKMKNYWRQLLNAKLITQRKFDNLTKAERGGLSELDKAGFIKRQLVETRQITKHVAQILDSRMNTKYDENDKLIREVKVITLKSKLVSDFRKDFQFYKVREINNYHHAHDAYLNAVVGTALIKKYPKLESEFVYGDYKVYDVRKMIAKSEQEIGKATAKYFFYSNIMNFFKTEITLANGEIRKRPLIETNGETGEIVWDKGRDFATVRKVLSMPQVNIVKKTEVQTGGFSKESILPKRNSDKLIARKKDWDPKKYGGFDSPTVAYSVLVVAKVEKGKSKKLKSVKELLGITIMERSSFEKNPIDFLEAKGYKEVKKDLIIKLPKYSLFELENGRKRMLASAGELQKGNELALPSKYVNFLYLASHYEKLKGSPEDNEQKQLFVEQHKHYLDEIIEQISEFSKRVILADANLDKVLSAYNKHRDKPIREQAENIIHLFTLTNLGAPAAFKYFDTTIDRKRYTSTKEVLDATLIHQSITGLYETRIDLSQLGGDGGGGGGGSGSSGGTLNIEDEYRLHETSKGPDVPLGSTWLSDFPQAWAETGGMGLAVRQAPLIIPLKATSTPVSIKQYPMSQEARLGIKPHIQRLLDQGILVPCQSPWNTPLLPVKKPGTNDYRPVQDLREVNKRVEDIHPTVPNPYNLLSGLPPSHQWYTVLDLKDAFFCLRLHPTSQSLFAFEWRDPEMGISGQLTWTRLPQGFKNSPTLFNEALHRDLADFRIQHPDLILLQYVDDLLLAATSELDCQQGTRALLQTLGDLGYRASAKKAQICQKQVKYLGYLLKEGQRWLTEARKETVMGQPTPKTPRQLREFLGTAGFCRLWIPGFAEMAAPLYPLTKPGTLFEWGPDQQKAYQEIKQALLTAPALGLPDLTKPFELFVDEKQGYAKGVLTQKLGPWRRPVAYLSKKLDPVAAGWPPCLRMVAAIAVLTKDAGKLTMGQPLVILAPHAVEALVKQPPDRWLSNARMTHYQALLLDTDRVQFGPIVALNPATLLPLPEEGLQHDCLDILAEAHGTRPDLTDQPLPDADHTWYTDGSSFLQEGQRKAGAAVTTETEVVWAKALPAGTSAQRAELIALTQALKMAEGKKLNVYTDSRYAFATAHIHGEIYRRRGWLTSEGKEIKNKDEILALLKALFLPKRLSIIHCPGHQKGNRAEARGNRMADQAAREVATRETPETSTLLAGKRTADGSEFEKRTADGSEFESPKKKAKVE

SEQ ID NO: 6831 - protein, 2094 aa, synthetic construct
MPAAKRVKLDGGDKKYSIGLDIGTNSVGWAVITDEYKVPSKKFKVLGNTDRHSIKKNLIGALLFDSGETAEATRLKRTARRRYTRRKNRICYLQEIFSNEMAKVDDSFFHRLEESFLVEEDKKHERHPIFGNIVDEVAYHEKYPTIYHLRKKLVDSTDKADLRLIYLALAHMIKFRGHFLIEGDLNPDNSDVDKLFIQLVQTYNQLFEENPINASGVDAKAILSARLSKSRRLENLIAQLPGEKKNGLFGNLIALSLGLTPNFKSNFDLAEDAKLQLSKDTYDDDLDNLLAQIGDQYADLFLAAKNLSDAILLSDILRVNTEITKAPLSASMIKRYDEHHQDLTLLKALVRQQLPEKYKEIFFDQSKNGYAGYIDGGASQEEFYKFIKPILEKMDGTEELLVKLNREDLLRKQRTFDNGSIPHQIHLGELHAILRRQEDFYPFLKDNREKIEKILTFRIPYYVGPLARGNSRFAWMTRKSEETITPWNFEEVVDKGASAQSFIERMTNFDKNLPNEKVLPKHSLLYEYFTVYNELTKVKYVTEGMRKPAFLSGEQKKAIVDLLFKTNRKVTVKQLKEDYFKKIECFDSVEISGVEDRFNASLGTYHDLLKIIKDKDFLDNEENEDILEDIVLTLTLFEDREMIEERLKTYAHLFDDKVMKQLKRRRYTGWGRLSRKLINGIRDKQSGKTILDFLKSDGFANRNFMQLIHDDSLTFKEDIQKAQVSGQGDSLHEHIANLAGSPAIKKGILQTVKVVDELVKVMGRHKPENIVIEMARENQTTQKGQKNSRERMKRIEEGIKELGSQILKEHPVENTQLQNEKLYLYYLQNGRDMYVDQELDINRLSDYDVDHIVPQSFLKDDSIDNKVLTRSDKARGKSDNVPSEEVVKKMKNYWRQLLNAKLITQRKFDNLTKAERGGLSELDKAGFIKRQLVETRQITKHVAQILDSRMNTKYDENDKLIREVKVITLKSKLVSDFRKDFQFYKVREINNYHHAHDAYLNAVVGTALIKKYPKLESEFVYGDYKVYDVRKMIAKSEQEIGKATAKYFFYSNIMNFFKTEITLANGEIRKRPLIETNGETGEIVWDKGRDFATVRKVLSMPQVNIVKKTEVQTGGFSKESILPKRNSDKLIARKKDWDPKKYGGFDSPTVAYSVLVVAKVEKGKSKKLKSVKELLGITIMERSSFEKNPIDFLEAKGYKEVKKDLIIKLPKYSLFELENGRKRMLASAGELQKGNELALPSKYVNFLYLASHYEKLKGSPEDNEQKQLFVEQHKHYLDEIIEQISEFSKRVILADANLDKVLSAYNKHRDKPIREQAENIIHLFTLTNLGAPAAFKYFDTTIDRKRYTSTKEVLDATLIHQSITGLYETRIDLSQLGGDGGGGGGGSGSSGGTLNIEDEHRLHETSKEPDVSLGSTWLSDFPQAWAETGGMGLAVRQAPLIIPLKATSTPVSIKQYPMSQEARLGIKPHIQRLLDQGILVPCQSPWNTPLLPVKKPGTNDYRPVQDLREVNKRVEDIHPTVPNPYNLLSGLPPSHQWYTVLDLKDAFFCLRLHPTSQPLFAFEWRDPEMGISGQLTWTRLPQGFKNSPTLFNEALHRDLADFRIQHPDLILLQYVDDLLLAATSELDCQQGTRALLQTLGNLGYRASAKKAQICQKQVKYLGYLLKEGQRWLTEARKETVMGQPTPKTPRQLREFLGTAGFCRLWIPGFAEMAAPLYPLTKPGTLFNWGPDQQKAYQEIKQALLTAPALGLPDLTKPFELFVDEKQGYAKGVLTQKLGPWRRPVAYLSKKLDPVAAGWPPCLRMVAAIAVLTKDAGKLTMGQPLVILAPHAVEALVKQPPDRWLSNARMTHYQALLLDTDRVQFGPVVALNPATLLPLPEEGLQHNCLDILAEAHGTRPDLTDQPLPDADHTWYTDGSSLLQEGQRKAGAAVTTETEVIWAKALPAGTSAQRAELIALTQALKMAEGKKLNVYTDSRYAFATAHIHGEIYRRRGWLTSEGKEIKNKDEILALLKALFLPKRLSIIHCPGHQKGHSAEARGNRMADQAARKAAITETPDTSTLLAGKRTADGSEFEKRTADGSEFESPKKKAKVE

SEQ ID NO: 6832 - protein, 2094 aa, synthetic construct; identical to SEQ ID NO: 6831

SEQ ID NO: 6833 - protein, 2086 aa, synthetic construct
MPAAKRVKLDGGDKKYSIGLDIGTNSVGWAVITDEYKVPSKKFKVLGNTDRHSIKKNLIGALLFDSGETAEATRLKRTARRRYTRRKNRICYLQEIFSNEMAKVDDSFFHRLEESFLVEEDKKHERHPIFGNIVDEVAYHEKYPTIYHLRKKLVDSTDKADLRLIYLALAHMIKFRGHFLIEGDLNPDNSDVDKLFIQLVQTYNQLFEENPINASGVDAKAILSARLSKSRRLENLIAQLPGEKKNGLFGNLIALSLGLTPNFKSNFDLAEDAKLQLSKDTYDDDLDNLLAQIGDQYADLFLAAKNLSDAILLSDILRVNTEITKAPLSASMIKRYDEHHQDLTLLKALVRQQLPEKYKEIFFDQSKNGYAGYIDGGASQEEFYKFIKPILEKMDGTEELLVKLNREDLLRKQRTFDNGSIPHQIHLGELHAILRRQEDFYPFLKDNREKIEKILTFRIPYYVGPLARGNSRFAWMTRKSEETITPWNFEEVVDKGASAQSFIERMTNFDKNLPNEKVLPKHSLLYEYFTVYNELTKVKYVTEGMRKPAFLSGEQKKAIVDLLFKTNRKVTVKQLKEDYFKKIECFDSVEISGVEDRFNASLGTYHDLLKIIKDKDFLDNEENEDILEDIVLTLTLFEDREMIEERLKTYAHLFDDKVMKQLKRRRYTGWGRLSRKLINGIRDKQSGKTILDFLKSDGFANRNFMQLIHDDSLTFKEDIQKAQVSGQGDSLHEHIANLAGSPAIKKGILQTVKVVDELVKVMGRHKPENIVIEMARENQTTQKGQKNSRERMKRIEEGIKELGSQILKEHPVENTQLQNEKLYLYYLQNGRDMYVDQELDINRLSDYDVDHIVPQSFLKDDSIDNKVLTRSDKARGKSDNVPSEEVVKKMKNYWRQLLNAKLITQRKFDNLTKAERGGLSELDKAGFIKRQLVETRQITKHVAQILDSRMNTKYDENDKLIREVKVITLKSKLVSDFRKDFQFYKVREINNYHHAHDAYLNAVVGTALIKKYPKLESEFVYGDYKVYDVRKMIAKSEQEIGKATAKYFFYSNIMNFFKTEITLANGEIRKRPLIETNGETGEIVWDKGRDFATVRKVLSMPQVNIVKKTEVQTGGFSKESILPKRNSDKLIARKKDWDPKKYGGFDSPTVAYSVLVVAKVEKGKSKKLKSVKELLGITIMERSSFEKNPIDFLEAKGYKEVKKDLIIKLPKYSLFELENGRKRMLASAGELQKGNELALPSKYVNFLYLASHYEKLKGSPEDNEQKQLFVEQHKHYLDEIIEQISEFSKRVILADANLDKVLSAYNKHRDKPIREQAENIIHLFTLTNLGAPAAFKYFDTTIDRKRYTSTKEVLDATLIHQSITGLYETRIDLSQLGGDGGGGGGGSGSSGGLDDEYRLYSPLVKPDQNIQFWLEQFPQAWAETAGMGLAKQVPPQVIQLKASATPVSVRQYPLSKEAQEGIRPHVQRLIQQGILVPVQSPWNTPLLPVRKPGTNDYRPVQDLREVNKRVQDIHPTVPNPYNLLCALPPQRSWYTVLDLKDAFFCLRLHPTSQPLFAFEWRDPGTGRTGQLTWTRLPQGFKNSPTIFNEALHRDLANFRIQHPQVTLLQYVDDLLLAGATKQDCLEGTKALLLELSDLGYRASAKKAQICRREVTYLGYSLRDGQRWLTEARKKTVVQIPAPTTAKQVREFLGKAGFCRLFIPGFATLAAPLYPLTKPKGEFSWAPEHQKAFDAIKKALLSAPALALPDVTKPFTLYVDERKGVARGVLTQTLGPWRRPVAYLSKKLDPVASGWPVCLKAIAAVAILVKDADKLTLGQNITVIAPHALENIVRQPPDRWMTNARMTHYQSLLLTERVTFAPPAALNPATLLPEETDEPVTHDCHQLLIEETGVRKDLTDIPLTGEVLTWFTDGSSYVVEGKRMAGAAVVDGTRTIWASSLPEGTSAQKAELMALTQALRLAEGKSINIYTDSRYAFATAHVHGAIYKQRGWLTSAGREIKNKEEILSLLEALHLPKRLAIIHCPGHQKAKDPISRGNQMADRVAKQAAQGVNLLPAGKRTADGSEFEKRTADGSEFESPKKKAKVE

SEQ ID NO: 6834 - protein, 2086 aa, synthetic construct; identical to SEQ ID NO: 6833

SEQ ID NO: 6835 - protein, 2088 aa, synthetic construct
MPAAKRVKLDGGDKKYSIGLDIGTNSVGWAVITDEYKVPSKKFKVLGNTDRHSIKKNLIGALLFDSGETAEATRLKRTARRRYTRRKNRICYLQEIFSNEMAKVDDSFFHRLEESFLVEEDKKHERHPIFGNIVDEVAYHEKYPTIYHLRKKLVDSTDKADLRLIYLALAHMIKFRGHFLIEGDLNPDNSDVDKLFIQLVQTYNQLFEENPINASGVDAKAILSARLSKSRRLENLIAQLPGEKKNGLFGNLIALSLGLTPNFKSNFDLAEDAKLQLSKDTYDDDLDNLLAQIGDQYADLFLAAKNLSDAILLSDILRVNTEITKAPLSASMIKRYDEHHQDLTLLKALVRQQLPEKYKEIFFDQSKNGYAGYIDGGASQEEFYKFIKPILEKMDGTEELLVKLNREDLLRKQRTFDNGSIPHQIHLGELHAILRRQEDFYPFLKDNREKIEKILTFRIPYYVGPLARGNSRFAWMTRKSEETITPWNFEEVVDKGASAQSFIERMTNFDKNLPNEKVLPKHSLLYEYFTVYNELTKVKYVTEGMRKPAFLSGEQKKAIVDLLFKTNRKVTVKQLKEDYFKKIECFDSVEISGVEDRFNASLGTYHDLLKIIKDKDFLDNEENEDILEDIVLTLTLFEDREMIEERLKTYAHLFDDKVMKQLKRRRYTGWGRLSRKLINGIRDKQSGKTILDFLKSDGFANRNFMQLIHDDSLTFKEDIQKAQVSGQGDSLHEHIANLAGSPAIKKGILQTVKVVDELVKVMGRHKPENIVIEMARENQTTQKGQKNSRERMKRIEEGIKELGSQILKEHPVENTQLQNEKLYLYYLQNGRDMYVDQELDINRLSDYDVDHIVPQSFLKDDSIDNKVLTRSDKARGKSDNVPSEEVVKKMKNYWRQLLNAKLITQRKFDNLTKAERGGLSELDKAGFIKRQLVETRQITKHVAQILDSRMNTKYDENDKLIREVKVITLKSKLVSDFRKDFQFYKVREINNYHHAHDAYLNAVVGTALIKKYPKLESEFVYGDYKVYDVRKMIAKSEQEIGKATAKYFFYSNIMNFFKTEITLANGEIRKRPLIETNGETGEIVWDKGRDFATVRKVLSMPQVNIVKKTEVQTGGFSKESILPKRNSDKLIARKKDWDPKKYGGFDSPTVAYSVLVVAKVEKGKSKKLKSVKELLGITIMERSSFEKNPIDFLEAKGYKEVKKDLIIKLPKYSLFELENGRKRMLASAGELQKGNELALPSKYVNFLYLASHYEKLKGSPEDNEQKQLFVEQHKHYLDEIIEQISEFSKRVILADANLDKVLSAYNKHRDKPIREQAENIIHLFTLTNLGAPAAFKYFDTTIDRKRYTSTKEVLDATLIHQSITGLYETRIDLSQLGGDGGGGGGGSGSSGGTLQLDDEYRLYSPLVKPDQNIQFWLEQFPQAWAETAGMGLAKQVPPQVIQLKASATPVSVRQYPLSKEAQEGIRPHVQRLIQQGILVPVQSPWNTPLLPVRKPGTNDYRPVQDLREVNKRVQDIHPTVPNPYNLLCALPPQRSWYTVLDLKDAFFCLRLHPTSQPLFAFEWRDPGTGRTGQLTWTRLPQGFKNSPTIFDEALHRDLANFRIQHPQVTLLQYVDDLLLAGATKQDCLEGTKALLLELSDLGYRASAKKAQICRREVTYLGYSLRDGQRWLTEARKKTVVQIPAPTTAKQVREFLGTAGFCRLWIPGFATLAAPLYPLTKEKGEFSWAPEHQKAFDAIKKALLSAPALALPDVTKPFTLYVDERKGVARGVLTQTLGPWRRPVAYLSKKLDPVASGWPVCLKAIAAVAILVKDADKLTLGQNITVIAPHALENIVRQPPDRWMTNARMTHYQSLLLTERVTFAPPAALNPATLLPEETDEPVTHDCHQLLIEETGVRKDLTDIPLTGEVLTWFTDGSSYVVEGKRMAGAAVVDGTRTIWASSLPEGTSAQKAELMALTQALRLAEGKSINIYTDSRYAFATAHVHGAIYKQRGLLTSAGREIKNKEEILSLLEALHLPKRLAIIHCPGHQKAKDPISRGNQMADRVAKQAAQGVNLLAGKRTADGSEFEKRTADGSEFESPKKKAKVE

SEQ ID NO: 6836 - protein, 2085 aa, synthetic construct
MPAAKRVKLDGGDKKYSIGLDIGTNSVGWAVITDEYKVPSKKFKVLGNTDRHSIKKNLIGALLFDSGETAEATRLKRTARRRYTRRKNRICYLQEIFSNEMAKVDDSFFHRLEESFLVEEDKKHERHPIFGNIVDEVAYHEKYPTIYHLRKKLVDSTDKADLRLIYLALAHMIKFRGHFLIEGDLNPDNSDVDKLFIQLVQTYNQLFEENPINASGVDAKAILSARLSKSRRLENLIAQLPGEKKNGLFGNLIALSLGLTPNFKSNFDLAEDAKLQLSKDTYDDDLDNLLAQIGDQYADLFLAAKNLSDAILLSDILRVNTEITKAPLSASMIKRYDEHHQDLTLLKALVRQQLPEKYKEIFFDQSKNGYAGYIDGGASQEEFYKFIKPILEKMDGTEELLVKLNREDLLRKQRTFDNGSIPHQIHLGELHAILRRQEDFYPFLKDNREKIEKILTFRIPYYVGPLARGNSRFAWMTRKSEETITPWNFEEVVDKGASAQSFIERMTNFDKNLPNEKVLPKHSLLYEYFTVYNELTKVKYVTEGMRKPAFLSGEQKKAIVDLLFKTNRKVTVKQLKEDYFKKIECFDSVEISGVEDRFNASLGTYHDLLKIIKDKDFLDNEENEDILEDIVLTLTLFEDREMIEERLKTYAHLFDDKVMKQLKRRRYTGWGRLSRKLINGIRDKQSGKTILDFLKSDGFANRNFMQLIHDDSLTFKEDIQKAQVSGQGDSLHEHIANLAGSPAIKKGILQTVKVVDELVKVMGRHKPENIVIEMARENQTTQKGQKNSRERMKRIEEGIKELGSQILKEHPVENTQLQNEKLYLYYLQNGRDMYVDQELDINRLSDYDVDHIVPQSFLKDDSIDNKVLTRSDKARGKSDNVPSEEVVKKMKNYWRQLLNAKLITQRKFDNLTKAERGGLSELDKAGFIKRQLVETRQITKHVAQILDSRMNTKYDENDKLIREVKVITLKSKLVSDFRKDFQFYKVREINNYHHAHDAYLNAVVGTALIKKYPKLESEFVYGDYKVYDVRKMIAKSEQEIGKATAKYFFYSNIMNFFKTEITLANGEIRKRPLIETNGETGEIVWDKGRDFATVRKVLSMPQVNIVKKTEVQTGGFSKESILPKRNSDKLIARKKDWDPKKYGGFDSPTVAYSVLVVAKVEKGKSKKLKSVKELLGITIMERSSFEKNPIDFLEAKGYKEVKKDLIIKLPKYSLFELENGRKRMLASAGELQKGNELALPSKYVNFLYLASHYEKLKGSPEDNEQKQLFVEQHKHYLDEIIEQISEFSKRVILADANLDKVLSAYNKHRDKPIREQAENIIHLFTLTNLGAPAAFKYFDTTIDRKRYTSTKEVLDATLIHQSITGLYETRIDLSQLGGDGGGGGGGSGSSGGVPWLMKKPLQLTVLVPLHEYQERLLQQTALPKEQKELLQKLFLKYDALWQHWENQVGHRRIKPHNIATGTLAPRPQKQYPINPKAKPSIQIVIDDLLKQGVLIQQNSTMNTPVYPVPKPDGKWRMVLDYREVNKTIPLIAAQNQHSAGILSSIYRGKYKTTLDLTNGFWAHPITPESYWLTAFTWQGKQYCWTRLPQGFLNSPALFTADVVDLLKEIPNVQAYVDDIYISHDDPQEHLEQLEKIFSILLNAGYVVSLKKSEIAQREVEFLGFNITKEGRGLTDTFKQKLLNITPPKDLKQLQSILGLLNFARNFIPNYSELVKPLYTIVANANGKFISWTEDNSNQLQHIISVLNQADNLEERNPETRLIIKVNSSPSAGYIRYYNEGSKRPIMYVNYIFSKAEAKFTQTEKLLTTMHKGLIKAMDLAMGQEILVYSPIVSMTKIQRTPLPERKALPVRWITWMTYLEDPRIQFHYDKSLPELQQIPNVTEDVIAKTKHPSEFAMVFYTDGSAIKHPDVNKSHSAGMGIAQVQFIPEYKIVHQWSIPLGDHTAQLAEIAAVEFACKKALKISGPVLIVTDSFYVAESANKELPYWKSNGFLNNKKKPLRHVSKWKSIAECLQLKPDIIIMHEKGHQQPMTTLHTEGNNLADKLATQGSYVVHAGKRTADGSEFEKRTADGSEFESPKKKAKVE

SEQ ID NO: 6837 - protein, 2085 aa, synthetic construct
MPAAKRVKLDGGDKKYSIGLDIGTNSVGWAVITDEYKVPSKKFKVLGNTDRHSIKKNLIGALLFDSGETAEATRLKRTARRRYTRRKNRICYLQEIFSNEMAKVDDSFFHRLEESFLVEEDKKHERHPIFGNIVDEVAYHEKYPTIYHLRKKLVDSTDKADLRLIYLALAHMIKFRGHFLIEGDLNPDNSDVDKLFIQLVQTYNQLFEENPINASGVDAKAILSARLSKSRRLENLIAQLPGEKKNGLFGNLIALSLGLTPNFKSNFDLAEDAKLQLSKDTYDDDLDNLLAQIGDQYADLFLAAKNLSDAILLSDILRVNTEITKAPLSASMIKRYDEHHQDLTLLKALVRQQLPEKYKEIFFDQSKNGYAGYIDGGASQEEFYKFIKPILEKMDGTEELLVKLNREDLLRKQRTFDNGSIPHQIHLGELHAILRRQEDFYPFLKDNREKIEKILTFRIPYYVGPLARGNSRFAWMTRKSEETITPWNFEEVVDKGASAQSFIERMTNFDKNLPNEKVLPKHSLLYEYFTVYNELTKVKYVTEGMRKPAFLSGEQKKAIVDLLFKTNRKVTVKQLKEDYFKKIECFDSVEISGVEDRFNASLGTYHDLLKIIKDKDFLDNEENEDILEDIVLTLTLFEDREMIEERLKTYAHLFDDKVMKQLKRRRYTGWGRLSRKLINGIRDKQSGKTILDFLKSDGFANRNFMQLIHDDSLTFKEDIQKAQVSGQGDSLHEHIANLAGSPAIKKGILQTVKVVDELVKVMGRHKPENIVIEMARENQTTQKGQKNSRERMKRIEEGIKELGSQILKEHPVENTQLQNEKLYLYYLQNGRDMYVDQELDINRLSDYDVDHIVPQSFLKDDSIDNKVLTRSDKARGKSDNVPSEEVVKKMKNYWRQLLNAKLITQRKFDNLTKAERGGLSELDKAGFIKRQLVETRQITKHVAQILDSRMNTKYDENDKLIREVKVITLKSKLVSDFRKDFQFYKVREINNYHHAHDAYLNAVVGTALIKKYPKLESEFVYGDYKVYDVRKMIAKSEQEIGKATAKYFFYSNIMNFFKTEITLANGEIRKRPLIETNGETGEIVWDKGRDFATVRKVLSMPQVNIVKKTEVQTGGFSKESILPKRNSDKLIARKKDWDPKKYGGFDSPTVAYSVLVVAKVEKGKSKKLKSVKELLGITIMERSSFEKNPIDFLEAKGYKEVKKDLIIKLPKYSLFELENGRKRMLASAGELQKGNELALPSKYVNFLYLASHYEKLKGSPEDNEQKQLFVEQHKHYLDEIIEQISEFSKRVILADANLDKVLSAYNKHRDKPIREQAENIIHLFTLTNLGAPAAFKYFDTTIDRKRYTSTKEVLDATLIHQSITGLYETRIDLSQLGGDGGGGGGGSGSSGGVPWLMKKPLQLTVLVPLHEYQERLLQQTALPKEQKELLQKLFLKYDALWQHWENQVGHRRIKPHNIATGTLAPRPQKQYPINPKAKPSIQIVIDDLLKQGVLIQQNSTMNTPVYPVPKPDGKWRMVLDYREVNKTIPLIAAQNQHSAGILSSIYRGKYKTTLDLTNGFWAHPITPESYWLTAFTWQGKQYCWTRLPQGFLNSPALFNADVVDLLKEIPNVQAYVDDIYISHDDPQEHLEQLEKIFSILLNAGYVVSLKKSEIAQREVEFLGFNITKEGRGLTDTFKQKLLNITPPKDLKQLQSILGLLNFARNFIPNYSELVKPLYTIVAPANGKFISWTEDNSNQLQHIISVLNQADNLEERNPETRLIIKVNSSPSAGYIRYYNEGSKRPIMYVNYIFSKAEAKFTQTEKLLTTMHKGLIKAMDLAMGQEILVYSPIVSMTKIQRTPLPERKALPVRWITWMTYLEDPRIQFHYDKSLPELQQIPNVTEDVIAKTKHPSEFAMVFYTDGSAIKHPDVNKSHSAGMGIAQVQFIPEYKIVHQWSIPLGDHTAQLAEIAAVEFACKKALKISGPVLIVTDSFYVAESANKELPYWKSNGFLNNKKKPLRHVSKWKSIAECLQLKPDIIIMHEKGHQQPMTTLHTEGNNLADKLATQGSYVVHAGKRTADGSEFEKRTADGSEFESPKKKAKVE

SEQ ID NO: 6838 - protein, 2174 aa, synthetic construct
MPAAKRVKLDGGDKKYSIGLDIGTNSVGWAVITDEYKVPSKKFKVLGNTDRHSIKKNLIGALLFDSGETAEATRLKRTARRRYTRRKNRICYLQEIFSNEMAKVDDSFFHRLEESFLVEEDKKHERHPIFGNIVDEVAYHEKYPTIYHLRKKLVDSTDKADLRLIYLALAHMIKFRGHFLIEGDLNPDNSDVDKLFIQLVQTYNQLFEENPINASGVDAKAILSARLSKSRRLENLIAQLPGEKKNGLFGNLIALSLGLTPNFKSNFDLAEDAKLQLSKDTYDDDLDNLLAQIGDQYADLFLAAKNLSDAILLSDILRVNTEITKAPLSASMIKRYDEHHQDLTLLKALVRQQLPEKYKEIFFDQSKNGYAGYIDGGASQEEFYKFIKPILEKMDGTEELLVKLNREDLLRKQRTFDNGSIPHQIHLGELHAILRRQEDFYPFLKDNREKIEKILTFRIPYYVGPLARGNSRFAWMTRKSEETITPWNFEEVVDKGASAQSFIERMTNFDKNLPNEKVLPKHSLLYEYFTVYNELTKVKYVTEGMRKPAFLSGEQKKAIVDLLFKTNRKVTVKQLKEDYFKKIECFDSVEISGVEDRFNASLGTYHDLLKIIKDKDFLDNEENEDILEDIVLTLTLFEDREMIEERLKTYAHLFDDKVMKQLKRRRYTGWGRLSRKLINGIRDKQSGKTILDFLKSDGFANRNFMQLIHDDSLTFKEDIQKAQVSGQGDSLHEHIANLAGSPAIKKGILQTVKVVDELVKVMGRHKPENIVIEMARENQTTQKGQKNSRERMKRIEEGIKELGSQILKEHPVENTQLQNEKLYLYYLQNGRDMYVDQELDINRLSDYDVDHIVPQSFLKDDSIDNKVLTRSDKARGKSDNVPSEEVVKKMKNYWRQLLNAKLITQRKFDNLTKAERGGLSELDKAGFIKRQLVETRQITKHVAQILDSRMNTKYDENDKLIREVKVITLKSKLVSDFRKDFQFYKVREINNYHHAHDAYLNAVVGTALIKKYPKLESEFVYGDYKVYDVRKMIAKSEQEIGKATAKYFFYSNIMNFFKTEITLANGEIRKRPLIETNGETGEIVWDKGRDFATVRKVLSMPQVNIVKKTEVQTGGFSKESILPKRNSDKLIARKKDWDPKKYGGFDSPTVAYSVLVVAKVEKGKSKKLKSVKELLGITIMERSSFEKNPIDFLEAKGYKEVKKDLIIKLPKYSLFELENGRKRMLASAGELQKGNELALPSKYVNFLYLASHYEKLKGSPEDNEQKQLFVEQHKHYLDEIIEQISEFSKRVILADANLDKVLSAYNKHRDKPIREQAENIIHLFTLTNLGAPAAFKYFDTTIDRKRYTSTKEVLDATLIHQSITGLYETRIDLSQLGGDGGGGGGGSGSSGGMDPLQLLQPLEAEIKGTKLKAHWNSGATITCVPQAFLEEEVPIKNIWIKTIHGEKEQPVYYLTFKIQGRKVEAEVISSPYDYILVSPSDIPWLMKKPLQLTTLVPLQEYEERLLKQTMLTGSYKEKLQSLFLKYDALWQHWENQVGHRRIKPHHIATGTVNPRPQKQYPINPKAKASIQTVINDLLKQGVLIQQNSIMNTPVYPVPKPDGKWRMVLDYREVNKTIPLIAAQNQHSAGILSSIFRGKYKTTLDLSNGFWAHSITPESYWLTAFTWLGQQYCWTRLPQGFLNSPALFNADVVDLLKEVPNVQVYVDDIYISHDDPREHLEQLEKVFSLLLNAGYVVSLKKSEIAQHEVEFLGFNITKEGRGLTETFKQKLLNITPPRDLKQLQSILGLLNFARNFIPNFSELVKPLYNIIATAPGKYITWTTDNSQQLQNIISMLNSAENLEERNPEVRLIMKVNTSPSAGYIRFYNEFAKRPIMYLNYVYTKAEVKFTNTEKLLTTIHKGLIKALDLGMGQEILVYSPIVSMTKIQKTPLPERKALPIRWITWMSYLEDPRIQFHYDKTLPELQQVPTVTDDIIAKIKHPSEFSMVFYTDGSAIKHPNVNKSHNAGMGIAQVQFKPEFTVINTWSIPLGDHTAQLAEVAAVEFACKKALKIDGPVLIVTDSFYVAESVNKELPYWQSNGFFNNKKKPLKHVSKWKSIADCIQLKPDIIIIHEKGHQPTASTFHTEGNNLADKLATQGSYVVNAGKRTADGSEFEKRTADGSEFESPKKKAKVE

SEQ ID NO: 6839 - protein, 2092 aa, synthetic construct
MPAAKRVKLDGGDKKYSIGLDIGTNSVGWAVITDEYKVPSKKFKVLGNTDRHSIKKNLIGALLFDSGETAEATRLKRTARRRYTRRKNRICYLQEIFSNEMAKVDDSFFHRLEESFLVEEDKKHERHPIFGNIVDEVAYHEKYPTIYHLRKKLVDSTDKADLRLIYLALAHMIKFRGHFLIEGDLNPDNSDVDKLFIQLVQTYNQLFEENPINASGVDAKAILSARLSKSRRLENLIAQLPGEKKNGLFGNLIALSLGLTPNFKSNFDLAEDAKLQLSKDTYDDDLDNLLAQIGDQYADLFLAAKNLSDAILLSDILRVNTEITKAPLSASMIKRYDEHHQDLTLLKALVRQQLPEKYKEIFFDQSKNGYAGYIDGGASQEEFYKFIKPILEKMDGTEELLVKLNREDLLRKQRTFDNGSIPHQIHLGELHAILRRQEDFYPFLKDNREKIEKILTFRIPYYVGPLARGNSRFAWMTRKSEETITPWNFEEVVDKGASAQSFIERMTNFDKNLPNEKVLPKHSLLYEYFTVYNELTKVKYVTEGMRKPAFLSGEQKKAIVDLLFKTNRKVTVKQLKEDYFKKIECFDSVEISGVEDRFNASLGTYHDLLKIIKDKDFLDNEENEDILEDIVLTLTLFEDREMIEERLKTYAHLFDDKVMKQLKRRRYTGWGRLSRKLINGIRDKQSGKTILDFLKSDGFANRNFMQLIHDDSLTFKEDIQKAQVSGQGDSLHEHIANLAGSPAIKKGILQTVKVVDELVKVMGRHKPENIVIEMARENQTTQKGQKNSRERMKRIEEGIKELGSQILKEHPVENTQLQNEKLYLYYLQNGRDMYVDQELDINRLSDYDVDHIVPQSFLKDDSIDNKVLTRSDKARGKSDNVPSEEVVKKMKNYWRQLLNAKLITQRKFDNLTKAERGGLSELDKAGFIKRQLVETRQITKHVAQILDSRMNTKYDENDKLIREVKVITLKSKLVSDFRKDFQFYKVREINNYHHAHDAYLNAVVGTALIKKYPKLESEFVYGDYKVYDVRKMIAKSEQEIGKATAKYFFYSNIMNFFKTEITLANGEIRKRPLIETNGETGEIVWDKGRDFATVRKVLSMPQVNIVKKTEVQTGGFSKESILPKRNSDKLIARKKDWDPKKYGGFDSPTVAYSVLVVAKVEKGKSKKLKSVKELLGITIMERSSFEKNPIDFLEAKGYKEVKKDLIIKLPKYSLFELENGRKRMLASAGELQKGNELALPSKYVNFLYLASHYEKLKGSPEDNEQKQLFVEQHKHYLDEIIEQISEFSKRVILADANLDKVLSAYNKHRDKPIREQAENIIHLFTLTNLGAPAAFKYFDTTIDRKRYTSTKEVLDATLIHQSITGLYETRIDLSQLGGDGGGGGGGSGSSGGVLNLEEEYRLHEKPVPSSIDPSWLQLFPTVWAERAGMGLANQVPPVVVELRSGASPVAVRQYPMSKEAREGIRPHIQRFLDLGVLVPCQSPWNTPLLPVKKPGTNDYRPVQDLREINKRVQDIHPTVPNPYNLLSSLPPSHTWYSVLDLKDAFFCLKLHPNSQPLFAFEWRDPEKGNTGQLTWTRLPQGFKNSPTLFNEALHRDLAPFRALNPQVVLLQYVDDLLVAAPTYRDCKEGTQKLLQELSKLGYRVSAKKAQLCQKEVTYLGYLLKEGKRWLTPARKATVMKIPPPTTPRQVREFLGTAGFCRLWIPGFASLAAPLYPLTKPSIPFIWTEEHQKAFDRIKEALLSAPALALPDLTKPFTLYVDERAGVARGVLTQTLGPWRRPVAYLSKKLDPVASGWPTCLKAVAAVALLLKDADKLTLGQNVTVIASHSLESIVRQPPDRWMTNARMTHYQSLLLNERVSFAPPAVLNPATLLPVESEATPVHRCSEILAEETGTRRDLKDQPLPGVPAWYTDGSSFIAEGKRRAGAAIVDGKRTVWASSLPEGTSAQKAELVALTQALRLAEGKDINIYTDSRYAFATAHIHGAIYKQRGWLTSAGKDIKNKEEILALLEAIHLPKRVAIIHCPGHQKGNDPVATGNRRADEAAKQAALSTRVLAETTKPAGKRTADGSEFEKRTADGSEFESPKKKAKVE

SEQ ID NO: 6840 - protein, 2096 aa, synthetic construct
MPAAKRVKLDGGDKKYSIGLDIGTNSVGWAVITDEYKVPSKKFKVLGNTDRHSIKKNLIGALLFDSGETAEATRLKRTARRRYTRRKNRICYLQEIFSNEMAKVDDSFFHRLEESFLVEEDKKHERHPIFGNIVDEVAYHEKYPTIYHLRKKLVDSTDKADLRLIYLALAHMIKFRGHFLIEGDLNPDNSDVDKLFIQLVQTYNQLFEENPINASGVDAKAILSARLSKSRRLENLIAQLPGEKKNGLFGNLIALSLGLTPNFKSNFDLAEDAKLQLSKDTYDDDLDNLLAQIGDQYADLFLAAKNLSDAILLSDILRVNTEITKAPLSASMIKRYDEHHQDLTLLKALVRQQLPEKYKEIFFDQSKNGYAGYIDGGASQEEFYKFIKPILEKMDGTEELLVKLNREDLLRKQRTFDNGSIPHQIHLGELHAILRRQEDFYPFLKDNREKIEKILTFRIPYYVGPLARGNSRFAWMTRKSEETITPWNFEEVVDKGASAQSFIERMTNFDKNLPNEKVLPKHSLLYEYFTVYNELTKVKYVTEGMRKPAFLSGEQKKAIVDLLFKTNRKVTVKQLKEDYFKKIECFDSVEISGVEDRFNASLGTYHDLLKIIKDKDFLDNEENEDILEDIVLTLTLFEDREMIEERLKTYAHLFDDKVMKQLKRRRYTGWGRLSRKLINGIRDKQSGKTILDFLKSDGFANRNFMQLIHDDSLTFKEDIQKAQVSGQGDSLHEHIANLAGSPAIKKGILQTVKVVDELVKVMGRHKPENIVIEMARENQTTQKGQKNSRERMKRIEEGIKELGSQILKEHPVENTQLQNEKLYLYYLQNGRDMYVDQELDINRLSDYDVDHIVPQSFLKDDSIDNKVLTRSDKARGKSDNVPSEEVVKKMKNYWRQLLNAKLITQRKFDNLTKAERGGLSELDKAGFIKRQLVETRQITKHVAQILDSRMNTKYDENDKLIREVKVITLKSKLVSDFRKDFQFYKVREINNYHHAHDAYLNAVVGTALIKKYPKLESEFVYGDYKVYDVRKMIAKSEQEIGKATAKYFFYSNIMNFFKTEITLANGEIRKRPLIETNGETGEIVWDKGRDFATVRKVLSMPQVNIVKKTEVQTGGFSKESILPKRNSDKLIARKKDWDPKKYGGFDSPTVAYSVLVVAKVEKGKSKKLKSVKELLGITIMERSSFEKNPIDFLEAKGYKEVKKDLIIKLPKYSLFELENGRKRMLASAGELQKGNELALPSKYVNFLYLASHYEKLKGSPEDNEQKQLFVEQHKHYLDEIIEQISEFSKRVILADANLDKVLSAYNKHRDKPIREQAENIIHLFTLTNLGAPAAFKYFDTTIDRKRYTSTKEVLDATLIHQSITGLYETRIDLSQLGGDGGGGGGSSGGSGGTAPLEEEYRLFLEAPIQNVTLLEQWKREIPKVWAEINPPGLASTQAPIHVQLLSTALPVRVRQYPITLEAKRSLRETIRKFRAAGILRPVHSPWNTPLLPVRKSGTSEYRMVQDLREVNKRVETIHPTVPNPYTLLSLLPPDRIWYSVLDLKDAFFCIPLAPESQLIFAFEWADAEEGESGQLTWTRLPQGFKNSPTLFDEALNRDLQGFRLDHPSVSLLQYVDDLLIAADTQAACLSATRDLLMTLAELGYRVSGKKAQLCQEEVTYLGFKIHKGSRSLSNSRTQAILQIPVPKTKRQVREFLGTIGYCRLWIPGFAELAQPLYAATRGGNDPLVWGEKEEEAFQSLKLALTQPPALALPSLDKPFQLFVEETSGAAKGVLTQALGPWKRPVAYLSKRLDPVAAGWPRCLRAIAAAALLTREASKLTFGQDIEITSSHNLESLLRSPPDKWLTNARITQYQVLLLDPPRVRFKQTAALNPATLLPETDDTLPIHHCLDTLDSLTSTRPDLTDQPLAQAEATLFTDGSSYIRDGKRYAGAAVVTLDSVIWAEPLPIGTSAQKAELIALTKALEWSKDKSVNIYTDSRYAFATLHVHGMIYRERGLLTAGGKAIKNAPEILALLTAVWLPKRVAVMHCKGHQKDDAPTSTGNRRADEVAREVAIRPLSTQATISAGKRTADGSEFEKRTADGSEFESPKKKAKVE

SEQ ID NO: 6841 - protein, 2096 aa, synthetic construct
MPAAKRVKLDGGDKKYSIGLDIGTNSVGWAVITDEYKVPSKKFKVLGNTDRHSIKKNLIGALLFDSGETAEATRLKRTARRRYTRRKNRICYLQEIFSNEMAKVDDSFFHRLEESFLVEEDKKHERHPIFGNIVDEVAYHEKYPTIYHLRKKLVDSTDKADLRLIYLALAHMIKFRGHFLIEGDLNPDNSDVDKLFIQLVQTYNQLFEENPINASGVDAKAILSARLSKSRRLENLIAQLPGEKKNGLFGNLIALSLGLTPNFKSNFDLAEDAKLQLSKDTYDDDLDNLLAQIGDQYADLFLAAKNLSDAILLSDILRVNTEITKAPLSASMIKRYDEHHQDLTLLKALVRQQLPEKYKEIFFDQSKNGYAGYIDGGASQEEFYKFIKPILEKMDGTEELLVKLNREDLLRKQRTFDNGSIPHQIHLGELHAILRRQEDFYPFLKDNREKIEKILTFRIPYYVGPLARGNSRFAWMTRKSEETITPWNFEEVVDKGASAQSFIERMTNFDKNLPNEKVLPKHSLLYEYFTVYNELTKVKYVTEGMRKPAFLSGEQKKAIVDLLFKTNRKVTVKQLKEDYFKKIECFDSVEISGVEDRFNASLGTYHDLLKIIKDKDFLDNEENEDILEDIVLTLTLFEDREMIEERLKTYAHLFDDKVMKQLKRRRYTGWGRLSRKLINGIRDKQSGKTILDFLKSDGFANRNFMQLIHDDSLTFKEDIQKAQVSGQGDSLHEHIANLAGSPAIKKGILQTVKVVDELVKVMGRHKPENIVIEMARENQTTQKGQKNSRERMKRIEEGIKELGSQILKEHPVENTQLQNEKLYLYYLQNGRDMYVDQELDINRLSDYDVDHIVPQSFLKDDSIDNKVLTRSDKARGKSDNVPSEEVVKKMKNYWRQLLNAKLITQRKFDNLTKAERGGLSELDKAGFIKRQLVETRQITKHVAQILDSRMNTKYDENDKLIREVKVITLKSKLVSDFRKDFQFYKVREINNYHHAHDAYLNAVVGTALIKKYPKLESEFVYGDYKVYDVRKMIAKSEQEIGKATAKYFFYSNIMNFFKTEITLANGEIRKRPLIETNGETGEIVWDKGRDFATVRKVLSMPQVNIVKKTEVQTGGFSKESILPKRNSDKLIARKKDWDPKKYGGFDSPTVAYSVLVVAKVEKGKSKKLKSVKELLGITIMERSSFEKNPIDFLEAKGYKEVKKDLIIKLPKYSLFELENGRKRMLASAGELQKGNELALPSKYVNFLYLASHYEKLKGSPEDNEQKQLFVEQHKHYLDEIIEQISEFSKRVILADANLDKVLSAYNKHRDKPIREQAENIIHLFTLTNLGAPAAFKYFDTTIDRKRYTSTKEVLDATLIHQSITGLYETRIDLSQLGGDGGGGGGSSGGSGGTAPLEEEYRLFLEAPIQNVTLLEQWKREIPKVWAEINPPGLASTQAPIHVQLLSTALPVRVRQYPITLEAKRSLRETIRKFRAAGILRPVHSPWNTPLLPVRKSGTSEYRMVQDLREVNKRVETIHPTVPNPYTLLSLLPPDRIWYSVLDLKDAFFCIPLAPESQLIFAFEWADAEEGESGQLTWTRLPQGFKNSPTLFNEALNRDLQGFRLDHPSVSLLQYVDDLLIAADTQAACLSATRDLLMTLAELGYRVSGKKAQLCQEEVTYLGFKIHKGSRSLSNSRTQAILQIPVPKTKRQVREFLGTIGYCRLWIPGFAELAQPLYAATRPGNDPLVWGEKEEEAFQSLKLALTQPPALALPSLDKPFQLFVEETSGAAKGVLTQALGPWKRPVAYLSKRLDPVAAGWPRCLRAIAAAALLTREASKLTFGQDIEITSSHNLESLLRSPPDKWLTNARITQYQVLLLDPPRVRFKQTAALNPATLLPETDDTLPIHHCLDTLDSLTSTRPDLTDQPLAQAEATLFTDGSSYIRDGKRYAGAAVVTLDSVIWAEPLPIGTSAQKAELIALTKALEWSKDKSVNIYTDSRYAFATLHVHGMIYRERGWLTAGGKAIKNAPEILALLTAVWLPKRVAVMHCKGHQKDDAPTSTGNRRADEVAREVAIRPLSTQATISAGKRTADGSEFEKRTADGSEFESPKKKAKVE

SEQ ID NO: 6842 - protein, 2100 aa, synthetic construct
MPAAKRVKLDGGDKKYSIGLDIGTNSVGWAVITDEYKVPSKKFKVLGNTDRHSIKKNLIGALLFDSGETAEATRLKRTARRRYTRRKNRICYLQEIFSNEMAKVDDSFFHRLEESFLVEEDKKHERHPIFGNIVDEVAYHEKYPTIYHLRKKLVDSTDKADLRLIYLALAHMIKFRGHFLIEGDLNPDNSDVDKLFIQLVQTYNQLFEENPINASGVDAKAILSARLSKSRRLENLIAQLPGEKKNGLFGNLIALSLGLTPNFKSNFDLAEDAKLQLSKDTYDDDLDNLLAQIGDQYADLFLAAKNLSDAILLSDILRVNTEITKAPLSASMIKRYDEHHQDLTLLKALVRQQLPEKYKEIFFDQSKNGYAGYIDGGASQEEFYKFIKPILEKMDGTEELLVKLNREDLLRKQRTFDNGSIPHQIHLGELHAILRRQEDFYPFLKDNREKIEKILTFRIPYYVGPLARGNSRFAWMTRKSEETITPWNFEEVVDKGASAQSFIERMTNFDKNLPNEKVLPKHSLLYEYFTVYNELTKVKYVTEGMRKPAFLSGEQKKAIVDLLFKTNRKVTVKQLKEDYFKKIECFDSVEISGVEDRFNASLGTYHDLLKIIKDKDFLDNEENEDILEDIVLTLTLFEDREMIEERLKTYAHLFDDKVMKQLKRRRYTGWGRLSRKLINGIRDKQSGKTILDFLKSDGFANRNFMQLIHDDSLTFKEDIQKAQVSGQGDSLHEHIANLAGSPAIKKGILQTVKVVDELVKVMGRHKPENIVIEMARENQTTQKGQKNSRERMKRIEEGIKELGSQILKEHPVENTQLQNEKLYLYYLQNGRDMYVDQELDINRLSDYDVDHIVPQSFLKDDSIDNKVLTRSDKARGKSDNVPSEEVVKKMKNYWRQLLNAKLITQRKFDNLTKAERGGLSELDKAGFIKRQLVETRQITKHVAQILDSRMNTKYDENDKLIREVKVITLKSKLVSDFRKDFQFYKVREINNYHHAHDAYLNAVVGTALIKKYPKLESEFVYGDYKVYDVRKMIAKSEQEIGKATAKYFFYSNIMNFFKTEITLANGEIRKRPLIETNGETGEIVWDKGRDFATVRKVLSMPQVNIVKKTEVQTGGFSKESILPKRNSDKLIARKKDWDPKKYGGFDSPTVAYSVLVVAKVEKGKSKKLKSVKELLGITIMERSSFEKNPIDFLEAKGYKEVKKDLIIKLPKYSLFELENGRKRMLASAGELQKGNELALPSKYVNFLYLASHYEKLKGSPEDNEQKQLFVEQHKHYLDEIIEQISEFSKRVILADANLDKVLSAYNKHRDKPIREQAENIIHLFTLTNLGAPAAFKYFDTTIDRKRYTSTKEVLDATLIHQSITGLYETRIDLSQLGGDGGGGGGSSGGSGGTVSLQDEHRLFDIPVTTSLPDVWLQDFPQAWAETGGLGRAKCQAPIIIDLKPTAVPVSIKQYPMSLEAHMGIRQHIIKFLELGVLRPCRSPWNTPLLPVKKPGTQDYRPVQDLREINKRTVDIHPTVPNPYNLLSTLKPDYSWYTVLDLKDAFFCLPLAPQSQELFAFEWKDPERGISGQLTWTRLPQGFKNSPTLFNEALHRDLTDFRTQHPEVTLLQYVDDLLLAAPTKKACTQGTRHLLQELGEKGYRASAKKAQICQTKVTYLGYILSEGKRWLTPGRIETVARIPPPRNPREVREFLGTAGFCRLWIPGFAELAAPLYALTKPSTPFTWQTEHQLAFEALKKALLSAPALGLPDTSKPFTLFLDERQGIAKGVLTQKLGPWKRPVAYLSKKLDPVAAGWPPCLRIMAATAMLVKDSAKLTLGQPLTVITPHTLEAIVRQPPDRWITNARLTHYQALLLDTDRVQFGPPVTLNPATLLPVPENQPSPHDCRQVLAETHGTREDLKDQELPDADHTWYTDGSSYLDSGTRRAGAAVVDGHNTIWAQSLPPGTSAQKAELIALTKALELSKGKKANIYTDSRYAFATAHTHGSIYERRGWLTSEGKEIKNKAEIIALLKALFLPQEVAIIHCPGHQKGQDPVAVGNRQADRVARQAAMAEVLTLATEPDNTSHITAGKRTADGSEFEKRTADGSEFESPKKKAKVE

SEQ ID NO: 6843 - protein, 2085 aa, synthetic construct
MPAAKRVKLDGGDKKYSIGLDIGTNSVGWAVITDEYKVPSKKFKVLGNTDRHSIKKNLIGALLFDSGETAEATRLKRTARRRYTRRKNRICYLQEIFSNEMAKVDDSFFHRLEESFLVEEDKKHERHPIFGNIVDEVAYHEKYPTIYHLRKKLVDSTDKADLRLIYLALAHMIKFRGHFLIEGDLNPDNSDVDKLFIQLVQTYNQLFEENPINASGVDAKAILSARLSKSRRLENLIAQLPGEKKNGLFGNLIALSLGLTPNFKSNFDLAEDAKLQLSKDTYDDDLDNLLAQIGDQYADLFLAAKNLSDAILLSDILRVNTEITKAPLSASMIKRYDEHHQDLTLLKALVRQQLPEKYKEIFFDQSKNGYAGYIDGGASQEEFYKFIKPILEKMDGTEELLVKLNREDLLRKQRTFDNGSIPHQIHLGELHAILRRQEDFYPFLKDNREKIEKILTFRIPYYVGPLARGNSRFAWMTRKSEETITPWNFEEVVDKGASAQSFIERMTNFDKNLPNEKVLPKHSLLYEYFTVYNELTKVKYVTEGMRKPAFLSGEQKKAIVDLLFKTNRKVTVKQLKEDYFKKIECFDSVEISGVEDRFNASLGTYHDLLKIIKDKDFLDNEENEDILEDIVLTLTLFEDREMIEERLKTYAHLFDDKVMKQLKRRRYTGWGRLSRKLINGIRDKQSGKTILDFLKSDGFANRNFMQLIHDDSLTFKEDIQKAQVSGQGDSLHEHIANLAGSPAIKKGILQTVKVVDELVKVMGRHKPENIVIEMARENQTTQKGQKNSRERMKRIEEGIKELGSQILKEHPVENTQLQNEKLYLYYLQNGRDMYVDQELDINRLSDYDVDHIVPQSFLKDDSIDNKVLTRSDKARGKSDNVPSEEVVKKMKNYWRQLLNAKLITQRKFDNLTKAERGGLSELDKAGFIKRQLVETRQITKHVAQILDSRMNTKYDENDKLIREVKVITLKSKLVSDFRKDFQFYKVREINNYHHAHDAYLNAVVGTALIKKYPKLESEFVYGDYKVYDVRKMIAKSEQEIGKATAKYFFYSNIMNFFKTEITLANGEIRKRPLIETNGETGEIVWDKGRDFATVRKVLSMPQVNIVKKTEVQTGGFSKESILPKRNSDKLIARKKDWDPKKYGGFDSPTVAYSVLVVAKVEKGKSKKLKSVKELLGITIMERSSFEKNPIDFLEAKGYKEVKKDLIIKLPKYSLFELENGRKRMLASAGELQKGNELALPSKYVNFLYLASHYEKLKGSPEDNEQKQLFVEQHKHYLDEIIEQISEFSKRVILADANLDKVLSAYNKHRDKPIREQAENIIHLFTLTNLGAPAAFKYFDTTIDRKRYTSTKEVLDATLIHQSITGLYETRIDLSQLGGDGGGGGGSSGGSGGVPWILKKPLELTIKLDLEEQQGTLLNNSILSKKGKEELKQLFEKYSALWQSWENQVGHRRIRPHKIATGTVKPTPQKQYHINPKAKPDIQIVINDLLKQGVLIQKESTMNTPVYPVPKPNGRWRMVLDYRAVNKVTPLIAVQNQHSYGILGSLFKGRYKTTIDLSNGFWAHPIVPEDYWITAFTWQGKQYCWTVLPQGFLNSPGLFTGDVVDLLQGIPNVEVYVDDVYISHDSEKEHLEYLDILFNRLKEAGYIISLKKSNIANSIVDFLGFQITNEGRGLTDTFKEKLENITAPTTLKQLQSILGLLNFARNFIPDFTELIAPLYALIPKSTKNYVPWQIEHSTTLETLITKLNGAEYLQGRKGDKTLIMKVNASYTTGYIRYYNEGEKKPISYVSIVFSKTELKFTELEKLLTTVHKGLLKALDLSMGQNIHVYSPIVSMQNIQKTPQTAKKALASRWLSWLSYLEDPRIRFFYDPQMPALKDLPAVDTGKDNKKHPSNFQHIFYTDGSAITSPTKEGHLNAGMGIVYFINKDGNLQKQQEWSISLGNHTAQFAEIAAFEFALKKCLPLGGNILVVTDSNYVAKAYNEELDVWASNGFVNNRKKPLKHISKWKSVADLKRLRPDVVVTHEPGHQKLDSSPHAYGNNLADQLATQASFKVHAGKRTADGSEFEKRTADGSEFESPKKKAKVE

SEQ ID NO: 6844 - protein, 2093 aa, synthetic construct
MPAAKRVKLDGGDKKYSIGLDIGTNSVGWAVITDEYKVPSKKFKVLGNTDRHSIKKNLIGALLFDSGETAEATRLKRTARRRYTRRKNRICYLQEIFSNEMAKVDDSFFHRLEESFLVEEDKKHERHPIFGNIVDEVAYHEKYPTIYHLRKKLVDSTDKADLRLIYLALAHMIKFRGHFLIEGDLNPDNSDVDKLFIQLVQTYNQLFEENPINASGVDAKAILSARLSKSRRLENLIAQLPGEKKNGLFGNLIALSLGLTPNFKSNFDLAEDAKLQLSKDTYDDDLDNLLAQIGDQYADLFLAAKNLSDAILLSDILRVNTEITKAPLSASMIKRYDEHHQDLTLLKALVRQQLPEKYKEIFFDQSKNGYAGYIDGGASQEEFYKFIKPILEKMDGTEELLVKLNREDLLRKQRTFDNGSIPHQIHLGELHAILRRQEDFYPFLKDNREKIEKILTFRIPYYVGPLARGNSRFAWMTRKSEETITPWNFEEVVDKGASAQSFIERMTNFDKNLPNEKVLPKHSLLYEYFTVYNELTKVKYVTEGMRKPAFLSGEQKKAIVDLLFKTNRKVTVKQLKEDYFKKIECFDSVEISGVEDRFNASLGTYHDLLKIIKDKDFLDNEENEDILEDIVLTLTLFEDREMIEERLKTYAHLFDDKVMKQLKRRRYTGWGRLSRKLINGIRDKQSGKTILDFLKSDGFANRNFMQLIHDDSLTFKEDIQKAQVSGQGDSLHEHIANLAGSPAIKKGILQTVKVVDELVKVMGRHKPENIVIEMARENQTTQKGQKNSRERMKRIEEGIKELGSQILKEHPVENTQLQNEKLYLYYLQNGRDMYVDQELDINRLSDYDVDHIVPQSFLKDDSIDNKVLTRSDKARGKSDNVPSEEVVKKMKNYWRQLLNAKLITQRKFDNLTKAERGGLSELDKAGFIKRQLVETRQITKHVAQILDSRMNTKYDENDKLIREVKVITLKSKLVSDFRKDFQFYKVREINNYHHAHDAYLNAVVGTALIKKYPKLESEFVYGDYKVYDVRKMIAKSEQEIGKATAKYFFYSNIMNFFKTEITLANGEIRKRPLIETNGETGEIVWDKGRDFATVRKVLSMPQVNIVKKTEVQTGGFSKESILPKRNSDKLIARKKDWDPKKYGGFDSPTVAYSVLVVAKVEKGKSKKLKSVKELLGITIMERSSFEKNPIDFLEAKGYKEVKKDLIIKLPKYSLFELENGRKRMLASAGELQKGNELALPSKYVNFLYLASHYEKLKGSPEDNEQKQLFVEQHKHYLDEIIEQISEFSKRVILADANLDKVLSAYNKHRDKPIREQAENIIHLFTLTNLGAPAAFKYFDTTIDRKRYTSTKEVLDATLIHQSITGLYETRIDLSQLGGDGGGGGGSSGGSGGTLQLEEEYRLFEPESTQKQEMDIWLKNFPQAWAETGGMGTAHCQAPVLIQLKATATPISIRQYPMPHEAYQGIKPHIRRMLDQGILKPCQSPWNTPLLPVKKPGTEDYRPVQDLREVNKRVEDIHPTVPNPYNLLSTLPPSHPWYTVLDLKDAFFCLRLHSESQLLFAFEWRDPEIGLSGQLTWTRLPQGFKNSPTLFNEALHSDLADFRVRYPALVLLQYVDDLLLAAATRTECLEGTKALLETLGNKGYRASAKKAQICLQEVTYLGYSLKDGQRWLTKARKEAILSIPVPKNSRQVREFLGTAGYCRLWIPGFAELAAPLYPLTRPGTLFQWGTEQQLAFEDIKKALLSSPALGLPDITKPFELFIDENSGFAKGVLVQKLGPWKRPVAYLSKKLDTVASGWPPCLRMVAAIAILVKDAGKLTLGQPLTILTSHPVEALVRQPPNKWLSNARMTHYQAMLLDAERVHFGPTVSLNPATLLPLPSGGNHHDCLQILAETHGTRPDLTDQPLPDADLTWYTDGSSFIRNGEREAGAAVTTESEVIWAAPLPPGTSAQRAELIALTQALKMAEGKKLTVYTDSRYAFATTHVHGEIYRRRGWLTSEGKEIKNKNEILALLEALFLPKRLSIIHCPGHQKGDSPQAKGNRLADDTAKKAATETHSSLTVLPAGKRTADGSEFEKRTADGSEFESPKKKAKVE

SEQ ID NO: 6845 - protein, 2125 aa, synthetic construct
MPAAKRVKLDGGDKKYSIGLDIGTNSVGWAVITDEYKVPSKKFKVLGNTDRHSIKKNLIGALLFDSGETAEATRLKRTARRRYTRRKNRICYLQEIFSNEMAKVDDSFFHRLEESFLVEEDKKHERHPIFGNIVDEVAYHEKYPTIYHLRKKLVDSTDKADLRLIYLALAHMIKFRGHFLIEGDLNPDNSDVDKLFIQLVQTYNQLFEENPINASGVDAKAILSARLSKSRRLENLIAQLPGEKKNGLFGNLIALSLGLTPNFKSNFDLAEDAKLQLSKDTYDDDLDNLLAQIGDQYADLFLAAKNLSDAILLSDILRVNTEITKAPLSASMIKRYDEHHQDLTLLKALVRQQLPEKYKEIFFDQSKNGYAGYIDGGASQEEFYKFIKPILEKMDGTEELLVKLNREDLLRKQRTFDNGSIPHQIHLGELHAILRRQEDFYPFLKDNREKIEKILTFRIPYYVGPLARGNSRFAWMTRKSEETITPWNFEEVVDKGASAQSFIERMTNFDKNLPNEKVLPKHSLLYEYFTVYNELTKVKYVTEGMRKPAFLSGEQKKAIVDLLFKTNRKVTVKQLKEDYFKKIECFDSVEISGVEDRFNASLGTYHDLLKIIKDKDFLDNEENEDILEDIVLTLTLFEDREMIEERLKTYAHLFDDKVMKQLKRRRYTGWGRLSRKLINGIRDKQSGKTILDFLKSDGFANRNFMQLIHDDSLTFKEDIQKAQVSGQGDSLHEHIANLAGSPAIKKGILQTVKVVDELVKVMGRHKPENIVIEMARENQTTQKGQKNSRERMKRIEEGIKELGSQILKEHPVENTQLQNEKLYLYYLQNGRDMYVDQELDINRLSDYDVDHIVPQSFLKDDSIDNKVLTRSDKARGKSDNVPSEEVVKKMKNYWRQLLNAKLITQRKFDNLTKAERGGLSELDKAGFIKRQLVETRQITKHVAQILDSRMNTKYDENDKLIREVKVITLKSKLVSDFRKDFQFYKVREINNYHHAHDAYLNAVVGTALIKKYPKLESEFVYGDYKVYDVRKMIAKSEQEIGKATAKYFFYSNIMNFFKTEITLANGEIRKRPLIETNGETGEIVWDKGRDFATVRKVLSMPQVNIVKKTEVQTGGFSKESILPKRNSDKLIARKKDWDPKKYGGFDSPTVAYSVLVVAKVEKGKSKKLKSVKELLGITIMERSSFEKNPIDFLEAKGYKEVKKDLIIKLPKYSLFELENGRKRMLASAGELQKGNELALPSKYVNFLYLASHYEKLKGSPEDNEQKQLFVEQHKHYLDEIIEQISEFSKRVILADANLDKVLSAYNKHRDKPIREQAENIIHLFTLTNLGAPAAFKYFDTTIDRKRYTSTKEVLDATLIHQSITGLYETRIDLSQLGGDGGGGGGSSGGSGGLLGRDLLTKLKAQIQFSTEGPQVTWEDRPAMCLVLNLEEEYRLHEKPVPPSIDPSWLQLFPMVWAEKAGMGLANQVPPVVVELKSDASPVAVRQYPMSKEAREGIRPHIQRFLDLGILVPCQSPWNTPLLPVKKPGTNDYRPVQDLREVNKRVQDIHPTVPNPYNLLSSLPPSHTWYSVLDLKDAFFCLKLHPNSQPLFAFEWRDPEKGNTGQLTWTRLPQGFKNSPTLFNEALHRDLASFRALNPQVVMLQYVDDLLVAAPTYRDCKEGTRRLLQELSKLGYRVSAKKAQLCREEVTYLGYLLKGGKRWLTPARKATVMKIPTPTTPRQVREFLGTAGFCRLWIPGFASLAAPLYPLTRPKVPFTWTEAHQEAFGRIKEALLSAPALALPDLTKPFALYVDEKEGVARGVLTQTLGPWRRPVAYLSKKLDPVASGWPTCLKAIAAVALLLKDADKLTLGQNVLVIAPHNLESIVRQPPDRWMTNARMTHYQSLLLNERVSFAPPAILNPATLLPVESDDTPIHICSEILAEETGTRPDLRDQPLPGVPAWYTDGSSFIMDGRRQAGAAIVDNKRTVWASNLPEGTSAQKAELIALTQALRLAEGKSINIYTDSRYAFATAHVHGAIYKQRGWLTSAGKDIKNKEEILALLEAIHLPKRVAIIHCPGHQRGTDPVATGNRKADEAAKQAAQSTRILTETTKNAGKRTADGSEFEKRTADGSEFESPKKKAKVE

SEQ ID NO: 6846 - protein, 2125 aa, synthetic construct
MPAAKRVKLDGGDKKYSIGLDIGTNSVGWAVITDEYKVPSKKFKVLGNTDRHSIKKNLIGALLFDSGETAEATRLKRTARRRYTRRKNRICYLQEIFSNEMAKVDDSFFHRLEESFLVEEDKKHERHPIFGNIVDEVAYHEKYPTIYHLRKKLVDSTDKADLRLIYLALAHMIKFRGHFLIEGDLNPDNSDVDKLFIQLVQTYNQLFEENPINASGVDAKAILSARLSKSRRLENLIAQLPGEKKNGLFGNLIALSLGLTPNFKSNFDLAEDAKLQLSKDTYDDDLDNLLAQIGDQYADLFLAAKNLSDAILLSDILRVNTEITKAPLSASMIKRYDEHHQDLTLLKALVRQQLPEKYKEIFFDQSKNGYAGYIDGGASQEEFYKFIKPILEKMDGTEELLVKLNREDLLRKQRTFDNGSIPHQIHLGELHAILRRQEDFYPFLKDNREKIEKILTFRIPYYVGPLARGNSRFAWMTRKSEETITPWNFEEVVDKGASAQSFIERMTNFDKNLPNEKVLPKHSLLYEYFTVYNELTKVKYVTEGMRKPAFLSGEQKKAIVDLLFKTNRKVTVKQLKEDYFKKIECFDSVEISGVEDRFNASLGTYHDLLKIIKDKDFLDNEENEDILEDIVLTLTLFEDREMIEERLKTYAHLFDDKVMKQLKRRRYTGWGRLSRKLINGIRDKQSGKTILDFLKSDGFANRNFMQLIHDDSLTFKEDIQKAQVSGQGDSLHEHIANLAGSPAIKKGILQTVKVVDELVKVMGRHKPENIVIEMARENQTTQKGQKNSRERMKRIEEGIKELGSQILKEHPVENTQLQNEKLYLYYLQNGRDMYVDQELDINRLSDYDVDHIVPQSFLKDDSIDNKVLTRSDKARGKSDNVPSEEVVKKMKNYWRQLLNAKLITQRKFDNLTKAERGGLSELDKAGFIKRQLVETRQITKHVAQILDSRMNTKYDENDKLIREVKVITLKSKLVSDFRKDFQFYKVREINNYHHAHDAYLNAVVGTALIKKYPKLESEFVYGDYKVYDVRKMIAKSEQEIGKATAKYFFYSNIMNFFKTEITLANGEIRKRPLIETNGETGEIVWDKGRDFATVRKVLSMPQVNIVKKTEVQTGGFSKESILPKRNSDKLIARKKDWDPKKYGGFDSPTVAYSVLVVAKVEKGKSKKLKSVKELLGITIMERSSFEKNPIDFLEAKGYKEVKKDLIIKLPKYSLFELENGRKRMLASAGELQKGNELALPSKYVNFLYLASHYEKLKGSPEDNEQKQLFVEQHKHYLDEIIEQISEFSKRVILADANLDKVLSAYNKHRDKPIREQAENIIHLFTLTNLGAPAAFKYFDTTIDRKRYTSTKEVLDATLIHQSITGLYETRIDLSQLGGDGGGGGGSSGGSGGLLGRDLLTKLKAQIQFSTEGPQVTWEDRPAMCLVLNLEEEYRLHEKPVPPSIDPSWLQLFPMVWAEKAGMGLANQVPPVVVELKSDASPVAVRQYPMSKEAREGIRPHIQRFLDLGILVPCQSPWNTPLLPVKKPGTNDYRPVQDLREVNKRVQDIHPTVPNPYNLLSSLPPSHTWYSVLDLKDAFFCLKLHPNSQPLFAFEWRDPEKGNTGQLTWTRLPQGFKNSPTLFNEALHRDLASFRALNPQVVMLQYVDDLLVAAPTYRDCKEGTRRLLQELSKLGYRVSAKKAQLCREEVTYLGYLLKGGKRWLTPARKATVMKIPTPTTPRQVREFLGKAGFCRLFIPGFASLAAPLYPLTRPKVPFTWTEAHQEAFGRIKEALLSAPALALPDLTKPFALYVDEKEGVARGVLTQTLGPWRRPVAYLSKKLDPVASGWPTCLKAIAAVALLLKDADKLTLGQNVLVIAPHNLESIVRQPPDRWMTNARMTHYQSLLLNERVSFAPPAILNPATLLPVESDDTPIHICSEILAEETGTRPDLRDQPLPGVPAWYTDGSSFIMDGRRQAGAAIVDNKRTVWASNLPEGTSAQKAELIALTQALRLAEGKSINIYTDSRYAFATAHVHGAIYKQRGWLTSAGKDIKNKEEILALLEAIHLPKRVAIIHCPGHQRGTDPVATGNRKADEAAKQAAQSTRILTETTKNAGKRTADGSEFEKRTADGSEFESPKKKAKVE

SEQ ID NO: 6847 - protein, 2216 aa, synthetic construct
MPAAKRVKLDGGDKKYSIGLDIGTNSVGWAVITDEYKVPSKKFKVLGNTDRHSIKKNLIGALLFDSGETAEATRLKRTARRRYTRRKNRICYLQEIFSNEMAKVDDSFFHRLEESFLVEEDKKHERHPIFGNIVDEVAYHEKYPTIYHLRKKLVDSTDKADLRLIYLALAHMIKFRGHFLIEGDLNPDNSDVDKLFIQLVQTYNQLFEENPINASGVDAKAILSARLSKSRRLENLIAQLPGEKKNGLFGNLIALSLGLTPNFKSNFDLAEDAKLQLSKDTYDDDLDNLLAQIGDQYADLFLAAKNLSDAILLSDILRVNTEITKAPLSASMIKRYDEHHQDLTLLKALVRQQLPEKYKEIFFDQSKNGYAGYIDGGASQEEFYKFIKPILEKMDGTEELLVKLNREDLLRKQRTFDNGSIPHQIHLGELHAILRRQEDFYPFLKDNREKIEKILTFRIPYYVGPLARGNSRFAWMTRKSEETITPWNFEEVVDKGASAQSFIERMTNFDKNLPNEKVLPKHSLLYEYFTVYNELTKVKYVTEGMRKPAFLSGEQKKAIVDLLFKTNRKVTVKQLKEDYFKKIECFDSVEISGVEDRFNASLGTYHDLLKIIKDKDFLDNEENEDILEDIVLTLTLFEDREMIEERLKTYAHLFDDKVMKQLKRRRYTGWGRLSRKLINGIRDKQSGKTILDFLKSDGFANRNFMQLIHDDSLTFKEDIQKAQVSGQGDSLHEHIANLAGSPAIKKGILQTVKVVDELVKVMGRHKPENIVIEMARENQTTQKGQKNSRERMKRIEEGIKELGSQILKEHPVENTQLQNEKLYLYYLQNGRDMYVDQELDINRLSDYDVDHIVPQSFLKDDSIDNKVLTRSDKARGKSDNVPSEEVVKKMKNYWRQLLNAKLITQRKFDNLTKAERGGLSELDKAGFIKRQLVETRQITKHVAQILDSRMNTKYDENDKLIREVKVITLKSKLVSDFRKDFQFYKVREINNYHHAHDAYLNAVVGTALIKKYPKLESEFVYGDYKVYDVRKMIAKSEQEIGKATAKYFFYSNIMNFFKTEITLANGEIRKRPLIETNGETGEIVWDKGRDFATVRKVLSMPQVNIVKKTEVQTGGFSKESILPKRNSDKLIARKKDWDPKKYGGFDSPTVAYSVLVVAKVEKGKSKKLKSVKELLGITIMERSSFEKNPIDFLEAKGYKEVKKDLIIKLPKYSLFELENGRKRMLASAGELQKGNELALPSKYVNFLYLASHYEKLKGSPEDNEQKQLFVEQHKHYLDEIIEQISEFSKRVILADANLDKVLSAYNKHRDKPIREQAENIIHLFTLTNLGAPAAFKYFDTTIDRKRYTSTKEVLDATLIHQSITGLYETRIDLSQLGGDGGGGGGSSGGSGGTLGDQGSRGSDPLPEPRVTLTVEGIPTEFLVNTGAEHSVLTKPMGKMGSKRTVVAGATGSKVYPWTTKRLLKIGQKQVTHSFLVIPECPAPLLGRDLLTKLKAQIQFSTEGPQVTWEDRPAMCLVLNLEEEYRLHEKPVPPSIDPSWLQLFPMVWAEKAGMGLANQVPPVVVELKSDASPVAVRQYPMSKEAREGIRPHIQRFLDLGILVPCQSPWNTPLLPVKKPGTNDYRPVQDLREVNKRVQDIHPTVPNPYNLLSSLPPSHTWYSVLDLKDAFFCLKLHPNSQPLFAFEWRDPEKGNTGQLTWTRLPQGFKNSPTLFNEALHRDLASFRALNPQVVMLQYVDDLLVAAPTYRDCKEGTRRLLQELSKLGYRVSAKKAQLCREEVTYLGYLLKGGKRWLTPARKATVMKIPTPTTPRQVREFLGKAGFCRLFIPGFASLAAPLYPLTRPKVPFTWTEAHQEAFGRIKEALLSAPALALPDLTKPFALYVDEKEGVARGVLTQTLGPWRRPVAYLSKKLDPVASGWPTCLKAIAAVALLLKDADKLTLGQNVLVIAPHNLESIVRQPPDRWMTNARMTHYQSLLLNERVSFAPPAILNPATLLPVESDDTPIHICSEILAEETGTRPDLRDQPLPGVPAWYTDGSSFIMDGRRQAGAAIVDNKRTVWASNLPEGTSAQKAELIALTQALRLAEGKSINIYTDSRYAFATAHVHGAIYKQRGWLTSAGKDIKNKEEILALLEAIHLPKRVAIIHCPGHQRGTDPVATGNRKADEAAKQAAQSTRILTETTKNAGKRTADGSEFEKRTADGSEFESPKKKAKVE

SEQ ID NO: 6848 - protein, 2094 aa, synthetic construct
MPAAKRVKLDGGDKKYSIGLDIGTNSVGWAVITDEYKVPSKKFKVLGNTDRHSIKKNLIGALLFDSGETAEATRLKRTARRRYTRRKNRICYLQEIFSNEMAKVDDSFFHRLEESFLVEEDKKHERHPIFGNIVDEVAYHEKYPTIYHLRKKLVDSTDKADLRLIYLALAHMIKFRGHFLIEGDLNPDNSDVDKLFIQLVQTYNQLFEENPINASGVDAKAILSARLSKSRRLENLIAQLPGEKKNGLFGNLIALSLGLTPNFKSNFDLAEDAKLQLSKDTYDDDLDNLLAQIGDQYADLFLAAKNLSDAILLSDILRVNTEITKAPLSASMIKRYDEHHQDLTLLKALVRQQLPEKYKEIFFDQSKNGYAGYIDGGASQEEFYKFIKPILEKMDGTEELLVKLNREDLLRKQRTFDNGSIPHQIHLGELHAILRRQEDFYPFLKDNREKIEKILTFRIPYYVGPLARGNSRFAWMTRKSEETITPWNFEEVVDKGASAQSFIERMTNFDKNLPNEKVLPKHSLLYEYFTVYNELTKVKYVTEGMRKPAFLSGEQKKAIVDLLFKTNRKVTVKQLKEDYFKKIECFDSVEISGVEDRFNASLGTYHDLLKIIKDKDFLDNEENEDILEDIVLTLTLFEDREMIEERLKTYAHLFDDKVMKQLKRRRYTGWGRLSRKLINGIRDKQSGKTILDFLKSDGFANRNFMQLIHDDSLTFKEDIQKAQVSGQGDSLHEHIANLAGSPAIKKGILQTVKVVDELVKVMGRHKPENIVIEMARENQTTQKGQKNSRERMKRIEEGIKELGSQILKEHPVENTQLQNEKLYLYYLQNGRDMYVDQELDINRLSDYDVDHIVPQSFLKDDSIDNKVLTRSDKARGKSDNVPSEEVVKKMKNYWRQLLNAKLITQRKFDNLTKAERGGLSELDKAGFIKRQLVETRQITKHVAQILDSRMNTKYDENDKLIREVKVITLKSKLVSDFRKDFQFYKVREINNYHHAHDAYLNAVVGTALIKKYPKLESEFVYGDYKVYDVRKMIAKSEQEIGKATAKYFFYSNIMNFFKTEITLANGEIRKRPLIETNGETGEIVWDKGRDFATVRKVLSMPQVNIVKKTEVQTGGFSKESILPKRNSDKLIARKKDWDPKKYGGFDSPTVAYSVLVVAKVEKGKSKKLKSVKELLGITIMERSSFEKNPIDFLEAKGYKEVKKDLIIKLPKYSLFELENGRKRMLASAGELQKGNELALPSKYVNFLYLASHYEKLKGSPEDNEQKQLFVEQHKHYLDEIIEQISEFSKRVILADANLDKVLSAYNKHRDKPIREQAENIIHLFTLTNLGAPAAFKYFDTTIDRKRYTSTKEVLDATLIHQSITGLYETRIDLSQLGGDGGGGGGSSGGSGGTLGIEDEYRLHETSTEPDVSLGSTWLSDFPQAWAETGGMGLAVRQAPLIIPLKATSTPVSIQQYPMSHEARLGIKPHIQRLLDQGILVPCQSPWNTPLLPVKKPGTNDYRPVQDLREVNKRVEDIHPTVPNPYNLLSGLPPSHQWYTVLDLKDAFFCLRLHPTSQPLFAFEWRDPGMGISGQLTWTRLPQGFKNSPTLFNEALHRDLADFRIQHPDLILLQYVDDILLAATSELDCQQGTRALLQTLGDLGYRASAKKAQICQKQVKYLGYLLREGQRWLTEARKETVMGQPVPKTPRQLREFLGTAGFCRLWIPGFAEMAAPLYPLTKPGTLFSWGPDQQKAYQEIKQALLTAPALGLPDLTKPFELFVDEKQGYAKGVLTQKLGPWRRPVAYLSKKLDPVAAGWPPCLRMVAAIAVLTKDAGKLTMGQPLVILAPHAVEALVKQPPDRWLSNARMTHYQAMLLDTDRVQFGPVVALNPATLLPLPEEGAPHDCLEILAETHGTRPDLTDQPIPDADHTWYTDGSSFLQEGQRKAGAAVTTETEVIWAGALPAGTSAQRAELIALTQALKMAEGKRLNVYTDSRYAFATAHIHGEIYRRRGWLTSEGREIKNKSEILALLKALFLPKRLSIIHCLGHQKGDSAEARGNRLADQAAREAAIKTPPDTSTLLAGKRTADGSEFEKRTADGSEFESPKKKAKVE

SEQ ID NO: 6849 - protein, 2094 aa, synthetic construct
MPAAKRVKLDGGDKKYSIGLDIGTNSVGWAVITDEYKVPSKKFKVLGNTDRHSIKKNLIGALLFDSGETAEATRLKRTARRRYTRRKNRICYLQEIFSNEMAKVDDSFFHRLEESFLVEEDKKHERHPIFGNIVDEVAYHEKYPTIYHLRKKLVDSTDKADLRLIYLALAHMIKFRGHFLIEGDLNPDNSDVDKLFIQLVQTYNQLFEENPINASGVDAKAILSARLSKSRRLENLIAQLPGEKKNGLFGNLIALSLGLTPNFKSNFDLAEDAKLQLSKDTYDDDLDNLLAQIGDQYADLFLAAKNLSDAILLSDILRVNTEITKAPLSASMIKRYDEHHQDLTLLKALVRQQLPEKYKEIFFDQSKNGYAGYIDGGASQEEFYKFIKPILEKMDGTEELLVKLNREDLLRKQRTFDNGSIPHQIHLGELHAILRRQEDFYPFLKDNREKIEKILTFRIPYYVGPLARGNSRFAWMTRKSEETITPWNFEEVVDKGASAQSFIERMTNFDKNLPNEKVLPKHSLLYEYFTVYNELTKVKYVTEGMRKPAFLSGEQKKAIVDLLFKTNRKVTVKQLKEDYFKKIECFDSVEISGVEDRFNASLGTYHDLLKIIKDKDFLDNEENEDILEDIVLTLTLFEDREMIEERLKTYAHLFDDKVMKQLKRRRYTGWGRLSRKLINGIRDKQSGKTILDFLKSDGFANRNFMQLIHDDSLTFKEDIQKAQVSGQGDSLHEHIANLAGSPAIKKGILQTVKVVDELVKVMGRHKPENIVIEMARENQTTQKGQKNSRERMKRIEEGIKELGSQILKEHPVENTQLQNEKLYLYYLQNGRDMYVDQELDINRLSDYDVDHIVPQSFLKDDSIDNKVLTRSDKARGKSDNVPSEEVVKKMKNYWRQLLNAKLITQRKFDNLTKAERGGLSELDKAGFIKRQLVETRQITKHVAQILDSRMNTKYDENDKLIREVKVITLKSKLVSDFRKDFQFYKVREINNYHHAHDAYLNAVVGTALIKKYPKLESEFVYGDYKVYDVRKMIAKSEQEIGKATAKYFFYSNIMNFFKTEITLANGEIRKRPLIETNGETGEIVWDKGRDFATVRKVLSMPQVNIVKKTEVQTGGFSKESILPKRNSDKLIARKKDWDPKKYGGFDSPTVAYSVLVVAKVEKGKSKKLKSVKELLGITIMERSSFEKNPIDFLEAKGYKEVKKDLIIKLPKYSLFELENGRKRMLASAGELQKGNELALPSKYVNFLYLASHYEKLKGSPEDNEQKQLFVEQHKHYLDEIIEQISEFSKRVILADANLDKVLSAYNKHRDKPIREQAENIIHLFTLTNLGAPAAFKYFDTTIDRKRYTSTKEVLDATLIHQSITGLYETRIDLSQLGGDGGGGGGSSGGSGGTLNIEDEYRLHETSKEPDVSLGSTWLSDFPQAWAETGGMGLAVRQAPLIIPLKATSTPVSIKQYPMSQEARLGIKPHIQRLLDQGILVPCQSPWNTPLLPVKKPGTNDYRPVQDLREVNKRVEDIHPTVPNPYNLLSGLPPSHQWYTVLDLKDAFFCLRLHPTSQPLFAFEWRDPEMGISGQLTWTRLPQGFKNSPTLFNEALHRDLAGFRIQHPDLILLQYVDDLLLAATSELDCQQGTRALLQTLGDLGYRASAKKAQICQKQVKYLGYLLKEGQRWLTEARKETVMGQPIPKTPRQLREFLGTAGFCRLWIPGFAEMAAPLYPLTKPGTLFNWGPDQQKAFQEIKQALLTAPALGLPDLTKPFELFVDEKQGYAKGVLTQKLGPWRRPVAYLSKKLDPVAAGWPPCLRMVAAIAVLTKDAGKLTMGQPLVILAPHAVEALVKQPPDRWLSNARMTHYQALLLDTDRVQFGPVVALNPATLLPLPEEGLQHDCLDILAEAHGTRSDLMDQPLPDADHTWYTDGSSFLQEGQRKAGAAVTTETEVIWARALPAGTSAQRAELIALTQALKMAEGKKLNVYTDSRYAFATAHIHGEIYRRRGWLTSEGKEIKNKDEILALLKALFLPKRLSIIHCPGHQKGNSAEARGNRMADQAAREVATRETPETSTLLAGKRTADGSEFEKRTADGSEFESPKKKAKVE

SEQ ID NO: 6850 - protein, 2094 aa, synthetic construct
MPAAKRVKLDGGDKKYSIGLDIGTNSVGWAVITDEYKVPSKKFKVLGNTDRHSIKKNLIGALLFDSGETAEATRLKRTARRRYTRRKNRICYLQEIFSNEMAKVDDSFFHRLEESFLVEEDKKHERHPIFGNIVDEVAYHEKYPTIYHLRKKLVDSTDKADLRLIYLALAHMIKFRGHFLIEGDLNPDNSDVDKLFIQLVQTYNQLFEENPINASGVDAKAILSARLSKSRRLENLIAQLPGEKKNGLFGNLIALSLGLTPNFKSNFDLAEDAKLQLSKDTYDDDLDNLLAQIGDQYADLFLAAKNLSDAILLSDILRVNTEITKAPLSASMIKRYDEHHQDLTLLKALVRQQLPEKYKEIFFDQSKNGYAGYIDGGASQEEFYKFIKPILEKMDGTEELLVKLNREDLLRKQRTFDNGSIPHQIHLGELHAILRRQEDFYPFLKDNREKIEKILTFRIPYYVGPLARGNSRFAWMTRKSEETITPWNFEEVVDKGASAQSFIERMTNFDKNLPNEKVLPKHSLLYEYFTVYNELTKVKYVTEGMRKPAFLSGEQKKAIVDLLFKTNRKVTVKQLKEDYFKKIECFDSVEISGVEDRFNASLGTYHDLLKIIKDKDFLDNEENEDILEDIVLTLTLFEDREMIEERLKTYAHLFDDKVMKQLKRRRYTGWGRLSRKLINGIRDKQSGKTILDFLKSDGFANRNFMQLIHDDSLTFKEDIQKAQVSGQGDSLHEHIANLAGSPAIKKGILQTVKVVDELVKVMGRHKPENIVIEMARENQTTQKGQKNSRERMKRIEEGIKELGSQILKEHPVENTQLQNEKLYLYYLQNGRDMYVDQELDINRLSDYDVDHIVPQSFLKDDSIDNKVLTRSDKARGKSDNVPSEEVVKKMKNYWRQLLNAKLITQRKFDNLTKAERGGLSELDKAGFIKRQLVETRQITKHVAQILDSRMNTKYDENDKLIREVKVITLKSKLVSDFRKDFQFYKVREINNYHHAHDAYLNAVVGTALIKKYPKLESEFVYGDYKVYDVRKMIAKSEQEIGKATAKYFFYSNIMNFFKTEITLANGEIRKRPLIETNGETGEIVWDKGRDFATVRKVLSMPQVNIVKKTEVQTGGFSKESILPKRNSDKLIARKKDWDPKKYGGFDSPTVAYSVLVVAKVEKGKSKKLKSVKELLGITIMERSSFEKNPIDFLEAKGYKEVKKDLIIKLPKYSLFELENGRKRMLASAGELQKGNELALPSKYVNFLYLASHYEKLKGSPEDNEQKQLFVEQHKHYLDEIIEQISEFSKRVILADANLDKVLSAYNKHRDKPIREQAENIIHLFTLTNLGAPAAFKYFDTTIDRKRYTSTKEVLDATLIHQSITGLYETRIDLSQLGGDGGGGGGSSGGSGGTLNIEDEYRLHETSKGPDVPLGSTWLSDFPQAWAETGGMGLAVRQAPLIIPLKATSTPVSIKQYPMSQEARLGIKPHIQRLLDQGILVPCQSPWNTPLLPVKKPGTNDYRPVQDLREVNKRVEDIHPTVPNPYNLLSGLPPSHQWYTVLDLKDAFFCLRLHPTSQSLFAFEWRDPEMGISGQLTWTRLPQGFKNSPTLFNEALHRDLADFRIQHPDLILLQYVDDLLLAATSELDCQQGTRALLQTLGDLGYRASAKKAQICQKQVKYLGYLLKEGQRWLTEARKETVMGQPTPKTPRQLREFLGTAGFCRLWIPGFAEMAAPLYPLTKPGTLFEWGPDQQKAYQEIKQALLTAPALGLPDLTKPFELFVDEKQGYAKGVLTQKLGPWRRPVAYLSKKLDPVAAGWPPCLRMVAAIAVLTKDAGKLTMGQPLVILAPHAVEALVKQPPDRWLSNARMTHYQALLLDTDRVQFGPIVALNPATLLPLPEEGLQHDCLDILAEAHGTRPDLTDQPLPDADHTWYTDGSSFLQEGQRKAGAAVTTETEVVWAKALPAGTSAQRAELIALTQALKMAEGKKLNVYTDSRYAFATAHIHGEIYRRRGWLTSEGKEIKNKDEILALLKALFLPKRLSIIHCPGHQKGNRAEARGNRMADQAAREVATRETPETSTLLAGKRTADGSEFEKRTADGSEFESPKKKAKVE

SEQ ID NO: 6851 - protein, 2114 aa, synthetic construct
MPAAKRVKLDGGDKKYSIGLDIGTNSVGWAVITDEYKVPSKKFKVLGNTDRHSIKKNLIGALLFDSGETAEATRLKRTARRRYTRRKNRICYLQEIFSNEMAKVDDSFFHRLEESFLVEEDKKHERHPIFGNIVDEVAYHEKYPTIYHLRKKLVDSTDKADLRLIYLALAHMIKFRGHFLIEGDLNPDNSDVDKLFIQLVQTYNQLFEENPINASGVDAKAILSARLSKSRRLENLIAQLPGEKKNGLFGNLIALSLGLTPNFKSNFDLAEDAKLQLSKDTYDDDLDNLLAQIGDQYADLFLAAKNLSDAILLSDILRVNTEITKAPLSASMIKRYDEHHQDLTLLKALVRQQLPEKYKEIFFDQSKNGYAGYIDGGASQEEFYKFIKPILEKMDGTEELLVKLNREDLLRKQRTFDNGSIPHQIHLGELHAILRRQEDFYPFLKDNREKIEKILTFRIPYYVGPLARGNSRFAWMTRKSEETITPWNFEEVVDKGASAQSFIERMTNFDKNLPNEKVLPKHSLLYEYFTVYNELTKVKYVTEGMRKPAFLSGEQKKAIVDLLFKTNRKVTVKQLKEDYFKKIECFDSVEISGVEDRFNASLGTYHDLLKIIKDKDFLDNEENEDILEDIVLTLTLFEDREMIEERLKTYAHLFDDKVMKQLKRRRYTGWGRLSRKLINGIRDKQSGKTILDFLKSDGFANRNFMQLIHDDSLTFKEDIQKAQVSGQGDSLHEHIANLAGSPAIKKGILQTVKVVDELVKVMGRHKPENIVIEMARENQTTQKGQKNSRERMKRIEEGIKELGSQILKEHPVENTQLQNEKLYLYYLQNGRDMYVDQELDINRLSDYDVDHIVPQSFLKDDSIDNKVLTRSDKARGKSDNVPSEEVVKKMKNYWRQLLNAKLITQRKFDNLTKAERGGLSELDKAGFIKRQLVETRQITKHVAQILDSRMNTKYDENDKLIREVKVITLKSKLVSDFRKDFQFYKVREINNYHHAHDAYLNAVVGTALIKKYPKLESEFVYGDYKVYDVRKMIAKSEQEIGKATAKYFFYSNIMNFFKTEITLANGEIRKRPLIETNGETGEIVWDKGRDFATVRKVLSMPQVNIVKKTEVQTGGFSKESILPKRNSDKLIARKKDWDPKKYGGFDSPTVAYSVLVVAKVEKGKSKKLKSVKELLGITIMERSSFEKNPIDFLEAKGYKEVKKDLIIKLPKYSLFELENGRKRMLASAGELQKGNELALPSKYVNFLYLASHYEKLKGSPEDNEQKQLFVEQHKHYLDEIIEQISEFSKRVILADANLDKVLSAYNKHRDKPIREQAENIIHLFTLTNLGAPAAFKYFDTTIDRKRYTSTKEVLDATLIHQSITGLYETRIDLSQLGGDGGGGGGSSGGSGGVQEISDSRPMLHIYLNGRRFLGLLDTGADKTCIAGRDWPANWPIHQTESSLQGLGMACGVARSSQPLRWQHEDKSGIIHPFVIPTLPFTLWGRDIMKDIKVRLMTDSPDDSQDLMIGAIESNLFADQISWKSDQPVWLNQWPLKQEKLQALQQLVTEQLQLGHLEESNSPWNTPVFVIKKKSGKWRLLQDLRAVNATMHDMGALQPGLPSPPAVPKGWEIIIIDLQDCFFNIKLHPEDCKRFAFSVPSPNFKRPYQRFQWKVLPQGMKNSPTLCQKFVDKAILTVRDKYQDSYIVHYMDDILLAHPSRSIVDEILTSMIQALNKHGLVVSTEKIQKYDNLKYLGTHIQGDSVSYQKLQIRTDKLRTLNDFQKLLGNINWIRPFLKLTTGELKPLFEILNPDSNPISTRKLTPEACKALQLMNERLSTARVKRLDLSQPWSLCILKTEYTPTACLWQDGVVEWIHLPHISPKVITPYDIFCTQLIIKGRHRSKELFSKDPDYIVVPYTKVQFDLLLQEKEDWPISLLGFLGEVHFHLPKDPLLTFTLQTAIIFPHMTSTTPLEKGIVIFTDGSANGRSVTYIQGREPIIKENTQNTAQQAEIVAVITAFEEVSQPFNLYTDSKYVTGLFPEIETATLSPRTKIYTELKHLQRLIHKRQEKFYIGHIRGHTGLPGPLAQGNAYADSLTRILTAAGKRTADGSEFEKRTADGSEFESPKKKAKVE

SEQ ID NO: 6852 - protein, 2088 aa, synthetic construct
MPAAKRVKLDGGDKKYSIGLDIGTNSVGWAVITDEYKVPSKKFKVLGNTDRHSIKKNLIGALLFDSGETAEATRLKRTARRRYTRRKNRICYLQEIFSNEMAKVDDSFFHRLEESFLVEEDKKHERHPIFGNIVDEVAYHEKYPTIYHLRKKLVDSTDKADLRLIYLALAHMIKFRGHFLIEGDLNPDNSDVDKLFIQLVQTYNQLFEENPINASGVDAKAILSARLSKSRRLENLIAQLPGEKKNGLFGNLIALSLGLTPNFKSNFDLAEDAKLQLSKDTYDDDLDNLLAQIGDQYADLFLAAKNLSDAILLSDILRVNTEITKAPLSASMIKRYDEHHQDLTLLKALVRQQLPEKYKEIFFDQSKNGYAGYIDGGASQEEFYKFIKPILEKMDGTEELLVKLNREDLLRKQRTFDNGSIPHQIHLGELHAILRRQEDFYPFLKDNREKIEKILTFRIPYYVGPLARGNSRFAWMTRKSEETITPWNFEEVVDKGASAQSFIERMTNFDKNLPNEKVLPKHSLLYEYFTVYNELTKVKYVTEGMRKPAFLSGEQKKAIVDLLFKTNRKVTVKQLKEDYFKKIECFDSVEISGVEDRFNASLGTYHDLLKIIKDKDFLDNEENEDILEDIVLTLTLFEDREMIEERLKTYAHLFDDKVMKQLKRRRYTGWGRLSRKLINGIRDKQSGKTILDFLKSDGFANRNFMQLIHDDSLTFKEDIQKAQVSGQGDSLHEHIANLAGSPAIKKGILQTVKVVDELVKVMGRHKPENIVIEMARENQTTQKGQKNSRERMKRIEEGIKELGSQILKEHPVENTQLQNEKLYLYYLQNGRDMYVDQELDINRLSDYDVDHIVPQSFLKDDSIDNKVLTRSDKARGKSDNVPSEEVVKKMKNYWRQLLNAKLITQRKFDNLTKAERGGLSELDKAGFIKRQLVETRQITKHVAQILDSRMNTKYDENDKLIREVKVITLKSKLVSDFRKDFQFYKVREINNYHHAHDAYLNAVVGTALIKKYPKLESEFVYGDYKVYDVRKMIAKSEQEIGKATAKYFFYSNIMNFFKTEITLANGEIRKRPLIETNGETGEIVWDKGRDFATVRKVLSMPQVNIVKKTEVQTGGFSKESILPKRNSDKLIARKKDWDPKKYGGFDSPTVAYSVLVVAKVEKGKSKKLKSVKELLGITIMERSSFEKNPIDFLEAKGYKEVKKDLIIKLPKYSLFELENGRKRMLASAGELQKGNELALPSKYVNFLYLASHYEKLKGSPEDNEQKQLFVEQHKHYLDEIIEQISEFSKRVILADANLDKVLSAYNKHRDKPIREQAENIIHLFTLTNLGAPAAFKYFDTTIDRKRYTSTKEVLDATLIHQSITGLYETRIDLSQLGGDGGGGGGSSGGSGGTLQLDDEYRLYSPLVKPDQNIQFWLEQFPQAWAETAGMGLAKQVPPQVIQLKASATPVSVRQYPLSKEAQEGIRPHVQRLIQQGILVPVQSPWNTPLLPVRKPGTNDYRPVQDLREVNKRVQDIHPTVPNPYNLLCALPPQRSWYTVLDLKDAFFCLRLHPTSQPLFAFEWRDPGTGRTGQLTWTRLPQGFKNSPTIFDEALHRDLANFRIQHPQVTLLQYVDDLLLAGATKQDCLEGTKALLLELSDLGYRASAKKAQICRREVTYLGYSLRDGQRWLTEARKKTVVQIPAPTTAKQVREFLGTAGFCRLWIPGFATLAAPLYPLTKEKGEFSWAPEHQKAFDAIKKALLSAPALALPDVTKPFTLYVDERKGVARGVLTQTLGPWRRPVAYLSKKLDPVASGWPVCLKAIAAVAILVKDADKLTLGQNITVIAPHALENIVRQPPDRWMTNARMTHYQSLLLTERVTFAPPAALNPATLLPEETDEPVTHDCHQLLIEETGVRKDLTDIPLTGEVLTWFTDGSSYVVEGKRMAGAAVVDGTRTIWASSLPEGTSAQKAELMALTQALRLAEGKSINIYTDSRYAFATAHVHGAIYKQRGLLTSAGREIKNKEEILSLLEALHLPKRLAIIHCPGHQKAKDPISRGNQMADRVAKQAAQGVNLLAGKRTADGSEFEKRTADGSEFESPKKKAKVE

SEQ ID NO: 6853 - protein, 2085 aa, synthetic construct
MPAAKRVKLDGGDKKYSIGLDIGTNSVGWAVITDEYKVPSKKFKVLGNTDRHSIKKNLIGALLFDSGETAEATRLKRTARRRYTRRKNRICYLQEIFSNEMAKVDDSFFHRLEESFLVEEDKKHERHPIFGNIVDEVAYHEKYPTIYHLRKKLVDSTDKADLRLIYLALAHMIKFRGHFLIEGDLNPDNSDVDKLFIQLVQTYNQLFEENPINASGVDAKAILSARLSKSRRLENLIAQLPGEKKNGLFGNLIALSLGLTPNFKSNFDLAEDAKLQLSKDTYDDDLDNLLAQIGDQYADLFLAAKNLSDAILLSDILRVNTEITKAPLSASMIKRYDEHHQDLTLLKALVRQQLPEKYKEIFFDQSKNGYAGYIDGGASQEEFYKFIKPILEKMDGTEELLVKLNREDLLRKQRTFDNGSIPHQIHLGELHAILRRQEDFYPFLKDNREKIEKILTFRIPYYVGPLARGNSRFAWMTRKSEETITPWNFEEVVDKGASAQSFIERMTNFDKNLPNEKVLPKHSLLYEYFTVYNELTKVKYVTEGMRKPAFLSGEQKKAIVDLLFKTNRKVTVKQLKEDYFKKIECFDSVEISGVEDRFNASLGTYHDLLKIIKDKDFLDNEENEDILEDIVLTLTLFEDREMIEERLKTYAHLFDDKVMKQLKRRRYTGWGRLSRKLINGIRDKQSGKTILDFLKSDGFANRNFMQLIHDDSLTFKEDIQKAQVSGQGDSLHEHIANLAGSPAIKKGILQTVKVVDELVKVMGRHKPENIVIEMARENQTTQKGQKNSRERMKRIEEGIKELGSQILKEHPVENTQLQNEKLYLYYLQNGRDMYVDQELDINRLSDYDVDHIVPQSFLKDDSIDNKVLTRSDKARGKSDNVPSEEVVKKMKNYWRQLLNAKLITQRKFDNLTKAERGGLSELDKAGFIKRQLVETRQITKHVAQILDSRMNTKYDENDKLIREVKVITLKSKLVSDFRKDFQFYKVREINNYHHAHDAYLNAVVGTALIKKYPKLESEFVYGDYKVYDVRKMIAKSEQEIGKATAKYFFYSNIMNFFKTEITLANGEIRKRPLIETNGETGEIVWDKGRDFATVRKVLSMPQVNIVKKTEVQTGGFSKESILPKRNSDKLIARKKDWDPKKYGGFDSPTVAYSVLVVAKVEKGKSKKLKSVKELLGITIMERSSFEKNPIDFLEAKGYKEVKKDLIIKLPKYSLFELENGRKRMLASAGELQKGNELALPSKYVNFLYLASHYEKLKGSPEDNEQKQLFVEQHKHYLDEIIEQISEFSKRVILADANLDKVLSAYNKHRDKPIREQAENIIHLFTLTNLGAPAAFKYFDTTIDRKRYTSTKEVLDATLIHQSITGLYETRIDLSQLGGDGGGGGGSSGGSGGIPWLMKKPLQLTTLVPLQEYEERLLKQTMLTGSYKEKLQSLFLKYDALWQHWENQVGHRRIKPHHIATGTVNPRPQKQYPINPKAKASIQTVINDLLKQGVLIQQNSIMNTPVYPVPKPDGKWRMVLDYREVNKTIPLIAAQNQHSAGILSSIFRGKYKTTLDLSNGFWAHSITPESYWLTAFTWLGQQYCWTRLPQGFLNSPALFNADVVDLLKEVPNVQVYVDDIYISHDDPREHLEQLEKVFSLLLNAGYVVSLKKSEIAQHEVEFLGFNITKEGRGLTETFKQKLLNITPPRDLKQLQSILGKLNFARNFIPNFSELVKPLYNIIATAPGKYITWTTDNSQQLQNIISMLNSAENLEERNPEVRLIMKVNTSPSAGYIRFYNEFAKRPIMYLNYVYTKAEVKFTNTEKLLTTIHKGLIKALDLGMGQEILVYSPIVSMTKIQKTPLPERKALPIRWITWMSYLEDPRIQFHYDKTLPELQQVPTVTDDIIAKIKHPSEFSMVFYTDGSAIKHPNVNKSHNAGMGIAQVQFKPEFTVINTWSIPLGDHTAQLAEVAAVEFACKKALKIDGPVLIVTDSFYVAESVNKELPYWQSNGFFNNKKKPLKHVSKWKSIADCIQLKPDIIIIHEKGHQPTASTFHTEGNNLADKLATQGSYVVNAGKRTADGSEFEKRTADGSEFESPKKKAKVE

SEQ ID NO: 6854 - protein, 2174 aa, synthetic construct
MPAAKRVKLDGGDKKYSIGLDIGTNSVGWAVITDEYKVPSKKFKVLGNTDRHSIKKNLIGALLFDSGETAEATRLKRTARRRYTRRKNRICYLQEIFSNEMAKVDDSFFHRLEESFLVEEDKKHERHPIFGNIVDEVAYHEKYPTIYHLRKKLVDSTDKADLRLIYLALAHMIKFRGHFLIEGDLNPDNSDVDKLFIQLVQTYNQLFEENPINASGVDAKAILSARLSKSRRLENLIAQLPGEKKNGLFGNLIALSLGLTPNFKSNFDLAEDAKLQLSKDTYDDDLDNLLAQIGDQYADLFLAAKNLSDAILLSDILRVNTEITKAPLSASMIKRYDEHHQDLTLLKALVRQQLPEKYKEIFFDQSKNGYAGYIDGGASQEEFYKFIKPILEKMDGTEELLVKLNREDLLRKQRTFDNGSIPHQIHLGELHAILRRQEDFYPFLKDNREKIEKILTFRIPYYVGPLARGNSRFAWMTRKSEETITPWNFEEVVDKGASAQSFIERMTNFDKNLPNEKVLPKHSLLYEYFTVYNELTKVKYVTEGMRKPAFLSGEQKKAIVDLLFKTNRKVTVKQLKEDYFKKIECFDSVEISGVEDRFNASLGTYHDLLKIIKDKDFLDNEENEDILEDIVLTLTLFEDREMIEERLKTYAHLFDDKVMKQLKRRRYTGWGRLSRKLINGIRDKQSGKTILDFLKSDGFANRNFMQLIHDDSLTFKEDIQKAQVSGQGDSLHEHIANLAGSPAIKKGILQTVKVVDELVKVMGRHKPENIVIEMARENQTTQKGQKNSRERMKRIEEGIKELGSQILKEHPVENTQLQNEKLYLYYLQNGRDMYVDQELDINRLSDYDVDHIVPQSFLKDDSIDNKVLTRSDKARGKSDNVPSEEVVKKMKNYWRQLLNAKLITQRKFDNLTKAERGGLSELDKAGFIKRQLVETRQITKHVAQILDSRMNTKYDENDKLIREVKVITLKSKLVSDFRKDFQFYKVREINNYHHAHDAYLNAVVGTALIKKYPKLESEFVYGDYKVYDVRKMIAKSEQEIGKATAKYFFYSNIMNFFKTEITLANGEIRKRPLIETNGETGEIVWDKGRDFATVRKVLSMPQVNIVKKTEVQTGGFSKESILPKRNSDKLIARKKDWDPKKYGGFDSPTVAYSVLVVAKVEKGKSKKLKSVKELLGITIMERSSFEKNPIDFLEAKGYKEVKKDLIIKLPKYSLFELENGRKRMLASAGELQKGNELALPSKYVNFLYLASHYEKLKGSPEDNEQKQLFVEQHKHYLDEIIEQISEFSKRVILADANLDKVLSAYNKHRDKPIREQAENIIHLFTLTNLGAPAAFKYFDTTIDRKRYTSTKEVLDATLIHQSITGLYETRIDLSQLGGDGGGGGGSSGGSGGMDPLQLLQPLEAEIKGTKLKAHWNSGATITCVPQAFLEEEVPIKNIWIKTIHGEKEQPVYYLTFKIQGRKVEAEVISSPYDYILVSPSDIPWLMKKPLQLTTLVPLQEYEERLLKQTMLTGSYKEKLQSLFLKYDALWQHWENQVGHRRIKPHHIATGTVNPRPQKQYPINPKAKASIQTVINDLLKQGVLIQQNSIMNTPVYPVPKPDGKWRMVLDYREVNKTIPLIAAQNQHSAGILSSIFRGKYKTTLDLSNGFWAHSITPESYWLTAFTWLGQQYCWTRLPQGFLNSPALFNADVVDLLKEVPNVQVYVDDIYISHDDPREHLEQLEKVFSLLLNAGYVVSLKKSEIAQHEVEFLGFNITKEGRGLTETFKQKLLNITPPRDLKQLQSILGLLNFARNFIPNFSELVKPLYNIIATAPGKYITWTTDNSQQLQNIISMLNSAENLEERNPEVRLIMKVNTSPSAGYIRFYNEFAKRPIMYLNYVYTKAEVKFTNTEKLLTTIHKGLIKALDLGMGQEILVYSPIVSMTKIQKTPLPERKALPIRWITWMSYLEDPRIQFHYDKTLPELQQVPTVTDDIIAKIKHPSEFSMVFYTDGSAIKHPNVNKSHNAGMGIAQVQFKPEFTVINTWSIPLGDHTAQLAEVAAVEFACKKALKIDGPVLIVTDSFYVAESVNKELPYWQSNGFFNNKKKPLKHVSKWKSIADCIQLKPDIIIIHEKGHQPTASTFHTEGNNLADKLATQGSYVVNAGKRTADGSEFEKRTADGSEFESPKKKAKVE

SEQ ID NO: 6855 - protein, 2094 aa, synthetic construct
MPAAKRVKLDGGDKKYSIGLDIGTNSVGWAVITDEYKVPSKKFKVLGNTDRHSIKKNLIGALLFDSGETAEATRLKRTARRRYTRRKNRICYLQEIFSNEMAKVDDSFFHRLEESFLVEEDKKHERHPIFGNIVDEVAYHEKYPTIYHLRKKLVDSTDKADLRLIYLALAHMIKFRGHFLIEGDLNPDNSDVDKLFIQLVQTYNQLFEENPINASGVDAKAILSARLSKSRRLENLIAQLPGEKKNGLFGNLIALSLGLTPNFKSNFDLAEDAKLQLSKDTYDDDLDNLLAQIGDQYADLFLAAKNLSDAILLSDILRVNTEITKAPLSASMIKRYDEHHQDLTLLKALVRQQLPEKYKEIFFDQSKNGYAGYIDGGASQEEFYKFIKPILEKMDGTEELLVKLNREDLLRKQRTFDNGSIPHQIHLGELHAILRRQEDFYPFLKDNREKIEKILTFRIPYYVGPLARGNSRFAWMTRKSEETITPWNFEEVVDKGASAQSFIERMTNFDKNLPNEKVLPKHSLLYEYFTVYNELTKVKYVTEGMRKPAFLSGEQKKAIVDLLFKTNRKVTVKQLKEDYFKKIECFDSVEISGVEDRFNASLGTYHDLLKIIKDKDFLDNEENEDILEDIVLTLTLFEDREMIEERLKTYAHLFDDKVMKQLKRRRYTGWGRLSRKLINGIRDKQSGKTILDFLKSDGFANRNFMQLIHDDSLTFKEDIQKAQVSGQGDSLHEHIANLAGSPAIKKGILQTVKVVDELVKVMGRHKPENIVIEMARENQTTQKGQKNSRERMKRIEEGIKELGSQILKEHPVENTQLQNEKLYLYYLQNGRDMYVDQELDINRLSDYDVDHIVPQSFLKDDSIDNKVLTRSDKARGKSDNVPSEEVVKKMKNYWRQLLNAKLITQRKFDNLTKAERGGLSELDKAGFIKRQLVETRQITKHVAQILDSRMNTKYDENDKLIREVKVITLKSKLVSDFRKDFQFYKVREINNYHHAHDAYLNAVVGTALIKKYPKLESEFVYGDYKVYDVRKMIAKSEQEIGKATAKYFFYSNIMNFFKTEITLANGEIRKRPLIETNGETGEIVWDKGRDFATVRKVLSMPQVNIVKKTEVQTGGFSKESILPKRNSDKLIARKKDWDPKKYGGFDSPTVAYSVLVVAKVEKGKSKKLKSVKELLGITIMERSSFEKNPIDFLEAKGYKEVKKDLIIKLPKYSLFELENGRKRMLASAGELQKGNELALPSKYVNFLYLASHYEKLKGSPEDNEQKQLFVEQHKHYLDEIIEQISEFSKRVILADANLDKVLSAYNKHRDKPIREQAENIIHLFTLTNLGAPAAFKYFDTTIDRKRYTSTKEVLDATLIHQSITGLYETRIDLSQLGGDGGGGGGSSGGSGGTLNIEDEYRLHETSKEPDVPLGSTWLSDFPQAWAETGGMGLAVRQAPLIIPLKATSTPVSIKQYPMSQEARLGIKPHIQRLLDQGILVPCQSPWNTPLLPVKKPGTNDYRPVQDLREVNKRVEDIHPTVPNPYNLLSGLPPSHQWYTVLDLKDAFFCLRLHPTSQPLFAFEWRDPEMGISGQLTWTRLPQGFKNSPTLFNEALHRDLADFRIQHPDLILLQYVDDLLLAATSEQDCQRGTRALLQTLGNLGYRASAKKAQICQKQVKYLGYLLKEGQRWLTEARKETVMGQPTPKTPRQLREFLGTAGFCRLWIPGFAEMAAPLYPLTKPGTLFNWGPDQQKAYQEIKQALLTAPALGLPDLTKPFELFVDEKQGYAKGVLTQKLGPWRRPVAYLSKKLDPVAAGWPPCLRMVAAIAVLTKDAGKLTMGQPLVILAPHAVEALVKQPPDRWLSNARMTHYQAMLLDTDRVQFGPVVALNPATLLPLPEKEAPHDCLEILAETHGTRPDLTDQPIPDADYTWYTDGSSFLQEGQRRAGAAVTTETEVIWARALPAGTSAQRAELIALTQALKMAEGKKLNVYTDSRYAFATAHVHGEIYRRRGWLTSEGREIKNKNEILALLKALFLPKRLSIIHCPGHQKGNSAEARGNRMADQAAREAAMKAVLETSTLLAGKRTADGSEFEKRTADGSEFESPKKKAKVE

SEQ ID NO: 6856 - protein, 2171 aa, synthetic construct
MPAAKRVKLDGGDKKYSIGLDIGTNSVGWAVITDEYKVPSKKFKVLGNTDRHSIKKNLIGALLFDSGETAEATRLKRTARRRYTRRKNRICYLQEIFSNEMAKVDDSFFHRLEESFLVEEDKKHERHPIFGNIVDEVAYHEKYPTIYHLRKKLVDSTDKADLRLIYLALAHMIKFRGHFLIEGDLNPDNSDVDKLFIQLVQTYNQLFEENPINASGVDAKAILSARLSKSRRLENLIAQLPGEKKNGLFGNLIALSLGLTPNFKSNFDLAEDAKLQLSKDTYDDDLDNLLAQIGDQYADLFLAAKNLSDAILLSDILRVNTEITKAPLSASMIKRYDEHHQDLTLLKALVRQQLPEKYKEIFFDQSKNGYAGYIDGGASQEEFYKFIKPILEKMDGTEELLVKLNREDLLRKQRTFDNGSIPHQIHLGELHAILRRQEDFYPFLKDNREKIEKILTFRIPYYVGPLARGNSRFAWMTRKSEETITPWNFEEVVDKGASAQSFIERMTNFDKNLPNEKVLPKHSLLYEYFTVYNELTKVKYVTEGMRKPAFLSGEQKKAIVDLLFKTNRKVTVKQLKEDYFKKIECFDSVEISGVEDRFNASLGTYHDLLKIIKDKDFLDNEENEDILEDIVLTLTLFEDREMIEERLKTYAHLFDDKVMKQLKRRRYTGWGRLSRKLINGIRDKQSGKTILDFLKSDGFANRNFMQLIHDDSLTFKEDIQKAQVSGQGDSLHEHIANLAGSPAIKKGILQTVKVVDELVKVMGRHKPENIVIEMARENQTTQKGQKNSRERMKRIEEGIKELGSQILKEHPVENTQLQNEKLYLYYLQNGRDMYVDQELDINRLSDYDVDHIVPQSFLKDDSIDNKVLTRSDKARGKSDNVPSEEVVKKMKNYWRQLLNAKLITQRKFDNLTKAERGGLSELDKAGFIKRQLVETRQITKHVAQILDSRMNTKYDENDKLIREVKVITLKSKLVSDFRKDFQFYKVREINNYHHAHDAYLNAVVGTALIKKYPKLESEFVYGDYKVYDVRKMIAKSEQEIGKATAKYFFYSNIMNFFKTEITLANGEIRKRPLIETNGETGEIVWDKGRDFATVRKVLSMPQVNIVKKTEVQTGGFSKESILPKRNSDKLIARKKDWDPKKYGGFDSPTVAYSVLVVAKVEKGKSKKLKSVKELLGITIMERSSFEKNPIDFLEAKGYKEVKKDLIIKLPKYSLFELENGRKRMLASAGELQKGNELALPSKYVNFLYLASHYEKLKGSPEDNEQKQLFVEQHKHYLDEIIEQISEFSKRVILADANLDKVLSAYNKHRDKPIREQAENIIHLFTLTNLGAPAAFKYFDTTIDRKRYTSTKEVLDATLIHQSITGLYETRIDLSQLGGDGGGSSGGSGGGGGMDLLKPLTVERKGVKIKGYWNSQADITCVPKDLLQGEEPVRQQNVTTIHGTQEGDVYYVNLKIDGRRINTEVIGTTLDYAIITPGDVPWILKKPLELTIKLDLEEQQGTLLNNSILSKKGKEELKQLFEKYSALWQSWENQVGHRRIRPHKIATGTVKPTPQKQYHINPKAKPDIQIVINDLLKQGVLIQKESTMNTPVYPVPKPNGRWRMVLDYRAVNKVTPLIAVQNQHSYGILGSLFKGRYKTTIDLSNGFWAHPIVPEDYWITAFTWQGKQYCWTVLPQGFLNSPGLFTGDVVDLLQGIPNVEVYVDDVYISHDSEKEHLEYLDILFNRLKEAGYIISLKKSNIANSIVDFLGFQITNEGRGLTDTFKEKLENITAPTTLKQLQSILGLLNFARNFIPDFTELIAPLYALIPKSTKNYVPWQIEHSTTLETLITKLNGAEYLQGRKGDKTLIMKVNASYTTGYIRYYNEGEKKPISYVSIVFSKTELKFTELEKLLTTVHKGLLKALDLSMGQNIHVYSPIVSMQNIQKTPQTAKKALASRWLSWLSYLEDPRIRFFYDPQMPALKDLPAVDTGKDNKKHPSNFQHIFYTDGSAITSPTKEGHLNAGMGIVYFINKDGNLQKQQEWSISLGNHTAQFAEIAAFEFALKKCLPLGGNILVVTDSNYVAKAYNEELDVWASNGFVNNRKKPLKHISKWKSVADLKRLRPDVVVTHEPGHQKLDSSPHAYGNNLADQLATQASFKVHAGKRTADGSEFEKRTADGSEFESPKKKAKVE

SEQ ID NO: 6857 - protein, 2093 aa, synthetic construct
MPAAKRVKLDGGDKKYSIGLDIGTNSVGWAVITDEYKVPSKKFKVLGNTDRHSIKKNLIGALLFDSGETAEATRLKRTARRRYTRRKNRICYLQEIFSNEMAKVDDSFFHRLEESFLVEEDKKHERHPIFGNIVDEVAYHEKYPTIYHLRKKLVDSTDKADLRLIYLALAHMIKFRGHFLIEGDLNPDNSDVDKLFIQLVQTYNQLFEENPINASGVDAKAILSARLSKSRRLENLIAQLPGEKKNGLFGNLIALSLGLTPNFKSNFDLAEDAKLQLSKDTYDDDLDNLLAQIGDQYADLFLAAKNLSDAILLSDILRVNTEITKAPLSASMIKRYDEHHQDLTLLKALVRQQLPEKYKEIFFDQSKNGYAGYIDGGASQEEFYKFIKPILEKMDGTEELLVKLNREDLLRKQRTFDNGSIPHQIHLGELHAILRRQEDFYPFLKDNREKIEKILTFRIPYYVGPLARGNSRFAWMTRKSEETITPWNFEEVVDKGASAQSFIERMTNFDKNLPNEKVLPKHSLLYEYFTVYNELTKVKYVTEGMRKPAFLSGEQKKAIVDLLFKTNRKVTVKQLKEDYFKKIECFDSVEISGVEDRFNASLGTYHDLLKIIKDKDFLDNEENEDILEDIVLTLTLFEDREMIEERLKTYAHLFDDKVMKQLKRRRYTGWGRLSRKLINGIRDKQSGKTILDFLKSDGFANRNFMQLIHDDSLTFKEDIQKAQVSGQGDSLHEHIANLAGSPAIKKGILQTVKVVDELVKVMGRHKPENIVIEMARENQTTQKGQKNSRERMKRIEEGIKELGSQILKEHPVENTQLQNEKLYLYYLQNGRDMYVDQELDINRLSDYDVDHIVPQSFLKDDSIDNKVLTRSDKARGKSDNVPSEEVVKKMKNYWRQLLNAKLITQRKFDNLTKAERGGLSELDKAGFIKRQLVETRQITKHVAQILDSRMNTKYDENDKLIREVKVITLKSKLVSDFRKDFQFYKVREINNYHHAHDAYLNAVVGTALIKKYPKLESEFVYGDYKVYDVRKMIAKSEQEIGKATAKYFFYSNIMNFFKTEITLANGEIRKRPLIETNGETGEIVWDKGRDFATVRKVLSMPQVNIVKKTEVQTGGFSKESILPKRNSDKLIARKKDWDPKKYGGFDSPTVAYSVLVVAKVEKGKSKKLKSVKELLGITIMERSSFEKNPIDFLEAKGYKEVKKDLIIKLPKYSLFELENGRKRMLASAGELQKGNELALPSKYVNFLYLASHYEKLKGSPEDNEQKQLFVEQHKHYLDEIIEQISEFSKRVILADANLDKVLSAYNKHRDKPIREQAENIIHLFTLTNLGAPAAFKYFDTTIDRKRYTSTKEVLDATLIHQSITGLYETRIDLSQLGGDGGGSSGGSGGGGGTLQLEEEYRLFEPESTQKQEMDIWLKNFPQAWAETGGMGTAHCQAPVLIQLKATATPISIRQYPMPHEAYQGIKPHIRRMLDQGILKPCQSPWNTPLLPVKKPGTEDYRPVQDLREVNKRVEDIHPTVPNPYNLLSTLPPSHPWYTVLDLKDAFFCLRLHSESQLLFAFEWRDPEIGLSGQLTWTRLPQGFKNSPTLFNEALHSDLADFRVRYPALVLLQYVDDLLLAAATRTECLEGTKALLETLGNKGYRASAKKAQICLQEVTYLGYSLKDGQRWLTKARKEAILSIPVPKNSRQVREFLGKAGYCRLFIPGFAELAAPLYPLTRPGTLFQWGTEQQLAFEDIKKALLSSPALGLPDITKPFELFIDENSGFAKGVLVQKLGPWKRPVAYLSKKLDTVASGWPPCLRMVAAIAILVKDAGKLTLGQPLTILTSHPVEALVRQPPNKWLSNARMTHYQAMLLDAERVHFGPTVSLNPATLLPLPSGGNHHDCLQILAETHGTRPDLTDQPLPDADLTWYTDGSSFIRNGEREAGAAVTTESEVIWAAPLPPGTSAQRAELIALTQALKMAEGKKLTVYTDSRYAFATTHVHGEIYRRRGWLTSEGKEIKNKNEILALLEALFLPKRLSIIHCPGHQKGDSPQAKGNRLADDTAKKAATETHSSLTVLPAGKRTADGSEFEKRTADGSEFESPKKKAKVE

SEQ ID NO: 6858 - protein, 2216 aa, synthetic construct
MPAAKRVKLDGGDKKYSIGLDIGTNSVGWAVITDEYKVPSKKFKVLGNTDRHSIKKNLIGALLFDSGETAEATRLKRTARRRYTRRKNRICYLQEIFSNEMAKVDDSFFHRLEESFLVEEDKKHERHPIFGNIVDEVAYHEKYPTIYHLRKKLVDSTDKADLRLIYLALAHMIKFRGHFLIEGDLNPDNSDVDKLFIQLVQTYNQLFEENPINASGVDAKAILSARLSKSRRLENLIAQLPGEKKNGLFGNLIALSLGLTPNFKSNFDLAEDAKLQLSKDTYDDDLDNLLAQIGDQYADLFLAAKNLSDAILLSDILRVNTEITKAPLSASMIKRYDEHHQDLTLLKALVRQQLPEKYKEIFFDQSKNGYAGYIDGGASQEEFYKFIKPILEKMDGTEELLVKLNREDLLRKQRTFDNGSIPHQIHLGELHAILRRQEDFYPFLKDNREKIEKILTFRIPYYVGPLARGNSRFAWMTRKSEETITPWNFEEVVDKGASAQSFIERMTNFDKNLPNEKVLPKHSLLYEYFTVYNELTKVKYVTEGMRKPAFLSGEQKKAIVDLLFKTNRKVTVKQLKEDYFKKIECFDSVEISGVEDRFNASLGTYHDLLKIIKDKDFLDNEENEDILEDIVLTLTLFEDREMIEERLKTYAHLFDDKVMKQLKRRRYTGWGRLSRKLINGIRDKQSGKTILDFLKSDGFANRNFMQLIHDDSLTFKEDIQKAQVSGQGDSLHEHIANLAGSPAIKKGILQTVKVVDELVKVMGRHKPENIVIEMARENQTTQKGQKNSRERMKRIEEGIKELGSQILKEHPVENTQLQNEKLYLYYLQNGRDMYVDQELDINRLSDYDVDHIVPQSFLKDDSIDNKVLTRSDKARGKSDNVPSEEVVKKMKNYWRQLLNAKLITQRKFDNLTKAERGGLSELDKAGFIKRQLVETRQITKHVAQILDSRMNTKYDENDKLIREVKVITLKSKLVSDFRKDFQFYKVREINNYHHAHDAYLNAVVGTALIKKYPKLESEFVYGDYKVYDVRKMIAKSEQEIGKATAKYFFYSNIMNFFKTEITLANGEIRKRPLIETNGETGEIVWDKGRDFATVRKVLSMPQVNIVKKTEVQTGGFSKESILPKRNSDKLIARKKDWDPKKYGGFDSPTVAYSVLVVAKVEKGKSKKLKSVKELLGITIMERSSFEKNPIDFLEAKGYKEVKKDLIIKLPKYSLFELENGRKRMLASAGELQKGNELALPSKYVNFLYLASHYEKLKGSPEDNEQKQLFVEQHKHYLDEIIEQISEFSKRVILADANLDKVLSAYNKHRDKPIREQAENIIHLFTLTNLGAPAAFKYFDTTIDRKRYTSTKEVLDATLIHQSITGLYETRIDLSQLGGDGGGSSGGSGGGGGTLGDQGSRGSDPLPEPRVTLTVEGIPTEFLVNTGAEHSVLTKPMGKMGSKRTVVAGATGSKVYPWTTKRLLKIGQKQVTHSFLVIPECPAPLLGRDLLTKLKAQIQFSTEGPQVTWEDRPAMCLVLNLEEEYRLHEKPVPPSIDPSWLQLFPMVWAEKAGMGLANQVPPVVVELKSDASPVAVRQYPMSKEAREGIRPHIQRFLDLGILVPCQSPWNTPLLPVKKPGTNDYRPVQDLREVNKRVQDIHPTVPNPYNLLSSLPPSHTWYSVLDLKDAFFCLKLHPNSQPLFAFEWRDPEKGNTGQLTWTRLPQGFKNSPTLFDEALHRDLASFRALNPQVVMLQYVDDLLVAAPTYRDCKEGTRRLLQELSKLGYRVSAKKAQLCREEVTYLGYLLKGGKRWLTPARKATVMKIPTPTTPRQVREFLGTAGFCRLWIPGFASLAAPLYPLTREKVPFTWTEAHQEAFGRIKEALLSAPALALPDLTKPFALYVDEKEGVARGVLTQTLGPWRRPVAYLSKKLDPVASGWPTCLKAIAAVALLLKDADKLTLGQNVLVIAPHNLESIVRQPPDRWMTNARMTHYQSLLLNERVSFAPPAILNPATLLPVESDDTPIHICSEILAEETGTRPDLRDQPLPGVPAWYTDGSSFIMDGRRQAGAAIVDNKRTVWASNLPEGTSAQKAELIALTQALRLAEGKSINIYTDSRYAFATAHVHGAIYKQRGLLTSAGKDIKNKEEILALLEAIHLPKRVAIIHCPGHQRGTDPVATGNRKADEAAKQAAQSTRILTETTKNAGKRTADGSEFEKRTADGSEFESPKKKAKVE

SEQ ID NO: 6859 - protein, 2125 aa, synthetic construct
MPAAKRVKLDGGDKKYSIGLDIGTNSVGWAVITDEYKVPSKKFKVLGNTDRHSIKKNLIGALLFDSGETAEATRLKRTARRRYTRRKNRICYLQEIFSNEMAKVDDSFFHRLEESFLVEEDKKHERHPIFGNIVDEVAYHEKYPTIYHLRKKLVDSTDKADLRLIYLALAHMIKFRGHFLIEGDLNPDNSDVDKLFIQLVQTYNQLFEENPINASGVDAKAILSARLSKSRRLENLIAQLPGEKKNGLFGNLIALSLGLTPNFKSNFDLAEDAKLQLSKDTYDDDLDNLLAQIGDQYADLFLAAKNLSDAILLSDILRVNTEITKAPLSASMIKRYDEHHQDLTLLKALVRQQLPEKYKEIFFDQSKNGYAGYIDGGASQEEFYKFIKPILEKMDGTEELLVKLNREDLLRKQRTFDNGSIPHQIHLGELHAILRRQEDFYPFLKDNREKIEKILTFRIPYYVGPLARGNSRFAWMTRKSEETITPWNFEEVVDKGASAQSFIERMTNFDKNLPNEKVLPKHSLLYEYFTVYNELTKVKYVTEGMRKPAFLSGEQKKAIVDLLFKTNRKVTVKQLKEDYFKKIECFDSVEISGVEDRFNASLGTYHDLLKIIKDKDFLDNEENEDILEDIVLTLTLFEDREMIEERLKTYAHLFDDKVMKQLKRRRYTGWGRLSRKLINGIRDKQSGKTILDFLKSDGFANRNFMQLIHDDSLTFKEDIQKAQVSGQGDSLHEHIANLAGSPAIKKGILQTVKVVDELVKVMGRHKPENIVIEMARENQTTQKGQKNSRERMKRIEEGIKELGSQILKEHPVENTQLQNEKLYLYYLQNGRDMYVDQELDINRLSDYDVDHIVPQSFLKDDSIDNKVLTRSDKARGKSDNVPSEEVVKKMKNYWRQLLNAKLITQRKFDNLTKAERGGLSELDKAGFIKRQLVETRQITKHVAQILDSRMNTKYDENDKLIREVKVITLKSKLVSDFRKDFQFYKVREINNYHHAHDAYLNAVVGTALIKKYPKLESEFVYGDYKVYDVRKMIAKSEQEIGKATAKYFFYSNIMNFFKTEITLANGEIRKRPLIETNGETGEIVWDKGRDFATVRKVLSMPQVNIVKKTEVQTGGFSKESILPKRNSDKLIARKKDWDPKKYGGFDSPTVAYSVLVVAKVEKGKSKKLKSVKELLGITIMERSSFEKNPIDFLEAKGYKEVKKDLIIKLPKYSLFELENGRKRMLASAGELQKGNELALPSKYVNFLYLASHYEKLKGSPEDNEQKQLFVEQHKHYLDEIIEQISEFSKRVILADANLDKVLSAYNKHRDKPIREQAENIIHLFTLTNLGAPAAFKYFDTTIDRKRYTSTKEVLDATLIHQSITGLYETRIDLSQLGGDGGGSSGGSGGGGGLLGRDLLTKLKAQIQFSTEGPQVTWEDRPAMCLVLNLEEEYRLHEKPVPPSIDPSWLQLFPMVWAEKAGMGLANQVPPVVVELKSDASPVAVRQYPMSKEAREGIRPHIQRFLDLGILVPCQSPWNTPLLPVKKPGTNDYRPVQDLREVNKRVQDIHPTVPNPYNLLSSLPPSHTWYSVLDLKDAFFCLKLHPNSQPLFAFEWRDPEKGNTGQLTWTRLPQGFKNSPTLFNEALHRDLASFRALNPQVVMLQYVDDLLVAAPTYRDCKEGTRRLLQELSKLGYRVSAKKAQLCREEVTYLGYLLKGGKRWLTPARKATVMKIPTPTTPRQVREFLGTAGFCRLWIPGFASLAAPLYPLTRPKVPFTWTEAHQEAFGRIKEALLSAPALALPDLTKPFALYVDEKEGVARGVLTQTLGPWRRPVAYLSKKLDPVASGWPTCLKAIAAVALLLKDADKLTLGQNVLVIAPHNLESIVRQPPDRWMTNARMTHYQSLLLNERVSFAPPAILNPATLLPVESDDTPIHICSEILAEETGTRPDLRDQPLPGVPAWYTDGSSFIMDGRRQAGAAIVDNKRTVWASNLPEGTSAQKAELIALTQALRLAEGKSINIYTDSRYAFATAHVHGAIYKQRGWLTSAGKDIKNKEEILALLEAIHLPKRVAIIHCPGHQRGTDPVATGNRKADEAAKQAAQSTRILTETTKNAGKRTADGSEFEKRTADGSEFESPKKKAKVE

SEQ ID NO: 6860 - protein, 2125 aa, synthetic construct
MPAAKRVKLDGGDKKYSIGLDIGTNSVGWAVITDEYKVPSKKFKVLGNTDRHSIKKNLIGALLFDSGETAEATRLKRTARRRYTRRKNRICYLQEIFSNEMAKVDDSFFHRLEESFLVEEDKKHERHPIFGNIVDEVAYHEKYPTIYHLRKKLVDSTDKADLRLIYLALAHMIKFRGHFLIEGDLNPDNSDVDKLFIQLVQTYNQLFEENPINASGVDAKAILSARLSKSRRLENLIAQLPGEKKNGLFGNLIALSLGLTPNFKSNFDLAEDAKLQLSKDTYDDDLDNLLAQIGDQYADLFLAAKNLSDAILLSDILRVNTEITKAPLSASMIKRYDEHHQDLTLLKALVRQQLPEKYKEIFFDQSKNGYAGYIDGGASQEEFYKFIKPILEKMDGTEELLVKLNREDLLRKQRTFDNGSIPHQIHLGELHAILRRQEDFYPFLKDNREKIEKILTFRIPYYVGPLARGNSRFAWMTRKSEETITPWNFEEVVDKGASAQSFIERMTNFDKNLPNEKVLPKHSLLYEYFTVYNELTKVKYVTEGMRKPAFLSGEQKKAIVDLLFKTNRKVTVKQLKEDYFKKIECFDSVEISGVEDRFNASLGTYHDLLKIIKDKDFLDNEENEDILEDIVLTLTLFEDREMIEERLKTYAHLFDDKVMKQLKRRRYTGWGRLSRKLINGIRDKQSGKTILDFLKSDGFANRNFMQLIHDDSLTFKEDIQKAQVSGQGDSLHEHIANLAGSPAIKKGILQTVKVVDELVKVMGRHKPENIVIEMARENQTTQKGQKNSRERMKRIEEGIKELGSQILKEHPVENTQLQNEKLYLYYLQNGRDMYVDQELDINRLSDYDVDHIVPQSFLKDDSIDNKVLTRSDKARGKSDNVPSEEVVKKMKNYWRQLLNAKLITQRKFDNLTKAERGGLSELDKAGFIKRQLVETRQITKHVAQILDSRMNTKYDENDKLIREVKVITLKSKLVSDFRKDFQFYKVREINNYHHAHDAYLNAVVGTALIKKYPKLESEFVYGDYKVYDVRKMIAKSEQEIGKATAKYFFYSNIMNFFKTEITLANGEIRKRPLIETNGETGEIVWDKGRDFATVRKVLSMPQVNIVKKTEVQTGGFSKESILPKRNSDKLIARKKDWDPKKYGGFDSPTVAYSVLVVAKVEKGKSKKLKSVKELLGITIMERSSFEKNPIDFLEAKGYKEVKKDLIIKLPKYSLFELENGRKRMLASAGELQKGNELALPSKYVNFLYLASHYEKLKGSPEDNEQKQLFVEQHKHYLDEIIEQISEFSKRVILADANLDKVLSAYNKHRDKPIREQAENIIHLFTLTNLGAPAAFKYFDTTIDRKRYTSTKEVLDATLIHQSITGLYETRIDLSQLGGDGGGSSGGSGGGGGLLGRDLLTKLKAQIQFSTEGPQVTWEDRPAMCLVLNLEEEYRLHEKPVPPSIDPSWLQLFPMVWAEKAGMGLANQVPPVVVELKSDASPVAVRQYPMSKEAREGIRPHIQRFLDLGILVPCQSPWNTPLLPVKKPGTNDYRPVQDLREVNKRVQDIHPTVPNPYNLLSSLPPSHTWYSVLDLKDAFFCLKLHPNSQPLFAFEWRDPEKGNTGQLTWTRLPQGFKNSPTLFNEALHRDLASFRALNPQVVMLQYVDDLLVAAPTYRDCKEGTRRLLQELSKLGYRVSAKKAQLCREEVTYLGYLLKGGKRWLTPARKATVMKIPTPTTPRQVREFLGKAGFCRLFIPGFASLAAPLYPLTRPKVPFTWTEAHQEAFGRIKEALLSAPALALPDLTKPFALYVDEKEGVARGVLTQTLGPWRRPVAYLSKKLDPVASGWPTCLKAIAAVALLLKDADKLTLGQNVLVIAPHNLESIVRQPPDRWMTNARMTHYQSLLLNERVSFAPPAILNPATLLPVESDDTPIHICSEILAEETGTRPDLRDQPLPGVPAWYTDGSSFIMDGRRQAGAAIVDNKRTVWASNLPEGTSAQKAELIALTQALRLAEGKSINIYTDSRYAFATAHVHGAIYKQRGWLTSAGKDIKNKEEILALLEAIHLPKRVAIIHCPGHQRGTDPVATGNRKADEAAKQAAQSTRILTETTKNAGKRTADGSEFEKRTADGSEFESPKKKAKVE

SEQ ID NO: 6861 - protein, 2216 aa, synthetic construct
MPAAKRVKLDGGDKKYSIGLDIGTNSVGWAVITDEYKVPSKKFKVLGNTDRHSIKKNLIGALLFDSGETAEATRLKRTARRRYTRRKNRICYLQEIFSNEMAKVDDSFFHRLEESFLVEEDKKHERHPIFGNIVDEVAYHEKYPTIYHLRKKLVDSTDKADLRLIYLALAHMIKFRGHFLIEGDLNPDNSDVDKLFIQLVQTYNQLFEENPINASGVDAKAILSARLSKSRRLENLIAQLPGEKKNGLFGNLIALSLGLTPNFKSNFDLAEDAKLQLSKDTYDDDLDNLLAQIGDQYADLFLAAKNLSDAILLSDILRVNTEITKAPLSASMIKRYDEHHQDLTLLKALVRQQLPEKYKEIFFDQSKNGYAGYIDGGASQEEFYKFIKPILEKMDGTEELLVKLNREDLLRKQRTFDNGSIPHQIHLGELHAILRRQEDFYPFLKDNREKIEKILTFRIPYYVGPLARGNSRFAWMTRKSEETITPWNFEEVVDKGASAQSFIERMTNFDKNLPNEKVLPKHSLLYEYFTVYNELTKVKYVTEGMRKPAFLSGEQKKAIVDLLFKTNRKVTVKQLKEDYFKKIECFDSVEISGVEDRFNASLGTYHDLLKIIKDKDFLDNEENEDILEDIVLTLTLFEDREMIEERLKTYAHLFDDKVMKQLKRRRYTGWGRLSRKLINGIRDKQSGKTILDFLKSDGFANRNFMQLIHDDSLTFKEDIQKAQVSGQGDSLHEHIANLAGSPAIKKGILQTVKVVDELVKVMGRHKPENIVIEMARENQTTQKGQKNSRERMKRIEEGIKELGSQILKEHPVENTQLQNEKLYLYYLQNGRDMYVDQELDINRLSDYDVDHIVPQSFLKDDSIDNKVLTRSDKARGKSDNVPSEEVVKKMKNYWRQLLNAKLITQRKFDNLTKAERGGLSELDKAGFIKRQLVETRQITKHVAQILDSRMNTKYDENDKLIREVKVITLKSKLVSDFRKDFQFYKVREINNYHHAHDAYLNAVVGTALIKKYPKLESEFVYGDYKVYDVRKMIAKSEQEIGKATAKYFFYSNIMNFFKTEITLANGEIRKRPLIETNGETGEIVWDKGRDFATVRKVLSMPQVNIVKKTEVQTGGFSKESILPKRNSDKLIARKKDWDPKKYGGFDSPTVAYSVLVVAKVEKGKSKKLKSVKELLGITIMERSSFEKNPIDFLEAKGYKEVKKDLIIKLPKYSLFELENGRKRMLASAGELQKGNELALPSKYVNFLYLASHYEKLKGSPEDNEQKQLFVEQHKHYLDEIIEQISEFSKRVILADANLDKVLSAYNKHRDKPIREQAENIIHLFTLTNLGAPAAFKYFDTTIDRKRYTSTKEVLDATLIHQSITGLYETRIDLSQLGGDGGGSSGGSGGGGGTLGDQGSRGSDPLPEPRVTLTVEGIPTEFLVNTGAEHSVLTKPMGKMGSKRTVVAGATGSKVYPWTTKRLLKIGQKQVTHSFLVIPECPAPLLGRDLLTKLKAQIQFSTEGPQVTWEDRPAMCLVLNLEEEYRLHEKPVPPSIDPSWLQLFPMVWAEKAGMGLANQVPPVVVELKSDASPVAVRQYPMSKEAREGIRPHIQRFLDLGILVPCQSPWNTPLLPVKKPGTNDYRPVQDLREVNKRVQDIHPTVPNPYNLLSSLPPSHTWYSVLDLKDAFFCLKLHPNSQPLFAFEWRDPEKGNTGQLTWTRLPQGFKNSPTLFNEALHRDLASFRALNPQVVMLQYVDDLLVAAPTYRDCKEGTRRLLQELSKLGYRVSAKKAQLCREEVTYLGYLLKGGKRWLTPARKATVMKIPTPTTPRQVREFLGTAGFCRLWIPGFASLAAPLYPLTRPKVPFTWTEAHQEAFGRIKEALLSAPALALPDLTKPFALYVDEKEGVARGVLTQTLGPWRRPVAYLSKKLDPVASGWPTCLKAIAAVALLLKDADKLTLGQNVLVIAPHNLESIVRQPPDRWMTNARMTHYQSLLLNERVSFAPPAILNPATLLPVESDDTPIHICSEILAEETGTRPDLRDQPLPGVPAWYTDGSSFIMDGRRQAGAAIVDNKRTVWASNLPEGTSAQKAELIALTQALRLAEGKSINIYTDSRYAFATAHVHGAIYKQRGWLTSAGKDIKNKEEILALLEAIHLPKRVAIIHCPGHQRGTDPVATGNRKADEAAKQAAQSTRILTETTKNAGKRTADGSEFEKRTADGSEFESPKKKAKVE

SEQ ID NO: 6862 - protein, 2216 aa, synthetic construct
MPAAKRVKLDGGDKKYSIGLDIGTNSVGWAVITDEYKVPSKKFKVLGNTDRHSIKKNLIGALLFDSGETAEATRLKRTARRRYTRRKNRICYLQEIFSNEMAKVDDSFFHRLEESFLVEEDKKHERHPIFGNIVDEVAYHEKYPTIYHLRKKLVDSTDKADLRLIYLALAHMIKFRGHFLIEGDLNPDNSDVDKLFIQLVQTYNQLFEENPINASGVDAKAILSARLSKSRRLENLIAQLPGEKKNGLFGNLIALSLGLTPNFKSNFDLAEDAKLQLSKDTYDDDLDNLLAQIGDQYADLFLAAKNLSDAILLSDILRVNTEITKAPLSASMIKRYDEHHQDLTLLKALVRQQLPEKYKEIFFDQSKNGYAGYIDGGASQEEFYKFIKPILEKMDGTEELLVKLNREDLLRKQRTFDNGSIPHQIHLGELHAILRRQEDFYPFLKDNREKIEKILTFRIPYYVGPLARGNSRFAWMTRKSEETITPWNFEEVVDKGASAQSFIERMTNFDKNLPNEKVLPKHSLLYEYFTVYNELTKVKYVTEGMRKPAFLSGEQKKAIVDLLFKTNRKVTVKQLKEDYFKKIECFDSVEISGVEDRFNASLGTYHDLLKIIKDKDFLDNEENEDILEDIVLTLTLFEDREMIEERLKTYAHLFDDKVMKQLKRRRYTGWGRLSRKLINGIRDKQSGKTILDFLKSDGFANRNFMQLIHDDSLTFKEDIQKAQVSGQGDSLHEHIANLAGSPAIKKGILQTVKVVDELVKVMGRHKPENIVIEMARENQTTQKGQKNSRERMKRIEEGIKELGSQILKEHPVENTQLQNEKLYLYYLQNGRDMYVDQELDINRLSDYDVDHIVPQSFLKDDSIDNKVLTRSDKARGKSDNVPSEEVVKKMKNYWRQLLNAKLITQRKFDNLTKAERGGLSELDKAGFIKRQLVETRQITKHVAQILDSRMNTKYDENDKLIREVKVITLKSKLVSDFRKDFQFYKVREINNYHHAHDAYLNAVVGTALIKKYPKLESEFVYGDYKVYDVRKMIAKSEQEIGKATAKYFFYSNIMNFFKTEITLANGEIRKRPLIETNGETGEIVWDKGRDFATVRKVLSMPQVNIVKKTEVQTGGFSKESILPKRNSDKLIARKKDWDPKKYGGFDSPTVAYSVLVVAKVEKGKSKKLKSVKELLGITIMERSSFEKNPIDFLEAKGYKEVKKDLIIKLPKYSLFELENGRKRMLASAGELQKGNELALPSKYVNFLYLASHYEKLKGSPEDNEQKQLFVEQHKHYLDEIIEQISEFSKRVILADANLDKVLSAYNKHRDKPIREQAENIIHLFTLTNLGAPAAFKYFDTTIDRKRYTSTKEVLDATLIHQSITGLYETRIDLSQLGGDGGGSSGGSGGGGGTLGDQGSRGSDPLPEPRVTLTVEGIPTEFLVNTGAEHSVLTKPMGKMGSKRTVVAGATGSKVYPWTTKRLLKIGQKQVTHSFLVIPECPAPLLGRDLLTKLKAQIQFSTEGPQVTWEDRPAMCLVLNLEEEYRLHEKPVPPSIDPSWLQLFPMVWAEKAGMGLANQVPPVVVELKSDASPVAVRQYPMSKEAREGIRPHIQRFLDLGILVPCQSPWNTPLLPVKKPGTNDYRPVQDLREVNKRVQDIHPTVPNPYNLLSSLPPSHTWYSVLDLKDAFFCLKLHPNSQPLFAFEWRDPEKGNTGQLTWTRLPQGFKNSPTLFNEALHRDLASFRALNPQVVMLQYVDDLLVAAPTYRDCKEGTRRLLQELSKLGYRVSAKKAQLCREEVTYLGYLLKGGKRWLTPARKATVMKIPTPTTPRQVREFLGKAGFCRLFIPGFASLAAPLYPLTRPKVPFTWTEAHQEAFGRIKEALLSAPALALPDLTKPFALYVDEKEGVARGVLTQTLGPWRRPVAYLSKKLDPVASGWPTCLKAIAAVALLLKDADKLTLGQNVLVIAPHNLESIVRQPPDRWMTNARMTHYQSLLLNERVSFAPPAILNPATLLPVESDDTPIHICSEILAEETGTRPDLRDQPLPGVPAWYTDGSSFIMDGRRQAGAAIVDNKRTVWASNLPEGTSAQKAELIALTQALRLAEGKSINIYTDSRYAFATAHVHGAIYKQRGWLTSAGKDIKNKEEILALLEAIHLPKRVAIIHCPGHQRGTDPVATGNRKADEAAKQAAQSTRILTETTKNAGKRTADGSEFEKRTADGSEFESPKKKAKVE

SEQ ID NO: 6863 - protein, 2094 aa, synthetic construct
MPAAKRVKLDGGDKKYSIGLDIGTNSVGWAVITDEYKVPSKKFKVLGNTDRHSIKKNLIGALLFDSGETAEATRLKRTARRRYTRRKNRICYLQEIFSNEMAKVDDSFFHRLEESFLVEEDKKHERHPIFGNIVDEVAYHEKYPTIYHLRKKLVDSTDKADLRLIYLALAHMIKFRGHFLIEGDLNPDNSDVDKLFIQLVQTYNQLFEENPINASGVDAKAILSARLSKSRRLENLIAQLPGEKKNGLFGNLIALSLGLTPNFKSNFDLAEDAKLQLSKDTYDDDLDNLLAQIGDQYADLFLAAKNLSDAILLSDILRVNTEITKAPLSASMIKRYDEHHQDLTLLKALVRQQLPEKYKEIFFDQSKNGYAGYIDGGASQEEFYKFIKPILEKMDGTEELLVKLNREDLLRKQRTFDNGSIPHQIHLGELHAILRRQEDFYPFLKDNREKIEKILTFRIPYYVGPLARGNSRFAWMTRKSEETITPWNFEEVVDKGASAQSFIERMTNFDKNLPNEKVLPKHSLLYEYFTVYNELTKVKYVTEGMRKPAFLSGEQKKAIVDLLFKTNRKVTVKQLKEDYFKKIECFDSVEISGVEDRFNASLGTYHDLLKIIKDKDFLDNEENEDILEDIVLTLTLFEDREMIEERLKTYAHLFDDKVMKQLKRRRYTGWGRLSRKLINGIRDKQSGKTILDFLKSDGFANRNFMQLIHDDSLTFKEDIQKAQVSGQGDSLHEHIANLAGSPAIKKGILQTVKVVDELVKVMGRHKPENIVIEMARENQTTQKGQKNSRERMKRIEEGIKELGSQILKEHPVENTQLQNEKLYLYYLQNGRDMYVDQELDINRLSDYDVDHIVPQSFLKDDSIDNKVLTRSDKARGKSDNVPSEEVVKKMKNYWRQLLNAKLITQRKFDNLTKAERGGLSELDKAGFIKRQLVETRQITKHVAQILDSRMNTKYDENDKLIREVKVITLKSKLVSDFRKDFQFYKVREINNYHHAHDAYLNAVVGTALIKKYPKLESEFVYGDYKVYDVRKMIAKSEQEIGKATAKYFFYSNIMNFFKTEITLANGEIRKRPLIETNGETGEIVWDKGRDFATVRKVLSMPQVNIVKKTEVQTGGFSKESILPKRNSDKLIARKKDWDPKKYGGFDSPTVAYSVLVVAKVEKGKSKKLKSVKELLGITIMERSSFEKNPIDFLEAKGYKEVKKDLIIKLPKYSLFELENGRKRMLASAGELQKGNELALPSKYVNFLYLASHYEKLKGSPEDNEQKQLFVEQHKHYLDEIIEQISEFSKRVILADANLDKVLSAYNKHRDKPIREQAENIIHLFTLTNLGAPAAFKYFDTTIDRKRYTSTKEVLDATLIHQSITGLYETRIDLSQLGGDGGGSSGGSGGGGGTLNLEDEYRLYETSAEPEVSPGSTWLSDFPQAWAETGGMGLAVRQAPLIIPLKATSTPVSIKQYPMSQEAKLGIKPHIQRLLDQGILVPCQSPWNTPLLPVKKPGTNDYRPVQDLREVNKRVEDIHPTVPNPYNLLSGLPPSHRWYTVLDLKDAFFCLRLHPTSQPLFAFEWRDPGMGISGQLTWTRLPQGFKNSPTLFNEALHRDLADFRIQHPDLILLQYVDDILLAATSELDCQQGTRALLLTLGNLGYRASAKKAQLCQKQVKYLGYLLKEGQRWLTEARKETVMGQPTPKTPRQLREFLGTAGFCRLWIPGFAEMAAPLYPLTKPGTLFNWGPDQQKAYQEIKQALLTAPALGLPDLTKPFELFVDEKQGYAKGVLTQKLGPWRRPVAYLSKKLDPVAAGWPPCLRMVAAIAVLRKDAGKLTMGQPLVILAPHAVEALVKQPPDRWLSNARMTHYQAMLLDTDRVQFGPVVALNPATLLPLPEEGAPHDCLEILAETHGTRPDLTDQPIPDADHTWYTDGSSFLQEGQRKAGAAVTTETEVIWARALPAGTSAQRAELIALTQALKMAEGKRLNVYTDSRYAFATAHIHGEIYRRRGWLTSEGREIKNKSEILALLKALFLPKRLSIIHCLGHQKGDSAEARGNRLADQAAREAAIKTPPDTSTLLAGKRTADGSEFEKRTADGSEFESPKKKAKVE

SEQ ID NO: 6864 - protein, 2094 aa, synthetic construct
MPAAKRVKLDGGDKKYSIGLDIGTNSVGWAVITDEYKVPSKKFKVLGNTDRHSIKKNLIGALLFDSGETAEATRLKRTARRRYTRRKNRICYLQEIFSNEMAKVDDSFFHRLEESFLVEEDKKHERHPIFGNIVDEVAYHEKYPTIYHLRKKLVDSTDKADLRLIYLALAHMIKFRGHFLIEGDLNPDNSDVDKLFIQLVQTYNQLFEENPINASGVDAKAILSARLSKSRRLENLIAQLPGEKKNGLFGNLIALSLGLTPNFKSNFDLAEDAKLQLSKDTYDDDLDNLLAQIGDQYADLFLAAKNLSDAILLSDILRVNTEITKAPLSASMIKRYDEHHQDLTLLKALVRQQLPEKYKEIFFDQSKNGYAGYIDGGASQEEFYKFIKPILEKMDGTEELLVKLNREDLLRKQRTFDNGSIPHQIHLGELHAILRRQEDFYPFLKDNREKIEKILTFRIPYYVGPLARGNSRFAWMTRKSEETITPWNFEEVVDKGASAQSFIERMTNFDKNLPNEKVLPKHSLLYEYFTVYNELTKVKYVTEGMRKPAFLSGEQKKAIVDLLFKTNRKVTVKQLKEDYFKKIECFDSVEISGVEDRFNASLGTYHDLLKIIKDKDFLDNEENEDILEDIVLTLTLFEDREMIEERLKTYAHLFDDKVMKQLKRRRYTGWGRLSRKLINGIRDKQSGKTILDFLKSDGFANRNFMQLIHDDSLTFKEDIQKAQVSGQGDSLHEHIANLAGSPAIKKGILQTVKVVDELVKVMGRHKPENIVIEMARENQTTQKGQKNSRERMKRIEEGIKELGSQILKEHPVENTQLQNEKLYLYYLQNGRDMYVDQELDINRLSDYDVDHIVPQSFLKDDSIDNKVLTRSDKARGKSDNVPSEEVVKKMKNYWRQLLNAKLITQRKFDNLTKAERGGLSELDKAGFIKRQLVETRQITKHVAQILDSRMNTKYDENDKLIREVKVITLKSKLVSDFRKDFQFYKVREINNYHHAHDAYLNAVVGTALIKKYPKLESEFVYGDYKVYDVRKMIAKSEQEIGKATAKYFFYSNIMNFFKTEITLANGEIRKRPLIETNGETGEIVWDKGRDFATVRKVLSMPQVNIVKKTEVQTGGFSKESILPKRNSDKLIARKKDWDPKKYGGFDSPTVAYSVLVVAKVEKGKSKKLKSVKELLGITIMERSSFEKNPIDFLEAKGYKEVKKDLIIKLPKYSLFELENGRKRMLASAGELQKGNELALPSKYVNFLYLASHYEKLKGSPEDNEQKQLFVEQHKHYLDEIIEQISEFSKRVILADANLDKVLSAYNKHRDKPIREQAENIIHLFTLTNLGAPAAFKYFDTTIDRKRYTSTKEVLDATLIHQSITGLYETRIDLSQLGGDGGGSSGGSGGGGGTLNIEDEHRLHETSKEPDVSLGSTWLSDFPQAWAETGGMGLAVRQAPLIIPLKATSTPVSIKQYPMSQEARLGIKPHIQRLLDQGILVPCQSPWNTPLLPVKKPGTNDYRPVQDLREVNKRVEDIHPTVPNPYNLLSGLPPSHQWYTVLDLKDAFFCLRLHPTSQPLFAFEWRDPEMGISGQLTWTRLPQGFKNSPTLFNEALHRDLADFRIQHPDLILLQYVDDLLLAATSELDCQQGTRALLQTLGNLGYRASAKKAQICQKQVKYLGYLLKEGQRWLTEARKETVMGQPTPKTPRQLREFLGTAGFCRLWIPGFAEMAAPLYPLTKPGTLFNWGPDQQKAYQEIKQALLTAPALGLPDLTKPFELFVDEKQGYAKGVLTQKLGPWRRPVAYLSKKLDPVAAGWPPCLRMVAAIAVLTKDAGKLTMGQPLVILAPHAVEALVKQPPDRWLSNARMTHYQALLLDTDRVQFGPVVALNPATLLPLPEEGLQHNCLDILAEAHGTRPDLTDQPLPDADHTWYTDGSSLLQEGQRKAGAAVTTETEVIWAKALPAGTSAQRAELIALTQALKMAEGKKLNVYTDSRYAFATAHIHGEIYRRRGWLTSEGKEIKNKDEILALLKALFLPKRLSIIHCPGHQKGHSAEARGNRMADQAARKAAITETPDTSTLLAGKRTADGSEFEKRTADGSEFESPKKKAKVE

SEQ ID NO: 6865 - protein, 2094 aa, synthetic construct
MPAAKRVKLDGGDKKYSIGLDIGTNSVGWAVITDEYKVPSKKFKVLGNTDRHSIKKNLIGALLFDSGETAEATRLKRTARRRYTRRKNRICYLQEIFSNEMAKVDDSFFHRLEESFLVEEDKKHERHPIFGNIVDEVAYHEKYPTIYHLRKKLVDSTDKADLRLIYLALAHMIKFRGHFLIEGDLNPDNSDVDKLFIQLVQTYNQLFEENPINASGVDAKAILSARLSKSRRLENLIAQLPGEKKNGLFGNLIALSLGLTPNFKSNFDLAEDAKLQLSKDTYDDDLDNLLAQIGDQYADLFLAAKNLSDAILLSDILRVNTEITKAPLSASMIKRYDEHHQDLTLLKALVRQQLPEKYKEIFFDQSKNGYAGYIDGGASQEEFYKFIKPILEKMDGTEELLVKLNREDLLRKQRTFDNGSIPHQIHLGELHAILRRQEDFYPFLKDNREKIEKILTFRIPYYVGPLARGNSRFAWMTRKSEETITPWNFEEVVDKGASAQSFIERMTNFDKNLPNEKVLPKHSLLYEYFTVYNELTKVKYVTEGMRKPAFLSGEQKKAIVDLLFKTNRKVTVKQLKEDYFKKIECFDSVEISGVEDRFNASLGTYHDLLKIIKDKDFLDNEENEDILEDIVLTLTLFEDREMIEERLKTYAHLFDDKVMKQLKRRRYTGWGRLSRKLINGIRDKQSGKTILDFLKSDGFANRNFMQLIHDDSLTFKEDIQKAQVSGQGDSLHEHIANLAGSPAIKKGILQTVKVVDELVKVMGRHKPENIVIEMARENQTTQKGQKNSRERMKRIEEGIKELGSQILKEHPVENTQLQNEKLYLYYLQNGRDMYVDQELDINRLSDYDVDHIVPQSFLKDDSIDNKVLTRSDKARGKSDNVPSEEVVKKMKNYWRQLLNAKLITQRKFDNLTKAERGGLSELDKAGFIKRQLVETRQITKHVAQILDSRMNTKYDENDKLIREVKVITLKSKLVSDFRKDFQFYKVREINNYHHAHDAYLNAVVGTALIKKYPKLESEFVYGDYKVYDVRKMIAKSEQEIGKATAKYFFYSNIMNFFKTEITLANGEIRKRPLIETNGETGEIVWDKGRDFATVRKVLSMPQVNIVKKTEVQTGGFSKESILPKRNSDKLIARKKDWDPKKYGGFDSPTVAYSVLVVAKVEKGKSKKLKSVKELLGITIMERSSFEKNPIDFLEAKGYKEVKKDLIIKLPKYSLFELENGRKRMLASAGELQKGNELALPSKYVNFLYLASHYEKLKGSPEDNEQKQLFVEQHKHYLDEIIEQISEFSKRVILADANLDKVLSAYNKHRDKPIREQAENIIHLFTLTNLGAPAAFKYFDTTIDRKRYTSTKEVLDATLIHQSITGLYETRIDLSQLGGDGGGSSGGSGGGGGTLNIEDEHRLHETSKEPDVSLGSTWLSDFPQAWAETGGMGLAVRQAPLIIPLKATSTPVSIKQYPMSQEARLGIKPHIQRLLDQGILVPCQSPWNTPLLPVKKPGTNDYRPVQDLREVNKRVEDIHPTVPNPYNLLSGLPPSHQWYTVLDLKDAFFCLRLHPTSQPLFAFEWRDPEMGISGQLTWTRLPQGFKNSPTLFDEALHRDLADFRIQHPDLILLQYVDDLLLAATSELDCQQGTRALLQTLGNLGYRASAKKAQICQKQVKYLGYLLKEGQRWLTEARKETVMGQPTPKTPRQLREFLGTAGFCRLWIPGFAEMAAPLYPLTKTGTLFNWGPDQQKAYQEIKQALLTAPALGLPDLTKPFELFVDEKQGYAKGVLTQKLGPWRRPVAYLSKKLDPVAAGWPPCLRMVAAIAVLTKDAGKLTMGQPLVILAPHAVEALVKQPPDRWLSNARMTHYQALLLDTDRVQFGPVVALNPATLLPLPEEGLQHNCLDILAEAHGTRPDLTDQPLPDADHTWYTDGSSLLQEGQRKAGAAVTTETEVIWAKALPAGTSAQRAELIALTQALKMAEGKKLNVYTDSRYAFATAHIHGEIYRRRGLLTSEGKEIKNKDEILALLKALFLPKRLSIIHCPGHQKGHSAEARGNRMADQAARKAAITETPDTSTLLAGKRTADGSEFEKRTADGSEFESPKKKAKVE

SEQ ID NO: 6866 - protein, 2094 aa, synthetic construct; identical to SEQ ID NO: 6864

SEQ ID NO: 6867 - protein, 2088 aa, synthetic construct
MPAAKRVKLDGGDKKYSIGLDIGTNSVGWAVITDEYKVPSKKFKVLGNTDRHSIKKNLIGALLFDSGETAEATRLKRTARRRYTRRKNRICYLQEIFSNEMAKVDDSFFHRLEESFLVEEDKKHERHPIFGNIVDEVAYHEKYPTIYHLRKKLVDSTDKADLRLIYLALAHMIKFRGHFLIEGDLNPDNSDVDKLFIQLVQTYNQLFEENPINASGVDAKAILSARLSKSRRLENLIAQLPGEKKNGLFGNLIALSLGLTPNFKSNFDLAEDAKLQLSKDTYDDDLDNLLAQIGDQYADLFLAAKNLSDAILLSDILRVNTEITKAPLSASMIKRYDEHHQDLTLLKALVRQQLPEKYKEIFFDQSKNGYAGYIDGGASQEEFYKFIKPILEKMDGTEELLVKLNREDLLRKQRTFDNGSIPHQIHLGELHAILRRQEDFYPFLKDNREKIEKILTFRIPYYVGPLARGNSRFAWMTRKSEETITPWNFEEVVDKGASAQSFIERMTNFDKNLPNEKVLPKHSLLYEYFTVYNELTKVKYVTEGMRKPAFLSGEQKKAIVDLLFKTNRKVTVKQLKEDYFKKIECFDSVEISGVEDRFNASLGTYHDLLKIIKDKDFLDNEENEDILEDIVLTLTLFEDREMIEERLKTYAHLFDDKVMKQLKRRRYTGWGRLSRKLINGIRDKQSGKTILDFLKSDGFANRNFMQLIHDDSLTFKEDIQKAQVSGQGDSLHEHIANLAGSPAIKKGILQTVKVVDELVKVMGRHKPENIVIEMARENQTTQKGQKNSRERMKRIEEGIKELGSQILKEHPVENTQLQNEKLYLYYLQNGRDMYVDQELDINRLSDYDVDHIVPQSFLKDDSIDNKVLTRSDKARGKSDNVPSEEVVKKMKNYWRQLLNAKLITQRKFDNLTKAERGGLSELDKAGFIKRQLVETRQITKHVAQILDSRMNTKYDENDKLIREVKVITLKSKLVSDFRKDFQFYKVREINNYHHAHDAYLNAVVGTALIKKYPKLESEFVYGDYKVYDVRKMIAKSEQEIGKATAKYFFYSNIMNFFKTEITLANGEIRKRPLIETNGETGEIVWDKGRDFATVRKVLSMPQVNIVKKTEVQTGGFSKESILPKRNSDKLIARKKDWDPKKYGGFDSPTVAYSVLVVAKVEKGKSKKLKSVKELLGITIMERSSFEKNPIDFLEAKGYKEVKKDLIIKLPKYSLFELENGRKRMLASAGELQKGNELALPSKYVNFLYLASHYEKLKGSPEDNEQKQLFVEQHKHYLDEIIEQISEFSKRVILADANLDKVLSAYNKHRDKPIREQAENIIHLFTLTNLGAPAAFKYFDTTIDRKRYTSTKEVLDATLIHQSITGLYETRIDLSQLGGDGGGSSGGSGGGGGTLQLDDEYRLYSPLVKPDQNIQFWLEQFPQAWAETAGMGLAKQVPPQVIQLKASATPVSVRQYPLSKEAQEGIRPHVQRLIQQGILVPVQSPWNTPLLPVRKPGTNDYRPVQDLREVNKRVQDIHPTVPNPYNLLCALPPQRSWYTVLDLKDAFFCLRLHPTSQPLFAFEWRDPGTGRTGQLTWTRLPQGFKNSPTIFDEALHRDLANFRIQHPQVTLLQYVDDLLLAGATKQDCLEGTKALLLELSDLGYRASAKKAQICRREVTYLGYSLRDGQRWLTEARKKTVVQIPAPTTAKQVREFLGTAGFCRLWIPGFATLAAPLYPLTKEKGEFSWAPEHQKAFDAIKKALLSAPALALPDVTKPFTLYVDERKGVARGVLTQTLGPWRRPVAYLSKKLDPVASGWPVCLKAIAAVAILVKDADKLTLGQNITVIAPHALENIVRQPPDRWMTNARMTHYQSLLLTERVTFAPPAALNPATLLPEETDEPVTHDCHQLLIEETGVRKDLTDIPLTGEVLTWFTDGSSYVVEGKRMAGAAVVDGTRTIWASSLPEGTSAQKAELMALTQALRLAEGKSINIYTDSRYAFATAHVHGAIYKQRGLLTSAGREIKNKEEILSLLEALHLPKRLAIIHCPGHQKAKDPISRGNQMADRVAKQAAQGVNLLAGKRTADGSEFEKRTADGSEFESPKKKAKVE

SEQ ID NO: 6868 - protein, 2088 aa, synthetic construct; identical to SEQ ID NO: 6867

SEQ ID NO: 6869 - protein, 2092 aa, synthetic construct
MPAAKRVKLDGGDKKYSIGLDIGTNSVGWAVITDEYKVPSKKFKVLGNTDRHSIKKNLIGALLFDSGETAEATRLKRTARRRYTRRKNRICYLQEIFSNEMAKVDDSFFHRLEESFLVEEDKKHERHPIFGNIVDEVAYHEKYPTIYHLRKKLVDSTDKADLRLIYLALAHMIKFRGHFLIEGDLNPDNSDVDKLFIQLVQTYNQLFEENPINASGVDAKAILSARLSKSRRLENLIAQLPGEKKNGLFGNLIALSLGLTPNFKSNFDLAEDAKLQLSKDTYDDDLDNLLAQIGDQYADLFLAAKNLSDAILLSDILRVNTEITKAPLSASMIKRYDEHHQDLTLLKALVRQQLPEKYKEIFFDQSKNGYAGYIDGGASQEEFYKFIKPILEKMDGTEELLVKLNREDLLRKQRTFDNGSIPHQIHLGELHAILRRQEDFYPFLKDNREKIEKILTFRIPYYVGPLARGNSRFAWMTRKSEETITPWNFEEVVDKGASAQSFIERMTNFDKNLPNEKVLPKHSLLYEYFTVYNELTKVKYVTEGMRKPAFLSGEQKKAIVDLLFKTNRKVTVKQLKEDYFKKIECFDSVEISGVEDRFNASLGTYHDLLKIIKDKDFLDNEENEDILEDIVLTLTLFEDREMIEERLKTYAHLFDDKVMKQLKRRRYTGWGRLSRKLINGIRDKQSGKTILDFLKSDGFANRNFMQLIHDDSLTFKEDIQKAQVSGQGDSLHEHIANLAGSPAIKKGILQTVKVVDELVKVMGRHKPENIVIEMARENQTTQKGQKNSRERMKRIEEGIKELGSQILKEHPVENTQLQNEKLYLYYLQNGRDMYVDQELDINRLSDYDVDHIVPQSFLKDDSIDNKVLTRSDKARGKSDNVPSEEVVKKMKNYWRQLLNAKLITQRKFDNLTKAERGGLSELDKAGFIKRQLVETRQITKHVAQILDSRMNTKYDENDKLIREVKVITLKSKLVSDFRKDFQFYKVREINNYHHAHDAYLNAVVGTALIKKYPKLESEFVYGDYKVYDVRKMIAKSEQEIGKATAKYFFYSNIMNFFKTEITLANGEIRKRPLIETNGETGEIVWDKGRDFATVRKVLSMPQVNIVKKTEVQTGGFSKESILPKRNSDKLIARKKDWDPKKYGGFDSPTVAYSVLVVAKVEKGKSKKLKSVKELLGITIMERSSFEKNPIDFLEAKGYKEVKKDLIIKLPKYSLFELENGRKRMLASAGELQKGNELALPSKYVNFLYLASHYEKLKGSPEDNEQKQLFVEQHKHYLDEIIEQISEFSKRVILADANLDKVLSAYNKHRDKPIREQAENIIHLFTLTNLGAPAAFKYFDTTIDRKRYTSTKEVLDATLIHQSITGLYETRIDLSQLGGDGGGSSGGSGGGGGVLNLEEEYRLHEKPVPSSIDPSWLQLFPTVWAERAGMGLANQVPPVVVELRSGASPVAVRQYPMSKEAREGIRPHIQRFLDLGVLVPCQSPWNTPLLPVKKPGTNDYRPVQDLREINKRVQDIHPTVPNPYNLLSSLPPSHTWYSVLDLKDAFFCLKLHPNSQPLFAFEWRDPEKGNTGQLTWTRLPQGFKNSPTLFNEALHRDLAPFRALNPQVVLLQYVDDLLVAAPTYRDCKEGTQKLLQELSKLGYRVSAKKAQLCQKEVTYLGYLLKEGKRWLTPARKATVMKIPPPTTPRQVREFLGTAGFCRLWIPGFASLAAPLYPLTKPSIPFIWTEEHQKAFDRIKEALLSAPALALPDLTKPFTLYVDERAGVARGVLTQTLGPWRRPVAYLSKKLDPVASGWPTCLKAVAAVALLLKDADKLTLGQNVTVIASHSLESIVRQPPDRWMTNARMTHYQSLLLNERVSFAPPAVLNPATLLPVESEATPVHRCSEILAEETGTRRDLKDQPLPGVPAWYTDGSSFIAEGKRRAGAAIVDGKRTVWASSLPEGTSAQKAELVALTQALRLAEGKDINIYTDSRYAFATAHIHGAIYKQRGWLTSAGKDIKNKEEILALLEAIHLPKRVAIIHCPGHQKGNDPVATGNRRADEAAKQAALSTRVLAETTKPAGKRTADGSEFEKRTADGSEFESPKKKAKVE

SEQ ID NO: 6870 - protein, 2092 aa, synthetic construct
MPAAKRVKLDGGDKKYSIGLDIGTNSVGWAVITDEYKVPSKKFKVLGNTDRHSIKKNLIGALLFDSGETAEATRLKRTARRRYTRRKNRICYLQEIFSNEMAKVDDSFFHRLEESFLVEEDKKHERHPIFGNIVDEVAYHEKYPTIYHLRKKLVDSTDKADLRLIYLALAHMIKFRGHFLIEGDLNPDNSDVDKLFIQLVQTYNQLFEENPINASGVDAKAILSARLSKSRRLENLIAQLPGEKKNGLFGNLIALSLGLTPNFKSNFDLAEDAKLQLSKDTYDDDLDNLLAQIGDQYADLFLAAKNLSDAILLSDILRVNTEITKAPLSASMIKRYDEHHQDLTLLKALVRQQLPEKYKEIFFDQSKNGYAGYIDGGASQEEFYKFIKPILEKMDGTEELLVKLNREDLLRKQRTFDNGSIPHQIHLGELHAILRRQEDFYPFLKDNREKIEKILTFRIPYYVGPLARGNSRFAWMTRKSEETITPWNFEEVVDKGASAQSFIERMTNFDKNLPNEKVLPKHSLLYEYFTVYNELTKVKYVTEGMRKPAFLSGEQKKAIVDLLFKTNRKVTVKQLKEDYFKKIECFDSVEISGVEDRFNASLGTYHDLLKIIKDKDFLDNEENEDILEDIVLTLTLFEDREMIEERLKTYAHLFDDKVMKQLKRRRYTGWGRLSRKLINGIRDKQSGKTILDFLKSDGFANRNFMQLIHDDSLTFKEDIQKAQVSGQGDSLHEHIANLAGSPAIKKGILQTVKVVDELVKVMGRHKPENIVIEMARENQTTQKGQKNSRERMKRIEEGIKELGSQILKEHPVENTQLQNEKLYLYYLQNGRDMYVDQELDINRLSDYDVDHIVPQSFLKDDSIDNKVLTRSDKARGKSDNVPSEEVVKKMKNYWRQLLNAKLITQRKFDNLTKAERGGLSELDKAGFIKRQLVETRQITKHVAQILDSRMNTKYDENDKLIREVKVITLKSKLVSDFRKDFQFYKVREINNYHHAHDAYLNAVVGTALIKKYPKLESEFVYGDYKVYDVRKMIAKSEQEIGKATAKYFFYSNIMNFFKTEITLANGEIRKRPLIETNGETGEIVWDKGRDFATVRKVLSMPQVNIVKKTEVQTGGFSKESILPKRNSDKLIARKKDWDPKKYGGFDSPTVAYSVLVVAKVEKGKSKKLKSVKELLGITIMERSSFEKNPIDFLEAKGYKEVKKDLIIKLPKYSLFELENGRKRMLASAGELQKGNELALPSKYVNFLYLASHYEKLKGSPEDNEQKQLFVEQHKHYLDEIIEQISEFSKRVILADANLDKVLSAYNKHRDKPIREQAENIIHLFTLTNLGAPAAFKYFDTTIDRKRYTSTKEVLDATLIHQSITGLYETRIDLSQLGGDGGGSSGGSGGGGGVLNLEEEYRLHEKPVPSSIDPSWLQLFPTVWAERAGMGLANQVPPVVVELRSGASPVAVRQYPMSKEAREGIRPHIQRFLDLGVLVPCQSPWNTPLLPVKKPGTNDYRPVQDLREINKRVQDIHPTVPNPYNLLSSLPPSHTWYSVLDLKDAFFCLKLHPNSQPLFAFEWRDPEKGNTGQLTWTRLPQGFKNSPTLFNEALHRDLAPFRALNPQVVLLQYVDDLLVAAPTYRDCKEGTQKLLQELSKLGYRVSAKKAQLCQKEVTYLGYLLKEGKRWLTPARKATVMKIPPPTTPRQVREFLGKAGFCRLFIPGFASLAAPLYPLTKPSIPFIWTEEHQKAFDRIKEALLSAPALALPDLTKPFTLYVDERAGVARGVLTQTLGPWRRPVAYLSKKLDPVASGWPTCLKAVAAVALLLKDADKLTLGQNVTVIASHSLESIVRQPPDRWMTNARMTHYQSLLLNERVSFAPPAVLNPATLLPVESEATPVHRCSEILAEETGTRRDLKDQPLPGVPAWYTDGSSFIAEGKRRAGAAIVDGKRTVWASSLPEGTSAQKAELVALTQALRLAEGKDINIYTDSRYAFATAHIHGAIYKQRGWLTSAGKDIKNKEEILALLEAIHLPKRVAIIHCPGHQKGNDPVATGNRRADEAAKQAALSTRVLAETTKPAGKRTADGSEFEKRTADGSEFESPKKKAKVE

SEQ ID NO: 6871 - protein, 2096 aa, synthetic construct
MPAAKRVKLDGGDKKYSIGLDIGTNSVGWAVITDEYKVPSKKFKVLGNTDRHSIKKNLIGALLFDSGETAEATRLKRTARRRYTRRKNRICYLQEIFSNEMAKVDDSFFHRLEESFLVEEDKKHERHPIFGNIVDEVAYHEKYPTIYHLRKKLVDSTDKADLRLIYLALAHMIKFRGHFLIEGDLNPDNSDVDKLFIQLVQTYNQLFEENPINASGVDAKAILSARLSKSRRLENLIAQLPGEKKNGLFGNLIALSLGLTPNFKSNFDLAEDAKLQLSKDTYDDDLDNLLAQIGDQYADLFLAAKNLSDAILLSDILRVNTEITKAPLSASMIKRYDEHHQDLTLLKALVRQQLPEKYKEIFFDQSKNGYAGYIDGGASQEEFYKFIKPILEKMDGTEELLVKLNREDLLRKQRTFDNGSIPHQIHLGELHAILRRQEDFYPFLKDNREKIEKILTFRIPYYVGPLARGNSRFAWMTRKSEETITPWNFEEVVDKGASAQSFIERMTNFDKNLPNEKVLPKHSLLYEYFTVYNELTKVKYVTEGMRKPAFLSGEQKKAIVDLLFKTNRKVTVKQLKEDYFKKIECFDSVEISGVEDRFNASLGTYHDLLKIIKDKDFLDNEENEDILEDIVLTLTLFEDREMIEERLKTYAHLFDDKVMKQLKRRRYTGWGRLSRKLINGIRDKQSGKTILDFLKSDGFANRNFMQLIHDDSLTFKEDIQKAQVSGQGDSLHEHIANLAGSPAIKKGILQTVKVVDELVKVMGRHKPENIVIEMARENQTTQKGQKNSRERMKRIEEGIKELGSQILKEHPVENTQLQNEKLYLYYLQNGRDMYVDQELDINRLSDYDVDHIVPQSFLKDDSIDNKVLTRSDKARGKSDNVPSEEVVKKMKNYWRQLLNAKLITQRKFDNLTKAERGGLSELDKAGFIKRQLVETRQITKHVAQILDSRMNTKYDENDKLIREVKVITLKSKLVSDFRKDFQFYKVREINNYHHAHDAYLNAVVGTALIKKYPKLESEFVYGDYKVYDVRKMIAKSEQEIGKATAKYFFYSNIMNFFKTEITLANGEIRKRPLIETNGETGEIVWDKGRDFATVRKVLSMPQVNIVKKTEVQTGGFSKESILPKRNSDKLIARKKDWDPKKYGGFDSPTVAYSVLVVAKVEKGKSKKLKSVKELLGITIMERSSFEKNPIDFLEAKGYKEVKKDLIIKLPKYSLFELENGRKRMLASAGELQKGNELALPSKYVNFLYLASHYEKLKGSPEDNEQKQLFVEQHKHYLDEIIEQISEFSKRVILADANLDKVLSAYNKHRDKPIREQAENIIHLFTLTNLGAPAAFKYFDTTIDRKRYTSTKEVLDATLIHQSITGLYETRIDLSQLGGDGGGSSGGGGGSGGTAPLEEEYRLFLEAPIQNVTLLEQWKREIPKVWAEINPPGLASTQAPIHVQLLSTALPVRVRQYPITLEAKRSLRETIRKFRAAGILRPVHSPWNTPLLPVRKSGTSEYRMVQDLREVNKRVETIHPTVPNPYTLLSLLPPDRIWYSVLDLKDAFFCIPLAPESQLIFAFEWADAEEGESGQLTWTRLPQGFKNSPTLFNEALNRDLQGFRLDHPSVSLLQYVDDLLIAADTQAACLSATRDLLMTLAELGYRVSGKKAQLCQEEVTYLGFKIHKGSRSLSNSRTQAILQIPVPKTKRQVREFLGTIGYCRLWIPGFAELAQPLYAATRPGNDPLVWGEKEEEAFQSLKLALTQPPALALPSLDKPFQLFVEETSGAAKGVLTQALGPWKRPVAYLSKRLDPVAAGWPRCLRAIAAAALLTREASKLTFGQDIEITSSHNLESLLRSPPDKWLTNARITQYQVLLLDPPRVRFKQTAALNPATLLPETDDTLPIHHCLDTLDSLTSTRPDLTDQPLAQAEATLFTDGSSYIRDGKRYAGAAVVTLDSVIWAEPLPIGTSAQKAELIALTKALEWSKDKSVNIYTDSRYAFATLHVHGMIYRERGWLTAGGKAIKNAPEILALLTAVWLPKRVAVMHCKGHQKDDAPTSTGNRRADEVAREVAIRPLSTQATISAGKRTADGSEFEKRTADGSEFESPKKKAKVE

SEQ ID NO: 6872 - protein, 2100 aa, synthetic construct
MPAAKRVKLDGGDKKYSIGLDIGTNSVGWAVITDEYKVPSKKFKVLGNTDRHSIKKNLIGALLFDSGETAEATRLKRTARRRYTRRKNRICYLQEIFSNEMAKVDDSFFHRLEESFLVEEDKKHERHPIFGNIVDEVAYHEKYPTIYHLRKKLVDSTDKADLRLIYLALAHMIKFRGHFLIEGDLNPDNSDVDKLFIQLVQTYNQLFEENPINASGVDAKAILSARLSKSRRLENLIAQLPGEKKNGLFGNLIALSLGLTPNFKSNFDLAEDAKLQLSKDTYDDDLDNLLAQIGDQYADLFLAAKNLSDAILLSDILRVNTEITKAPLSASMIKRYDEHHQDLTLLKALVRQQLPEKYKEIFFDQSKNGYAGYIDGGASQEEFYKFIKPILEKMDGTEELLVKLNREDLLRKQRTFDNGSIPHQIHLGELHAILRRQEDFYPFLKDNREKIEKILTFRIPYYVGPLARGNSRFAWMTRKSEETITPWNFEEVVDKGASAQSFIERMTNFDKNLPNEKVLPKHSLLYEYFTVYNELTKVKYVTEGMRKPAFLSGEQKKAIVDLLFKTNRKVTVKQLKEDYFKKIECFDSVEISGVEDRFNASLGTYHDLLKIIKDKDFLDNEENEDILEDIVLTLTLFEDREMIEERLKTYAHLFDDKVMKQLKRRRYTGWGRLSRKLINGIRDKQSGKTILDFLKSDGFANRNFMQLIHDDSLTFKEDIQKAQVSGQGDSLHEHIANLAGSPAIKKGILQTVKVVDELVKVMGRHKPENIVIEMARENQTTQKGQKNSRERMKRIEEGIKELGSQILKEHPVENTQLQNEKLYLYYLQNGRDMYVDQELDINRLSDYDVDHIVPQSFLKDDSIDNKVLTRSDKARGKSDNVPSEEVVKKMKNYWRQLLNAKLITQRKFDNLTKAERGGLSELDKAGFIKRQLVETRQITKHVAQILDSRMNTKYDENDKLIREVKVITLKSKLVSDFRKDFQFYKVREINNYHHAHDAYLNAVVGTALIKKYPKLESEFVYGDYKVYDVRKMIAKSEQEIGKATAKYFFYSNIMNFFKTEITLANGEIRKRPLIETNGETGEIVWDKGRDFATVRKVLSMPQVNIVKKTEVQTGGFSKESILPKRNSDKLIARKKDWDPKKYGGFDSPTVAYSVLVVAKVEKGKSKKLKSVKELLGITIMERSSFEKNPIDFLEAKGYKEVKKDLIIKLPKYSLFELENGRKRMLASAGELQKGNELALPSKYVNFLYLASHYEKLKGSPEDNEQKQLFVEQHKHYLDEIIEQISEFSKRVILADANLDKVLSAYNKHRDKPIREQAENIIHLFTLTNLGAPAAFKYFDTTIDRKRYTSTKEVLDATLIHQSITGLYETRIDLSQLGGDGGGSSGGGGGSGGTVSLQDEHRLFDIPVTTSLPDVWLQDFPQAWAETGGLGRAKCQAPIIIDLKPTAVPVSIKQYPMSLEAHMGIRQHIIKFLELGVLRPCRSPWNTPLLPVKKPGTQDYRPVQDLREINKRTVDIHPTVPNPYNLLSTLKPDYSWYTVLDLKDAFFCLPLAPQSQELFAFEWKDPERGISGQLTWTRLPQGFKNSPTLFNEALHRDLTDFRTQHPEVTLLQYVDDLLLAAPTKKACTQGTRHLLQELGEKGYRASAKKAQICQTKVTYLGYILSEGKRWLTPGRIETVARIPPPRNPREVREFLGTAGFCRLWIPGFAELAAPLYALTKPSTPFTWQTEHQLAFEALKKALLSAPALGLPDTSKPFTLFLDERQGIAKGVLTQKLGPWKRPVAYLSKKLDPVAAGWPPCLRIMAATAMLVKDSAKLTLGQPLTVITPHTLEAIVRQPPDRWITNARLTHYQALLLDTDRVQFGPPVTLNPATLLPVPENQPSPHDCRQVLAETHGTREDLKDQELPDADHTWYTDGSSYLDSGTRRAGAAVVDGHNTIWAQSLPPGTSAQKAELIALTKALELSKGKKANIYTDSRYAFATAHTHGSIYERRGWLTSEGKEIKNKAEIIALLKALFLPQEVAIIHCPGHQKGQDPVAVGNRQADRVARQAAMAEVLTLATEPDNTSHITAGKRTADGSEFEKRTADGSEFESPKKKAKVE

SEQ ID NO: 6873 - protein, 2216 aa, synthetic construct
MPAAKRVKLDGGDKKYSIGLDIGTNSVGWAVITDEYKVPSKKFKVLGNTDRHSIKKNLIGALLFDSGETAEATRLKRTARRRYTRRKNRICYLQEIFSNEMAKVDDSFFHRLEESFLVEEDKKHERHPIFGNIVDEVAYHEKYPTIYHLRKKLVDSTDKADLRLIYLALAHMIKFRGHFLIEGDLNPDNSDVDKLFIQLVQTYNQLFEENPINASGVDAKAILSARLSKSRRLENLIAQLPGEKKNGLFGNLIALSLGLTPNFKSNFDLAEDAKLQLSKDTYDDDLDNLLAQIGDQYADLFLAAKNLSDAILLSDILRVNTEITKAPLSASMIKRYDEHHQDLTLLKALVRQQLPEKYKEIFFDQSKNGYAGYIDGGASQEEFYKFIKPILEKMDGTEELLVKLNREDLLRKQRTFDNGSIPHQIHLGELHAILRRQEDFYPFLKDNREKIEKILTFRIPYYVGPLARGNSRFAWMTRKSEETITPWNFEEVVDKGASAQSFIERMTNFDKNLPNEKVLPKHSLLYEYFTVYNELTKVKYVTEGMRKPAFLSGEQKKAIVDLLFKTNRKVTVKQLKEDYFKKIECFDSVEISGVEDRFNASLGTYHDLLKIIKDKDFLDNEENEDILEDIVLTLTLFEDREMIEERLKTYAHLFDDKVMKQLKRRRYTGWGRLSRKLINGIRDKQSGKTILDFLKSDGFANRNFMQLIHDDSLTFKEDIQKAQVSGQGDSLHEHIANLAGSPAIKKGILQTVKVVDELVKVMGRHKPENIVIEMARENQTTQKGQKNSRERMKRIEEGIKELGSQILKEHPVENTQLQNEKLYLYYLQNGRDMYVDQELDINRLSDYDVDHIVPQSFLKDDSIDNKVLTRSDKARGKSDNVPSEEVVKKMKNYWRQLLNAKLITQRKFDNLTKAERGGLSELDKAGFIKRQLVETRQITKHVAQILDSRMNTKYDENDKLIREVKVITLKSKLVSDFRKDFQFYKVREINNYHHAHDAYLNAVVGTALIKKYPKLESEFVYGDYKVYDVRKMIAKSEQEIGKATAKYFFYSNIMNFFKTEITLANGEIRKRPLIETNGETGEIVWDKGRDFATVRKVLSMPQVNIVKKTEVQTGGFSKESILPKRNSDKLIARKKDWDPKKYGGFDSPTVAYSVLVVAKVEKGKSKKLKSVKELLGITIMERSSFEKNPIDFLEAKGYKEVKKDLIIKLPKYSLFELENGRKRMLASAGELQKGNELALPSKYVNFLYLASHYEKLKGSPEDNEQKQLFVEQHKHYLDEIIEQISEFSKRVILADANLDKVLSAYNKHRDKPIREQAENIIHLFTLTNLGAPAAFKYFDTTIDRKRYTSTKEVLDATLIHQSITGLYETRIDLSQLGGDGGGSSGGGGGSGGTLGDQGSRGSDPLPEPRVTLTVEGIPTEFLVNTGAEHSVLTKPMGKMGSKRTVVAGATGSKVYPWTTKRLLKIGQKQVTHSFLVIPECPAPLLGRDLLTKLKAQIQFSTEGPQVTWEDRPAMCLVLNLEEEYRLHEKPVPPSIDPSWLQLFPMVWAEKAGMGLANQVPPVVVELKSDASPVAVRQYPMSKEAREGIRPHIQRFLDLGILVPCQSPWNTPLLPVKKPGTNDYRPVQDLREVNKRVQDIHPTVPNPYNLLSSLPPSHTWYSVLDLKDAFFCLKLHPNSQPLFAFEWRDPEKGNTGQLTWTRLPQGFKNSPTLFDEALHRDLASFRALNPQVVMLQYVDDLLVAAPTYRDCKEGTRRLLQELSKLGYRVSAKKAQLCREEVTYLGYLLKGGKRWLTPARKATVMKIPTPTTPRQVREFLGTAGFCRLWIPGFASLAAPLYPLTREKVPFTWTEAHQEAFGRIKEALLSAPALALPDLTKPFALYVDEKEGVARGVLTQTLGPWRRPVAYLSKKLDPVASGWPTCLKAIAAVALLLKDADKLTLGQNVLVIAPHNLESIVRQPPDRWMTNARMTHYQSLLLNERVSFAPPAILNPATLLPVESDDTPIHICSEILAEETGTRPDLRDQPLPGVPAWYTDGSSFIMDGRRQAGAAIVDNKRTVWASNLPEGTSAQKAELIALTQALRLAEGKSINIYTDSRYAFATAHVHGAIYKQRGLLTSAGKDIKNKEEILALLEAIHLPKRVAIIHCPGHQRGTDPVATGNRKADEAAKQAAQSTRILTETTKNAGKRTADGSEFEKRTADGSEFESPKKKAKVE

SEQ ID NO: 6874 - protein, 2125 aa, synthetic construct
MPAAKRVKLDGGDKKYSIGLDIGTNSVGWAVITDEYKVPSKKFKVLGNTDRHSIKKNLIGALLFDSGETAEATRLKRTARRRYTRRKNRICYLQEIFSNEMAKVDDSFFHRLEESFLVEEDKKHERHPIFGNIVDEVAYHEKYPTIYHLRKKLVDSTDKADLRLIYLALAHMIKFRGHFLIEGDLNPDNSDVDKLFIQLVQTYNQLFEENPINASGVDAKAILSARLSKSRRLENLIAQLPGEKKNGLFGNLIALSLGLTPNFKSNFDLAEDAKLQLSKDTYDDDLDNLLAQIGDQYADLFLAAKNLSDAILLSDILRVNTEITKAPLSASMIKRYDEHHQDLTLLKALVRQQLPEKYKEIFFDQSKNGYAGYIDGGASQEEFYKFIKPILEKMDGTEELLVKLNREDLLRKQRTFDNGSIPHQIHLGELHAILRRQEDFYPFLKDNREKIEKILTFRIPYYVGPLARGNSRFAWMTRKSEETITPWNFEEVVDKGASAQSFIERMTNFDKNLPNEKVLPKHSLLYEYFTVYNELTKVKYVTEGMRKPAFLSGEQKKAIVDLLFKTNRKVTVKQLKEDYFKKIECFDSVEISGVEDRFNASLGTYHDLLKIIKDKDFLDNEENEDILEDIVLTLTLFEDREMIEERLKTYAHLFDDKVMKQLKRRRYTGWGRLSRKLINGIRDKQSGKTILDFLKSDGFANRNFMQLIHDDSLTFKEDIQKAQVSGQGDSLHEHIANLAGSPAIKKGILQTVKVVDELVKVMGRHKPENIVIEMARENQTTQKGQKNSRERMKRIEEGIKELGSQILKEHPVENTQLQNEKLYLYYLQNGRDMYVDQELDINRLSDYDVDHIVPQSFLKDDSIDNKVLTRSDKARGKSDNVPSEEVVKKMKNYWRQLLNAKLITQRKFDNLTKAERGGLSELDKAGFIKRQLVETRQITKHVAQILDSRMNTKYDENDKLIREVKVITLKSKLVSDFRKDFQFYKVREINNYHHAHDAYLNAVVGTALIKKYPKLESEFVYGDYKVYDVRKMIAKSEQEIGKATAKYFFYSNIMNFFKTEITLANGEIRKRPLIETNGETGEIVWDKGRDFATVRKVLSMPQVNIVKKTEVQTGGFSKESILPKRNSDKLIARKKDWDPKKYGGFDSPTVAYSVLVVAKVEKGKSKKLKSVKELLGITIMERSSFEKNPIDFLEAKGYKEVKKDLIIKLPKYSLFELENGRKRMLASAGELQKGNELALPSKYVNFLYLASHYEKLKGSPEDNEQKQLFVEQHKHYLDEIIEQISEFSKRVILADANLDKVLSAYNKHRDKPIREQAENIIHLFTLTNLGAPAAFKYFDTTIDRKRYTSTKEVLDATLIHQSITGLYETRIDLSQLGGDGGGSSGGGGGSGGLLGRDLLTKLKAQIQFSTEGPQVTWEDRPAMCLVLNLEEEYRLHEKPVPPSIDPSWLQLFPMVWAEKAGMGLANQVPPVVVELKSDASPVAVRQYPMSKEAREGIRPHIQRFLDLGILVPCQSPWNTPLLPVKKPGTNDYRPVQDLREVNKRVQDIHPTVPNPYNLLSSLPPSHTWYSVLDLKDAFFCLKLHPNSQPLFAFEWRDPEKGNTGQLTWTRLPQGFKNSPTLFNEALHRDLASFRALNPQVVMLQYVDDLLVAAPTYRDCKEGTRRLLQELSKLGYRVSAKKAQLCREEVTYLGYLLKGGKRWLTPARKATVMKIPTPTTPRQVREFLGTAGFCRLWIPGFASLAAPLYPLTRPKVPFTWTEAHQEAFGRIKEALLSAPALALPDLTKPFALYVDEKEGVARGVLTQTLGPWRRPVAYLSKKLDPVASGWPTCLKAIAAVALLLKDADKLTLGQNVLVIAPHNLESIVRQPPDRWMTNARMTHYQSLLLNERVSFAPPAILNPATLLPVESDDTPIHICSEILAEETGTRPDLRDQPLPGVPAWYTDGSSFIMDGRRQAGAAIVDNKRTVWASNLPEGTSAQKAELIALTQALRLAEGKSINIYTDSRYAFATAHVHGAIYKQRGWLTSAGKDIKNKEEILALLEAIHLPKRVAIIHCPGHQRGTDPVATGNRKADEAAKQAAQSTRILTETTKNAGKRTADGSEFEKRTADGSEFESPKKKAKVE

SEQ ID NO: 6875 - protein, 2094 aa, synthetic construct; identical to SEQ ID NO: 4517

SEQ ID NO: 6876 - protein, 2094 aa, synthetic construct; identical to SEQ ID NO: 4517

SEQ ID NO: 6877 - protein, 2094 aa, synthetic construct
MPAAKRVKLDGGDKKYSIGLDIGTNSVGWAVITDEYKVPSKKFKVLGNTDRHSIKKNLIGALLFDSGETAEATRLKRTARRRYTRRKNRICYLQEIFSNEMAKVDDSFFHRLEESFLVEEDKKHERHPIFGNIVDEVAYHEKYPTIYHLRKKLVDSTDKADLRLIYLALAHMIKFRGHFLIEGDLNPDNSDVDKLFIQLVQTYNQLFEENPINASGVDAKAILSARLSKSRRLENLIAQLPGEKKNGLFGNLIALSLGLTPNFKSNFDLAEDAKLQLSKDTYDDDLDNLLAQIGDQYADLFLAAKNLSDAILLSDILRVNTEITKAPLSASMIKRYDEHHQDLTLLKALVRQQLPEKYKEIFFDQSKNGYAGYIDGGASQEEFYKFIKPILEKMDGTEELLVKLNREDLLRKQRTFDNGSIPHQIHLGELHAILRRQEDFYPFLKDNREKIEKILTFRIPYYVGPLARGNSRFAWMTRKSEETITPWNFEEVVDKGASAQSFIERMTNFDKNLPNEKVLPKHSLLYEYFTVYNELTKVKYVTEGMRKPAFLSGEQKKAIVDLLFKTNRKVTVKQLKEDYFKKIECFDSVEISGVEDRFNASLGTYHDLLKIIKDKDFLDNEENEDILEDIVLTLTLFEDREMIEERLKTYAHLFDDKVMKQLKRRRYTGWGRLSRKLINGIRDKQSGKTILDFLKSDGFANRNFMQLIHDDSLTFKEDIQKAQVSGQGDSLHEHIANLAGSPAIKKGILQTVKVVDELVKVMGRHKPENIVIEMARENQTTQKGQKNSRERMKRIEEGIKELGSQILKEHPVENTQLQNEKLYLYYLQNGRDMYVDQELDINRLSDYDVDHIVPQSFLKDDSIDNKVLTRSDKARGKSDNVPSEEVVKKMKNYWRQLLNAKLITQRKFDNLTKAERGGLSELDKAGFIKRQLVETRQITKHVAQILDSRMNTKYDENDKLIREVKVITLKSKLVSDFRKDFQFYKVREINNYHHAHDAYLNAVVGTALIKKYPKLESEFVYGDYKVYDVRKMIAKSEQEIGKATAKYFFYSNIMNFFKTEITLANGEIRKRPLIETNGETGEIVWDKGRDFATVRKVLSMPQVNIVKKTEVQTGGFSKESILPKRNSDKLIARKKDWDPKKYGGFDSPTVAYSVLVVAKVEKGKSKKLKSVKELLGITIMERSSFEKNPIDFLEAKGYKEVKKDLIIKLPKYSLFELENGRKRMLASAGELQKGNELALPSKYVNFLYLASHYEKLKGSPEDNEQKQLFVEQHKHYLDEIIEQISEFSKRVILADANLDKVLSAYNKHRDKPIREQAENIIHLFTLTNLGAPAAFKYFDTTIDRKRYTSTKEVLDATLIHQSITGLYETRIDLSQLGGDGGGSSGGGGGSGGTLGIEDEYRLHETSTEPDVSLGSTWLSDFPQAWAETGGMGLAVRQAPLIIPLKATSTPVSIQQYPMSHEARLGIKPHIQRLLDQGILVPCQSPWNTPLLPVKKPGTNDYRPVQDLREVNKRVEDIHPTVPNPYNLLSGLPPSHQWYTVLDLKDAFFCLRLHPTSQPLFAFEWRDPGMGISGQLTWTRLPQGFKNSPTLFNEALHRDLADFRIQHPDLILLQYVDDILLAATSELDCQQGTRALLQTLGDLGYRASAKKAQICQKQVKYLGYLLREGQRWLTEARKETVMGQPVPKTPRQLREFLGTAGFCRLWIPGFAEMAAPLYPLTKPGTLFSWGPDQQKAYQEIKQALLTAPALGLPDLTKPFELFVDEKQGYAKGVLTQKLGPWRRPVAYLSKKLDPVAAGWPPCLRMVAAIAVLTKDAGKLTMGQPLVILAPHAVEALVKQPPDRWLSNARMTHYQAMLLDTDRVQFGPVVALNPATLLPLPEEGAPHDCLEILAETHGTRPDLTDQPIPDADHTWYTDGSSFLQEGQRKAGAAVTTETEVIWAGALPAGTSAQRAELIALTQALKMAEGKRLNVYTDSRYAFATAHIHGEIYRRRGWLTSEGREIKNKSEILALLKALFLPKRLSIIHCLGHQKGDSAEARGNRLADQAAREAAIKTPPDTSTLLAGKRTADGSEFEKRTADGSEFESPKKKAKVE

SEQ ID NO: 6878 - protein, 2094 aa, synthetic construct
MPAAKRVKLDGGDKKYSIGLDIGTNSVGWAVITDEYKVPSKKFKVLGNTDRHSIKKNLIGALLFDSGETAEATRLKRTARRRYTRRKNRICYLQEIFSNEMAKVDDSFFHRLEESFLVEEDKKHERHPIFGNIVDEVAYHEKYPTIYHLRKKLVDSTDKADLRLIYLALAHMIKFRGHFLIEGDLNPDNSDVDKLFIQLVQTYNQLFEENPINASGVDAKAILSARLSKSRRLENLIAQLPGEKKNGLFGNLIALSLGLTPNFKSNFDLAEDAKLQLSKDTYDDDLDNLLAQIGDQYADLFLAAKNLSDAILLSDILRVNTEITKAPLSASMIKRYDEHHQDLTLLKALVRQQLPEKYKEIFFDQSKNGYAGYIDGGASQEEFYKFIKPILEKMDGTEELLVKLNREDLLRKQRTFDNGSIPHQIHLGELHAILRRQEDFYPFLKDNREKIEKILTFRIPYYVGPLARGNSRFAWMTRKSEETITPWNFEEVVDKGASAQSFIERMTNFDKNLPNEKVLPKHSLLYEYFTVYNELTKVKYVTEGMRKPAFLSGEQKKAIVDLLFKTNRKVTVKQLKEDYFKKIECFDSVEISGVEDRFNASLGTYHDLLKIIKDKDFLDNEENEDILEDIVLTLTLFEDREMIEERLKTYAHLFDDKVMKQLKRRRYTGWGRLSRKLINGIRDKQSGKTILDFLKSDGFANRNFMQLIHDDSLTFKEDIQKAQVSGQGDSLHEHIANLAGSPAIKKGILQTVKVVDELVKVMGRHKPENIVIEMARENQTTQKGQKNSRERMKRIEEGIKELGSQILKEHPVENTQLQNEKLYLYYLQNGRDMYVDQELDINRLSDYDVDHIVPQSFLKDDSIDNKVLTRSDKARGKSDNVPSEEVVKKMKNYWRQLLNAKLITQRKFDNLTKAERGGLSELDKAGFIKRQLVETRQITKHVAQILDSRMNTKYDENDKLIREVKVITLKSKLVSDFRKDFQFYKVREINNYHHAHDAYLNAVVGTALIKKYPKLESEFVYGDYKVYDVRKMIAKSEQEIGKATAKYFFYSNIMNFFKTEITLANGEIRKRPLIETNGETGEIVWDKGRDFATVRKVLSMPQVNIVKKTEVQTGGFSKESILPKRNSDKLIARKKDWDPKKYGGFDSPTVAYSVLVVAKVEKGKSKKLKSVKELLGITIMERSSFEKNPIDFLEAKGYKEVKKDLIIKLPKYSLFELENGRKRMLASAGELQKGNELALPSKYVNFLYLASHYEKLKGSPEDNEQKQLFVEQHKHYLDEIIEQISEFSKRVILADANLDKVLSAYNKHRDKPIREQAENIIHLFTLTNLGAPAAFKYFDTTIDRKRYTSTKEVLDATLIHQSITGLYETRIDLSQLGGDGGGSSGGGGGSGGTLNIEDEYRLHETSKEPDVSLGSTWLSDFPQAWAETGGMGLAVRQAPLIIPLKATSTPVSIKQYPMSQEARLGIKPHIQRLLDQGILVPCQSPWNTPLLPVKKPGTNDYRPVQDLREVNKRVEDIHPTVPNPYNLLSGLPPSHQWYTVLDLKDAFFCLRLHPTSQPLFAFEWRDPEMGISGQLTWTRLPQGFKNSPTLFNEALHRDLAGFRIQHPDLILLQYVDDLLLAATSELDCQQGTRALLQTLGDLGYRASAKKAQICQKQVKYLGYLLKEGQRWLTEARKETVMGQPIPKTPRQLREFLGTAGFCRLWIPGFAEMAAPLYPLTKPGTLFNWGPDQQKAFQEIKQALLTAPALGLPDLTKPFELFVDEKQGYAKGVLTQKLGPWRRPVAYLSKKLDPVAAGWPPCLRMVAAIAVLTKDAGKLTMGQPLVILAPHAVEALVKQPPDRWLSNARMTHYQALLLDTDRVQFGPVVALNPATLLPLPEEGLQHDCLDILAEAHGTRSDLMDQPLPDADHTWYTDGSSFLQEGQRKAGAAVTTETEVIWARALPAGTSAQRAELIALTQALKMAEGKKLNVYTDSRYAFATAHIHGEIYRRRGWLTSEGKEIKNKDEILALLKALFLPKRLSIIHCPGHQKGNSAEARGNRMADQAAREVATRETPETSTLLAGKRTADGSEFEKRTADGSEFESPKKKAKVE

SEQ ID NO: 6879 - protein, 2094 aa, synthetic construct
MPAAKRVKLDGGDKKYSIGLDIGTNSVGWAVITDEYKVPSKKFKVLGNTDRHSIKKNLIGALLFDSGETAEATRLKRTARRRYTRRKNRICYLQEIFSNEMAKVDDSFFHRLEESFLVEEDKKHERHPIFGNIVDEVAYHEKYPTIYHLRKKLVDSTDKADLRLIYLALAHMIKFRGHFLIEGDLNPDNSDVDKLFIQLVQTYNQLFEENPINASGVDAKAILSARLSKSRRLENLIAQLPGEKKNGLFGNLIALSLGLTPNFKSNFDLAEDAKLQLSKDTYDDDLDNLLAQIGDQYADLFLAAKNLSDAILLSDILRVNTEITKAPLSASMIKRYDEHHQDLTLLKALVRQQLPEKYKEIFFDQSKNGYAGYIDGGASQEEFYKFIKPILEKMDGTEELLVKLNREDLLRKQRTFDNGSIPHQIHLGELHAILRRQEDFYPFLKDNREKIEKILTFRIPYYVGPLARGNSRFAWMTRKSEETITPWNFEEVVDKGASAQSFIERMTNFDKNLPNEKVLPKHSLLYEYFTVYNELTKVKYVTEGMRKPAFLSGEQKKAIVDLLFKTNRKVTVKQLKEDYFKKIECFDSVEISGVEDRFNASLGTYHDLLKIIKDKDFLDNEENEDILEDIVLTLTLFEDREMIEERLKTYAHLFDDKVMKQLKRRRYTGWGRLSRKLINGIRDKQSGKTILDFLKSDGFANRNFMQLIHDDSLTFKEDIQKAQVSGQGDSLHEHIANLAGSPAIKKGILQTVKVVDELVKVMGRHKPENIVIEMARENQTTQKGQKNSRERMKRIEEGIKELGSQILKEHPVENTQLQNEKLYLYYLQNGRDMYVDQELDINRLSDYDVDHIVPQSFLKDDSIDNKVLTRSDKARGKSDNVPSEEVVKKMKNYWRQLLNAKLITQRKFDNLTKAERGGLSELDKAGFIKRQLVETRQITKHVAQILDSRMNTKYDENDKLIREVKVITLKSKLVSDFRKDFQFYKVREINNYHHAHDAYLNAVVGTALIKKYPKLESEFVYGDYKVYDVRKMIAKSEQEIGKATAKYFFYSNIMNFFKTEITLANGEIRKRPLIETNGETGEIVWDKGRDFATVRKVLSMPQVNIVKKTEVQTGGFSKESILPKRNSDKLIARKKDWDPKKYGGFDSPTVAYSVLVVAKVEKGKSKKLKSVKELLGITIMERSSFEKNPIDFLEAKGYKEVKKDLIIKLPKYSLFELENGRKRMLASAGELQKGNELALPSKYVNFLYLASHYEKLKGSPEDNEQKQLFVEQHKHYLDEIIEQISEFSKRVILADANLDKVLSAYNKHRDKPIREQAENIIHLFTLTNLGAPAAFKYFDTTIDRKRYTSTKEVLDATLIHQSITGLYETRIDLSQLGGDGGGSSGGGGGSGGTLNIEDEYRLHETSKEPDVSLGSTWLSDFPQAWAETGGMGLAVRQAPLIIPLKATSTPVSIKQYPMSQEARLGIKPHIQRLLDQGILVPCQSPWNTPLLPVKKPGTNDYRPVQDLREVNKRVEDIHPTVPNPYNLLSGLPPSHQWYTVLDLKDAFFCLRLHPTSQPLFAFEWRDPEMGISGQLTWTRLPQGFKNSPTLFNEALHRDLAGFRIQHPDLILLQYVDDLLLAATSELDCQQGTRALLQTLGDLGYRASAKKAQICQKQVKYLGYLLKEGQRWLTEARKETVMGQPIPKTPRQLREFLGKAGFCRLFIPGFAEMAAPLYPLTKPGTLFNWGPDQQKAFQEIKQALLTAPALGLPDLTKPFELFVDEKQGYAKGVLTQKLGPWRRPVAYLSKKLDPVAAGWPPCLRMVAAIAVLTKDAGKLTMGQPLVILAPHAVEALVKQPPDRWLSNARMTHYQALLLDTDRVQFGPVVALNPATLLPLPEEGLQHDCLDILAEAHGTRSDLMDQPLPDADHTWYTDGSSFLQEGQRKAGAAVTTETEVIWARALPAGTSAQRAELIALTQALKMAEGKKLNVYTDSRYAFATAHIHGEIYRRRGWLTSEGKEIKNKDEILALLKALFLPKRLSIIHCPGHQKGNSAEARGNRMADQAAREVATRETPETSTLLAGKRTADGSEFEKRTADGSEFESPKKKAKVE

SEQ ID NO: 6880 - protein, 2114 aa, synthetic construct
MPAAKRVKLDGGDKKYSIGLDIGTNSVGWAVITDEYKVPSKKFKVLGNTDRHSIKKNLIGALLFDSGETAEATRLKRTARRRYTRRKNRICYLQEIFSNEMAKVDDSFFHRLEESFLVEEDKKHERHPIFGNIVDEVAYHEKYPTIYHLRKKLVDSTDKADLRLIYLALAHMIKFRGHFLIEGDLNPDNSDVDKLFIQLVQTYNQLFEENPINASGVDAKAILSARLSKSRRLENLIAQLPGEKKNGLFGNLIALSLGLTPNFKSNFDLAEDAKLQLSKDTYDDDLDNLLAQIGDQYADLFLAAKNLSDAILLSDILRVNTEITKAPLSASMIKRYDEHHQDLTLLKALVRQQLPEKYKEIFFDQSKNGYAGYIDGGASQEEFYKFIKPILEKMDGTEELLVKLNREDLLRKQRTFDNGSIPHQIHLGELHAILRRQEDFYPFLKDNREKIEKILTFRIPYYVGPLARGNSRFAWMTRKSEETITPWNFEEVVDKGASAQSFIERMTNFDKNLPNEKVLPKHSLLYEYFTVYNELTKVKYVTEGMRKPAFLSGEQKKAIVDLLFKTNRKVTVKQLKEDYFKKIECFDSVEISGVEDRFNASLGTYHDLLKIIKDKDFLDNEENEDILEDIVLTLTLFEDREMIEERLKTYAHLFDDKVMKQLKRRRYTGWGRLSRKLINGIRDKQSGKTILDFLKSDGFANRNFMQLIHDDSLTFKEDIQKAQVSGQGDSLHEHIANLAGSPAIKKGILQTVKVVDELVKVMGRHKPENIVIEMARENQTTQKGQKNSRERMKRIEEGIKELGSQILKEHPVENTQLQNEKLYLYYLQNGRDMYVDQELDINRLSDYDVDHIVPQSFLKDDSIDNKVLTRSDKARGKSDNVPSEEVVKKMKNYWRQLLNAKLITQRKFDNLTKAERGGLSELDKAGFIKRQLVETRQITKHVAQILDSRMNTKYDENDKLIREVKVITLKSKLVSDFRKDFQFYKVREINNYHHAHDAYLNAVVGTALIKKYPKLESEFVYGDYKVYDVRKMIAKSEQEIGKATAKYFFYSNIMNFFKTEITLANGEIRKRPLIETNGETGEIVWDKGRDFATVRKVLSMPQVNIVKKTEVQTGGFSKESILPKRNSDKLIARKKDWDPKKYGGFDSPTVAYSVLVVAKVEKGKSKKLKSVKELLGITIMERSSFEKNPIDFLEAKGYKEVKKDLIIKLPKYSLFELENGRKRMLASAGELQKGNELALPSKYVNFLYLASHYEKLKGSPEDNEQKQLFVEQHKHYLDEIIEQISEFSKRVILADANLDKVLSAYNKHRDKPIREQAENIIHLFTLTNLGAPAAFKYFDTTIDRKRYTSTKEVLDATLIHQSITGLYETRIDLSQLGGDGGGSSGGGGGSGGVQEISDSRPMLHIYLNGRRFLGLLDTGADKTCIAGRDWPANWPIHQTESSLQGLGMACGVARSSQPLRWQHEDKSGIIHPFVIPTLPFTLWGRDIMKDIKVRLMTDSPDDSQDLMIGAIESNLFADQISWKSDQPVWLNQWPLKQEKLQALQQLVTEQLQLGHLEESNSPWNTPVFVIKKKSGKWRLLQDLRAVNATMHDMGALQPGLPSPVAVPKGWEIIIIDLQDCFFNIKLHPEDCKRFAFSVPSPNFKRPYQRFQWKVLPQGMKNSPTLCQKFVDKAILTVRDKYQDSYIVHYMDDILLAHPSRSIVDEILTSMIQALNKHGLVVSTEKIQKYDNLKYLGTHIQGDSVSYQKLQIRTDKLRTLNDFQKLLGNINWIRPFLKLTTGELKPLFEILNGDSNPISTRKLTPEACKALQLMNERLSTARVKRLDLSQPWSLCILKTEYTPTACLWQDGVVEWIHLPHISPKVITPYDIFCTQLIIKGRHRSKELFSKDPDYIVVPYTKVQFDLLLQEKEDWPISLLGFLGEVHFHLPKDPLLTFTLQTAIIFPHMTSTTPLEKGIVIFTDGSANGRSVTYIQGREPIIKENTQNTAQQAEIVAVITAFEEVSQPFNLYTDSKYVTGLFPEIETATLSPRTKIYTELKHLQRLIHKRQEKFYIGHIRGHTGLPGPLAQGNAYADSLTRILTAAGKRTADGSEFEKRTADGSEFESPKKKAKVE

SEQ ID NO: 6881 - protein, 2086 aa, synthetic construct
MPAAKRVKLDGGDKKYSIGLDIGTNSVGWAVITDEYKVPSKKFKVLGNTDRHSIKKNLIGALLFDSGETAEATRLKRTARRRYTRRKNRICYLQEIFSNEMAKVDDSFFHRLEESFLVEEDKKHERHPIFGNIVDEVAYHEKYPTIYHLRKKLVDSTDKADLRLIYLALAHMIKFRGHFLIEGDLNPDNSDVDKLFIQLVQTYNQLFEENPINASGVDAKAILSARLSKSRRLENLIAQLPGEKKNGLFGNLIALSLGLTPNFKSNFDLAEDAKLQLSKDTYDDDLDNLLAQIGDQYADLFLAAKNLSDAILLSDILRVNTEITKAPLSASMIKRYDEHHQDLTLLKALVRQQLPEKYKEIFFDQSKNGYAGYIDGGASQEEFYKFIKPILEKMDGTEELLVKLNREDLLRKQRTFDNGSIPHQIHLGELHAILRRQEDFYPFLKDNREKIEKILTFRIPYYVGPLARGNSRFAWMTRKSEETITPWNFEEVVDKGASAQSFIERMTNFDKNLPNEKVLPKHSLLYEYFTVYNELTKVKYVTEGMRKPAFLSGEQKKAIVDLLFKTNRKVTVKQLKEDYFKKIECFDSVEISGVEDRFNASLGTYHDLLKIIKDKDFLDNEENEDILEDIVLTLTLFEDREMIEERLKTYAHLFDDKVMKQLKRRRYTGWGRLSRKLINGIRDKQSGKTILDFLKSDGFANRNFMQLIHDDSLTFKEDIQKAQVSGQGDSLHEHIANLAGSPAIKKGILQTVKVVDELVKVMGRHKPENIVIEMARENQTTQKGQKNSRERMKRIEEGIKELGSQILKEHPVENTQLQNEKLYLYYLQNGRDMYVDQELDINRLSDYDVDHIVPQSFLKDDSIDNKVLTRSDKARGKSDNVPSEEVVKKMKNYWRQLLNAKLITQRKFDNLTKAERGGLSELDKAGFIKRQLVETRQITKHVAQILDSRMNTKYDENDKLIREVKVITLKSKLVSDFRKDFQFYKVREINNYHHAHDAYLNAVVGTALIKKYPKLESEFVYGDYKVYDVRKMIAKSEQEIGKATAKYFFYSNIMNFFKTEITLANGEIRKRPLIETNGETGEIVWDKGRDFATVRKVLSMPQVNIVKKTEVQTGGFSKESILPKRNSDKLIARKKDWDPKKYGGFDSPTVAYSVLVVAKVEKGKSKKLKSVKELLGITIMERSSFEKNPIDFLEAKGYKEVKKDLIIKLPKYSLFELENGRKRMLASAGELQKGNELALPSKYVNFLYLASHYEKLKGSPEDNEQKQLFVEQHKHYLDEIIEQISEFSKRVILADANLDKVLSAYNKHRDKPIREQAENIIHLFTLTNLGAPAAFKYFDTTIDRKRYTSTKEVLDATLIHQSITGLYETRIDLSQLGGDGGGSSGGGGGSGGLDDEYRLYSPLVKPDQNIQFWLEQFPQAWAETAGMGLAKQVPPQVIQLKASATPVSVRQYPLSKEAQEGIRPHVQRLIQQGILVPVQSPWNTPLLPVRKPGTNDYRPVQDLREVNKRVQDIHPTVPNPYNLLCALPPQRSWYTVLDLKDAFFCLRLHPTSQPLFAFEWRDPGTGRTGQLTWTRLPQGFKNSPTIFNEALHRDLANFRIQHPQVTLLQYVDDLLLAGATKQDCLEGTKALLLELSDLGYRASAKKAQICRREVTYLGYSLRDGQRWLTEARKKTVVQIPAPTTAKQVREFLGKAGFCRLFIPGFATLAAPLYPLTKPKGEFSWAPEHQKAFDAIKKALLSAPALALPDVTKPFTLYVDERKGVARGVLTQTLGPWRRPVAYLSKKLDPVASGWPVCLKAIAAVAILVKDADKLTLGQNITVIAPHALENIVRQPPDRWMTNARMTHYQSLLLTERVTFAPPAALNPATLLPEETDEPVTHDCHQLLIEETGVRKDLTDIPLTGEVLTWFTDGSSYVVEGKRMAGAAVVDGTRTIWASSLPEGTSAQKAELMALTQALRLAEGKSINIYTDSRYAFATAHVHGAIYKQRGWLTSAGREIKNKEEILSLLEALHLPKRLAIIHCPGHQKAKDPISRGNQMADRVAKQAAQGVNLLPAGKRTADGSEFEKRTADGSEFESPKKKAKVE

SEQ ID NO: 6882 - protein, 2094 aa, synthetic construct
MPAAKRVKLDGGDKKYSIGLDIGTNSVGWAVITDEYKVPSKKFKVLGNTDRHSIKKNLIGALLFDSGETAEATRLKRTARRRYTRRKNRICYLQEIFSNEMAKVDDSFFHRLEESFLVEEDKKHERHPIFGNIVDEVAYHEKYPTIYHLRKKLVDSTDKADLRLIYLALAHMIKFRGHFLIEGDLNPDNSDVDKLFIQLVQTYNQLFEENPINASGVDAKAILSARLSKSRRLENLIAQLPGEKKNGLFGNLIALSLGLTPNFKSNFDLAEDAKLQLSKDTYDDDLDNLLAQIGDQYADLFLAAKNLSDAILLSDILRVNTEITKAPLSASMIKRYDEHHQDLTLLKALVRQQLPEKYKEIFFDQSKNGYAGYIDGGASQEEFYKFIKPILEKMDGTEELLVKLNREDLLRKQRTFDNGSIPHQIHLGELHAILRRQEDFYPFLKDNREKIEKILTFRIPYYVGPLARGNSRFAWMTRKSEETITPWNFEEVVDKGASAQSFIERMTNFDKNLPNEKVLPKHSLLYEYFTVYNELTKVKYVTEGMRKPAFLSGEQKKAIVDLLFKTNRKVTVKQLKEDYFKKIECFDSVEISGVEDRFNASLGTYHDLLKIIKDKDFLDNEENEDILEDIVLTLTLFEDREMIEERLKTYAHLFDDKVMKQLKRRRYTGWGRLSRKLINGIRDKQSGKTILDFLKSDGFANRNFMQLIHDDSLTFKEDIQKAQVSGQGDSLHEHIANLAGSPAIKKGILQTVKVVDELVKVMGRHKPENIVIEMARENQTTQKGQKNSRERMKRIEEGIKELGSQILKEHPVENTQLQNEKLYLYYLQNGRDMYVDQELDINRLSDYDVDHIVPQSFLKDDSIDNKVLTRSDKARGKSDNVPSEEVVKKMKNYWRQLLNAKLITQRKFDNLTKAERGGLSELDKAGFIKRQLVETRQITKHVAQILDSRMNTKYDENDKLIREVKVITLKSKLVSDFRKDFQFYKVREINNYHHAHDAYLNAVVGTALIKKYPKLESEFVYGDYKVYDVRKMIAKSEQEIGKATAKYFFYSNIMNFFKTEITLANGEIRKRPLIETNGETGEIVWDKGRDFATVRKVLSMPQVNIVKKTEVQTGGFSKESILPKRNSDKLIARKKDWDPKKYGGFDSPTVAYSVLVVAKVEKGKSKKLKSVKELLGITIMERSSFEKNPIDFLEAKGYKEVKKDLIIKLPKYSLFELENGRKRMLASAGELQKGNELALPSKYVNFLYLASHYEKLKGSPEDNEQKQLFVEQHKHYLDEIIEQISEFSKRVILADANLDKVLSAYNKHRDKPIREQAENIIHLFTLTNLGAPAAFKYFDTTIDRKRYTSTKEVLDATLIHQSITGLYETRIDLSQLGGDGGGSSGGGGGSGGTLNIEDEYRLHETSKEPDVPLGSTWLSDFPQAWAETGGMGLAVRQAPLIIPLKATSTPVSIKQYPMSQEARLGIKPHIQRLLDQGILVPCQSPWNTPLLPVKKPGTNDYRPVQDLREVNKRVEDIHPTVPNPYNLLSGLPPSHQWYTVLDLKDAFFCLRLHPTSQPLFAFEWRDPEMGISGQLTWTRLPQGFKNSPTLFNEALHRDLADFRIQHPDLILLQYVDDLLLAATSEQDCQRGTRALLQTLGNLGYRASAKKAQICQKQVKYLGYLLKEGQRWLTEARKETVMGQPTPKTPRQLREFLGTAGFCRLWIPGFAEMAAPLYPLTKPGTLFNWGPDQQKAYQEIKQALLTAPALGLPDLTKPFELFVDEKQGYAKGVLTQKLGPWRRPVAYLSKKLDPVAAGWPPCLRMVAAIAVLTKDAGKLTMGQPLVILAPHAVEALVKQPPDRWLSNARMTHYQAMLLDTDRVQFGPVVALNPATLLPLPEKEAPHDCLEILAETHGTRPDLTDQPIPDADYTWYTDGSSFLQEGQRRAGAAVTTETEVIWARALPAGTSAQRAELIALTQALKMAEGKKLNVYTDSRYAFATAHVHGEIYRRRGWLTSEGREIKNKNEILALLKALFLPKRLSIIHCPGHQKGNSAEARGNRMADQAAREAAMKAVLETSTLLAGKRTADGSEFEKRTADGSEFESPKKKAKVE

SEQ ID NO: 6883 - protein, 2094 aa, synthetic construct; identical to SEQ ID NO: 4518

SEQ ID NO: 6884 - protein, 2098 aa, synthetic construct
MPAAKRVKLDGGDKKYSIGLDIGTNSVGWAVITDEYKVPSKKFKVLGNTDRHSIKKNLIGALLFDSGETAEATRLKRTARRRYTRRKNRICYLQEIFSNEMAKVDDSFFHRLEESFLVEEDKKHERHPIFGNIVDEVAYHEKYPTIYHLRKKLVDSTDKADLRLIYLALAHMIKFRGHFLIEGDLNPDNSDVDKLFIQLVQTYNQLFEENPINASGVDAKAILSARLSKSRRLENLIAQLPGEKKNGLFGNLIALSLGLTPNFKSNFDLAEDAKLQLSKDTYDDDLDNLLAQIGDQYADLFLAAKNLSDAILLSDILRVNTEITKAPLSASMIKRYDEHHQDLTLLKALVRQQLPEKYKEIFFDQSKNGYAGYIDGGASQEEFYKFIKPILEKMDGTEELLVKLNREDLLRKQRTFDNGSIPHQIHLGELHAILRRQEDFYPFLKDNREKIEKILTFRIPYYVGPLARGNSRFAWMTRKSEETITPWNFEEVVDKGASAQSFIERMTNFDKNLPNEKVLPKHSLLYEYFTVYNELTKVKYVTEGMRKPAFLSGEQKKAIVDLLFKTNRKVTVKQLKEDYFKKIECFDSVEISGVEDRFNASLGTYHDLLKIIKDKDFLDNEENEDILEDIVLTLTLFEDREMIEERLKTYAHLFDDKVMKQLKRRRYTGWGRLSRKLINGIRDKQSGKTILDFLKSDGFANRNFMQLIHDDSLTFKEDIQKAQVSGQGDSLHEHIANLAGSPAIKKGILQTVKVVDELVKVMGRHKPENIVIEMARENQTTQKGQKNSRERMKRIEEGIKELGSQILKEHPVENTQLQNEKLYLYYLQNGRDMYVDQELDINRLSDYDVDHIVPQSFLKDDSIDNKVLTRSDKARGKSDNVPSEEVVKKMKNYWRQLLNAKLITQRKFDNLTKAERGGLSELDKAGFIKRQLVETRQITKHVAQILDSRMNTKYDENDKLIREVKVITLKSKLVSDFRKDFQFYKVREINNYHHAHDAYLNAVVGTALIKKYPKLESEFVYGDYKVYDVRKMIAKSEQEIGKATAKYFFYSNIMNFFKTEITLANGEIRKRPLIETNGETGEIVWDKGRDFATVRKVLSMPQVNIVKKTEVQTGGFSKESILPKRNSDKLIARKKDWDPKKYGGFDSPTVAYSVLVVAKVEKGKSKKLKSVKELLGITIMERSSFEKNPIDFLEAKGYKEVKKDLIIKLPKYSLFELENGRKRMLASAGELQKGNELALPSKYVNFLYLASHYEKLKGSPEDNEQKQLFVEQHKHYLDEIIEQISEFSKRVILADANLDKVLSAYNKHRDKPIREQAENIIHLFTLTNLGAPAAFKYFDTTIDRKRYTSTKEVLDATLIHQSITGLYETRIDLSQLGGDGGGGSGGGEAAAKGGTAPLEEEYRLFLEAPIQNVTLLEQWKREIPKVWAEINPPGLASTQAPIHVQLLSTALPVRVRQYPITLEAKRSLRETIRKFRAAGILRPVHSPWNTPLLPVRKSGTSEYRMVQDLREVNKRVETIHPTVPNPYTLLSLLPPDRIWYSVLDLKDAFFCIPLAPESQLIFAFEWADAEEGESGQLTWTRLPQGFKNSPTLFDEALNRDLQGFRLDHPSVSLLQYVDDLLIAADTQAACLSATRDLLMTLAELGYRVSGKKAQLCQEEVTYLGFKIHKGSRSLSNSRTQAILQIPVPKTKRQVREFLGTIGYCRLWIPGFAELAQPLYAATRGGNDPLVWGEKEEEAFQSLKLALTQPPALALPSLDKPFQLFVEETSGAAKGVLTQALGPWKRPVAYLSKRLDPVAAGWPRCLRAIAAAALLTREASKLTFGQDIEITSSHNLESLLRSPPDKWLTNARITQYQVLLLDPPRVRFKQTAALNPATLLPETDDTLPIHHCLDTLDSLTSTRPDLTDQPLAQAEATLFTDGSSYIRDGKRYAGAAVVTLDSVIWAEPLPIGTSAQKAELIALTKALEWSKDKSVNIYTDSRYAFATLHVHGMIYRERGLLTAGGKAIKNAPEILALLTAVWLPKRVAVMHCKGHQKDDAPTSTGNRRADEVAREVAIRPLSTQATISAGKRTADGSEFEKRTADGSEFESPKKKAKVE

SEQ ID NO: 6885 - protein, 2098 aa, synthetic construct
MPAAKRVKLDGGDKKYSIGLDIGTNSVGWAVITDEYKVPSKKFKVLGNTDRHSIKKNLIGALLFDSGETAEATRLKRTARRRYTRRKNRICYLQEIFSNEMAKVDDSFFHRLEESFLVEEDKKHERHPIFGNIVDEVAYHEKYPTIYHLRKKLVDSTDKADLRLIYLALAHMIKFRGHFLIEGDLNPDNSDVDKLFIQLVQTYNQLFEENPINASGVDAKAILSARLSKSRRLENLIAQLPGEKKNGLFGNLIALSLGLTPNFKSNFDLAEDAKLQLSKDTYDDDLDNLLAQIGDQYADLFLAAKNLSDAILLSDILRVNTEITKAPLSASMIKRYDEHHQDLTLLKALVRQQLPEKYKEIFFDQSKNGYAGYIDGGASQEEFYKFIKPILEKMDGTEELLVKLNREDLLRKQRTFDNGSIPHQIHLGELHAILRRQEDFYPFLKDNREKIEKILTFRIPYYVGPLARGNSRFAWMTRKSEETITPWNFEEVVDKGASAQSFIERMTNFDKNLPNEKVLPKHSLLYEYFTVYNELTKVKYVTEGMRKPAFLSGEQKKAIVDLLFKTNRKVTVKQLKEDYFKKIECFDSVEISGVEDRFNASLGTYHDLLKIIKDKDFLDNEENEDILEDIVLTLTLFEDREMIEERLKTYAHLFDDKVMKQLKRRRYTGWGRLSRKLINGIRDKQSGKTILDFLKSDGFANRNFMQLIHDDSLTFKEDIQKAQVSGQGDSLHEHIANLAGSPAIKKGILQTVKVVDELVKVMGRHKPENIVIEMARENQTTQKGQKNSRERMKRIEEGIKELGSQILKEHPVENTQLQNEKLYLYYLQNGRDMYVDQELDINRLSDYDVDHIVPQSFLKDDSIDNKVLTRSDKARGKSDNVPSEEVVKKMKNYWRQLLNAKLITQRKFDNLTKAERGGLSELDKAGFIKRQLVETRQITKHVAQILDSRMNTKYDENDKLIREVKVITLKSKLVSDFRKDFQFYKVREINNYHHAHDAYLNAVVGTALIKKYPKLESEFVYGDYKVYDVRKMIAKSEQEIGKATAKYFFYSNIMNFFKTEITLANGEIRKRPLIETNGETGEIVWDKGRDFATVRKVLSMPQVNIVKKTEVQTGGFSKESILPKRNSDKLIARKKDWDPKKYGGFDSPTVAYSVLVVAKVEKGKSKKLKSVKELLGITIMERSSFEKNPIDFLEAKGYKEVKKDLIIKLPKYSLFELENGRKRMLASAGELQKGNELALPSKYVNFLYLASHYEKLKGSPEDNEQKQLFVEQHKHYLDEIIEQISEFSKRVILADANLDKVLSAYNKHRDKPIREQAENIIHLFTLTNLGAPAAFKYFDTTIDRKRYTSTKEVLDATLIHQSITGLYETRIDLSQLGGDGGGGSGGGEAAAKGGTAPLEEEYRLFLEAPIQNVTLLEQWKREIPKVWAEINPPGLASTQAPIHVQLLSTALPVRVRQYPITLEAKRSLRETIRKFRAAGILRPVHSPWNTPLLPVRKSGTSEYRMVQDLREVNKRVETIHPTVPNPYTLLSLLPPDRIWYSVLDLKDAFFCIPLAPESQLIFAFEWADAEEGESGQLTWTRLPQGFKNSPTLFNEALNRDLQGFRLDHPSVSLLQYVDDLLIAADTQAACLSATRDLLMTLAELGYRVSGKKAQLCQEEVTYLGFKIHKGSRSLSNSRTQAILQIPVPKTKRQVREFLGTIGYCRLWIPGFAELAQPLYAATRPGNDPLVWGEKEEEAFQSLKLALTQPPALALPSLDKPFQLFVEETSGAAKGVLTQALGPWKRPVAYLSKRLDPVAAGWPRCLRAIAAAALLTREASKLTFGQDIEITSSHNLESLLRSPPDKWLTNARITQYQVLLLDPPRVRFKQTAALNPATLLPETDDTLPIHHCLDTLDSLTSTRPDLTDQPLAQAEATLFTDGSSYIRDGKRYAGAAVVTLDSVIWAEPLPIGTSAQKAELIALTKALEWSKDKSVNIYTDSRYAFATLHVHGMIYRERGWLTAGGKAIKNAPEILALLTAVWLPKRVAVMHCKGHQKDDAPTSTGNRRADEVAREVAIRPLSTQATISAGKRTADGSEFEKRTADGSEFESPKKKAKVE

SEQ ID NO: 6886 - protein, 2102 aa, synthetic construct
MPAAKRVKLDGGDKKYSIGLDIGTNSVGWAVITDEYKVPSKKFKVLGNTDRHSIKKNLIGALLFDSGETAEATRLKRTARRRYTRRKNRICYLQEIFSNEMAKVDDSFFHRLEESFLVEEDKKHERHPIFGNIVDEVAYHEKYPTIYHLRKKLVDSTDKADLRLIYLALAHMIKFRGHFLIEGDLNPDNSDVDKLFIQLVQTYNQLFEENPINASGVDAKAILSARLSKSRRLENLIAQLPGEKKNGLFGNLIALSLGLTPNFKSNFDLAEDAKLQLSKDTYDDDLDNLLAQIGDQYADLFLAAKNLSDAILLSDILRVNTEITKAPLSASMIKRYDEHHQDLTLLKALVRQQLPEKYKEIFFDQSKNGYAGYIDGGASQEEFYKFIKPILEKMDGTEELLVKLNREDLLRKQRTFDNGSIPHQIHLGELHAILRRQEDFYPFLKDNREKIEKILTFRIPYYVGPLARGNSRFAWMTRKSEETITPWNFEEVVDKGASAQSFIERMTNFDKNLPNEKVLPKHSLLYEYFTVYNELTKVKYVTEGMRKPAFLSGEQKKAIVDLLFKTNRKVTVKQLKEDYFKKIECFDSVEISGVEDRFNASLGTYHDLLKIIKDKDFLDNEENEDILEDIVLTLTLFEDREMIEERLKTYAHLFDDKVMKQLKRRRYTGWGRLSRKLINGIRDKQSGKTILDFLKSDGFANRNFMQLIHDDSLTFKEDIQKAQVSGQGDSLHEHIANLAGSPAIKKGILQTVKVVDELVKVMGRHKPENIVIEMARENQTTQKGQKNSRERMKRIEEGIKELGSQILKEHPVENTQLQNEKLYLYYLQNGRDMYVDQELDINRLSDYDVDHIVPQSFLKDDSIDNKVLTRSDKARGKSDNVPSEEVVKKMKNYWRQLLNAKLITQRKFDNLTKAERGGLSELDKAGFIKRQLVETRQITKHVAQILDSRMNTKYDENDKLIREVKVITLKSKLVSDFRKDFQFYKVREINNYHHAHDAYLNAVVGTALIKKYPKLESEFVYGDYKVYDVRKMIAKSEQEIGKATAKYFFYSNIMNFFKTEITLANGEIRKRPLIETNGETGEIVWDKGRDFATVRKVLSMPQVNIVKKTEVQTGGFSKESILPKRNSDKLIARKKDWDPKKYGGFDSPTVAYSVLVVAKVEKGKSKKLKSVKELLGITIMERSSFEKNPIDFLEAKGYKEVKKDLIIKLPKYSLFELENGRKRMLASAGELQKGNELALPSKYVNFLYLASHYEKLKGSPEDNEQKQLFVEQHKHYLDEIIEQISEFSKRVILADANLDKVLSAYNKHRDKPIREQAENIIHLFTLTNLGAPAAFKYFDTTIDRKRYTSTKEVLDATLIHQSITGLYETRIDLSQLGGDGGGGSGGGEAAAKGGTVSLQDEHRLFDIPVTTSLPDVWLQDFPQAWAETGGLGRAKCQAPIIIDLKPTAVPVSIKQYPMSLEAHMGIRQHIIKFLELGVLRPCRSPWNTPLLPVKKPGTQDYRPVQDLREINKRTVDIHPTVPNPYNLLSTLKPDYSWYTVLDLKDAFFCLPLAPQSQELFAFEWKDPERGISGQLTWTRLPQGFKNSPTLFNEALHRDLTDFRTQHPEVTLLQYVDDLLLAAPTKKACTQGTRHLLQELGEKGYRASAKKAQICQTKVTYLGYILSEGKRWLTPGRIETVARIPPPRNPREVREFLGTAGFCRLWIPGFAELAAPLYALTKPSTPFTWQTEHQLAFEALKKALLSAPALGLPDTSKPFTLFLDERQGIAKGVLTQKLGPWKRPVAYLSKKLDPVAAGWPPCLRIMAATAMLVKDSAKLTLGQPLTVITPHTLEAIVRQPPDRWITNARLTHYQALLLDTDRVQFGPPVTLNPATLLPVPENQPSPHDCRQVLAETHGTREDLKDQELPDADHTWYTDGSSYLDSGTRRAGAAVVDGHNTIWAQSLPPGTSAQKAELIALTKALELSKGKKANIYTDSRYAFATAHTHGSIYERRGWLTSEGKEIKNKAEIIALLKALFLPQEVAIIHCPGHQKGQDPVAVGNRQADRVARQAAMAEVLTLATEPDNTSHITAGKRTADGSEFEKRTADGSEFESPKKKAKVE

SEQ ID NO: 6887 - protein, 2173 aa, synthetic construct
MPAAKRVKLDGGDKKYSIGLDIGTNSVGWAVITDEYKVPSKKFKVLGNTDRHSIKKNLIGALLFDSGETAEATRLKRTARRRYTRRKNRICYLQEIFSNEMAKVDDSFFHRLEESFLVEEDKKHERHPIFGNIVDEVAYHEKYPTIYHLRKKLVDSTDKADLRLIYLALAHMIKFRGHFLIEGDLNPDNSDVDKLFIQLVQTYNQLFEENPINASGVDAKAILSARLSKSRRLENLIAQLPGEKKNGLFGNLIALSLGLTPNFKSNFDLAEDAKLQLSKDTYDDDLDNLLAQIGDQYADLFLAAKNLSDAILLSDILRVNTEITKAPLSASMIKRYDEHHQDLTLLKALVRQQLPEKYKEIFFDQSKNGYAGYIDGGASQEEFYKFIKPILEKMDGTEELLVKLNREDLLRKQRTFDNGSIPHQIHLGELHAILRRQEDFYPFLKDNREKIEKILTFRIPYYVGPLARGNSRFAWMTRKSEETITPWNFEEVVDKGASAQSFIERMTNFDKNLPNEKVLPKHSLLYEYFTVYNELTKVKYVTEGMRKPAFLSGEQKKAIVDLLFKTNRKVTVKQLKEDYFKKIECFDSVEISGVEDRFNASLGTYHDLLKIIKDKDFLDNEENEDILEDIVLTLTLFEDREMIEERLKTYAHLFDDKVMKQLKRRRYTGWGRLSRKLINGIRDKQSGKTILDFLKSDGFANRNFMQLIHDDSLTFKEDIQKAQVSGQGDSLHEHIANLAGSPAIKKGILQTVKVVDELVKVMGRHKPENIVIEMARENQTTQKGQKNSRERMKRIEEGIKELGSQILKEHPVENTQLQNEKLYLYYLQNGRDMYVDQELDINRLSDYDVDHIVPQSFLKDDSIDNKVLTRSDKARGKSDNVPSEEVVKKMKNYWRQLLNAKLITQRKFDNLTKAERGGLSELDKAGFIKRQLVETRQITKHVAQILDSRMNTKYDENDKLIREVKVITLKSKLVSDFRKDFQFYKVREINNYHHAHDAYLNAVVGTALIKKYPKLESEFVYGDYKVYDVRKMIAKSEQEIGKATAKYFFYSNIMNFFKTEITLANGEIRKRPLIETNGETGEIVWDKGRDFATVRKVLSMPQVNIVKKTEVQTGGFSKESILPKRNSDKLIARKKDWDPKKYGGFDSPTVAYSVLVVAKVEKGKSKKLKSVKELLGITIMERSSFEKNPIDFLEAKGYKEVKKDLIIKLPKYSLFELENGRKRMLASAGELQKGNELALPSKYVNFLYLASHYEKLKGSPEDNEQKQLFVEQHKHYLDEIIEQISEFSKRVILADANLDKVLSAYNKHRDKPIREQAENIIHLFTLTNLGAPAAFKYFDTTIDRKRYTSTKEVLDATLIHQSITGLYETRIDLSQLGGDGGGGSGGGEAAAKGGMDLLKPLTVERKGVKIKGYWNSQADITCVPKDLLQGEEPVRQQNVTTIHGTQEGDVYYVNLKIDGRRINTEVIGTTLDYAIITPGDVPWILKKPLELTIKLDLEEQQGTLLNNSILSKKGKEELKQLFEKYSALWQSWENQVGHRRIRPHKIATGTVKPTPQKQYHINPKAKPDIQIVINDLLKQGVLIQKESTMNTPVYPVPKPNGRWRMVLDYRAVNKVTPLIAVQNQHSYGILGSLFKGRYKTTIDLSNGFWAHPIVPEDYWITAFTWQGKQYCWTVLPQGFLNSPGLFTGDVVDLLQGIPNVEVYVDDVYISHDSEKEHLEYLDILFNRLKEAGYIISLKKSNIANSIVDFLGFQITNEGRGLTDTFKEKLENITAPTTLKQLQSILGLLNFARNFIPDFTELIAPLYALIPKSTKNYVPWQIEHSTTLETLITKLNGAEYLQGRKGDKTLIMKVNASYTTGYIRYYNEGEKKPISYVSIVFSKTELKFTELEKLLTTVHKGLLKALDLSMGQNIHVYSPIVSMQNIQKTPQTAKKALASRWLSWLSYLEDPRIRFFYDPQMPALKDLPAVDTGKDNKKHPSNFQHIFYTDGSAITSPTKEGHLNAGMGIVYFINKDGNLQKQQEWSISLGNHTAQFAEIAAFEFALKKCLPLGGNILVVTDSNYVAKAYNEELDVWASNGFVNNRKKPLKHISKWKSVADLKRLRPDVVVTHEPGHQKLDSSPHAYGNNLADQLATQASFKVHAGKRTADGSEFEKRTADGSEFESPKKKAKVE

SEQ ID NO: 6888 - protein, 2173 aa, synthetic construct
MPAAKRVKLDGGDKKYSIGLDIGTNSVGWAVITDEYKVPSKKFKVLGNTDRHSIKKNLIGALLFDSGETAEATRLKRTARRRYTRRKNRICYLQEIFSNEMAKVDDSFFHRLEESFLVEEDKKHERHPIFGNIVDEVAYHEKYPTIYHLRKKLVDSTDKADLRLIYLALAHMIKFRGHFLIEGDLNPDNSDVDKLFIQLVQTYNQLFEENPINASGVDAKAILSARLSKSRRLENLIAQLPGEKKNGLFGNLIALSLGLTPNFKSNFDLAEDAKLQLSKDTYDDDLDNLLAQIGDQYADLFLAAKNLSDAILLSDILRVNTEITKAPLSASMIKRYDEHHQDLTLLKALVRQQLPEKYKEIFFDQSKNGYAGYIDGGASQEEFYKFIKPILEKMDGTEELLVKLNREDLLRKQRTFDNGSIPHQIHLGELHAILRRQEDFYPFLKDNREKIEKILTFRIPYYVGPLARGNSRFAWMTRKSEETITPWNFEEVVDKGASAQSFIERMTNFDKNLPNEKVLPKHSLLYEYFTVYNELTKVKYVTEGMRKPAFLSGEQKKAIVDLLFKTNRKVTVKQLKEDYFKKIECFDSVEISGVEDRFNASLGTYHDLLKIIKDKDFLDNEENEDILEDIVLTLTLFEDREMIEERLKTYAHLFDDKVMKQLKRRRYTGWGRLSRKLINGIRDKQSGKTILDFLKSDGFANRNFMQLIHDDSLTFKEDIQKAQVSGQGDSLHEHIANLAGSPAIKKGILQTVKVVDELVKVMGRHKPENIVIEMARENQTTQKGQKNSRERMKRIEEGIKELGSQILKEHPVENTQLQNEKLYLYYLQNGRDMYVDQELDINRLSDYDVDHIVPQSFLKDDSIDNKVLTRSDKARGKSDNVPSEEVVKKMKNYWRQLLNAKLITQRKFDNLTKAERGGLSELDKAGFIKRQLVETRQITKHVAQILDSRMNTKYDENDKLIREVKVITLKSKLVSDFRKDFQFYKVREINNYHHAHDAYLNAVVGTALIKKYPKLESEFVYGDYKVYDVRKMIAKSEQEIGKATAKYFFYSNIMNFFKTEITLANGEIRKRPLIETNGETGEIVWDKGRDFATVRKVLSMPQVNIVKKTEVQTGGFSKESILPKRNSDKLIARKKDWDPKKYGGFDSPTVAYSVLVVAKVEKGKSKKLKSVKELLGITIMERSSFEKNPIDFLEAKGYKEVKKDLIIKLPKYSLFELENGRKRMLASAGELQKGNELALPSKYVNFLYLASHYEKLKGSPEDNEQKQLFVEQHKHYLDEIIEQISEFSKRVILADANLDKVLSAYNKHRDKPIREQAENIIHLFTLTNLGAPAAFKYFDTTIDRKRYTSTKEVLDATLIHQSITGLYETRIDLSQLGGDGGGGSGGGEAAAKGGMDLLKPLTVERKGVKIKGYWNSQADITCVPKDLLQGEEPVRQQNVTTIHGTQEGDVYYVNLKIDGRRINTEVIGTTLDYAIITPGDVPWILKKPLELTIKLDLEEQQGTLLNNSILSKKGKEELKQLFEKYSALWQSWENQVGHRRIRPHKIATGTVKPTPQKQYHINPKAKPDIQIVINDLLKQGVLIQKESTMNTPVYPVPKPNGRWRMVLDYRAVNKVTPLIAVQNQHSYGILGSLFKGRYKTTIDLSNGFWAHPIVPEDYWITAFTWQGKQYCWTVLPQGFLNSPGLFNGDVVDLLQGIPNVEVYVDDVYISHDSEKEHLEYLDILFNRLKEAGYIISLKKSNIANSIVDFLGFQITNEGRGLTDTFKEKLENITAPTTLKQLQSILGLLNFARNFIPDFTELIAPLYALIPKSPKNYVPWQIEHSTTLETLITKLNGAEYLQGRKGDKTLIMKVNASYTTGYIRYYNEGEKKPISYVSIVFSKTELKFTELEKLLTTVHKGLLKALDLSMGQNIHVYSPIVSMQNIQKTPQTAKKALASRWLSWLSYLEDPRIRFFYDPQMPALKDLPAVDTGKDNKKHPSNFQHIFYTDGSAITSPTKEGHLNAGMGIVYFINKDGNLQKQQEWSISLGNHTAQFAEIAAFEFALKKCLPLGGNILVVTDSNYVAKAYNEELDVWASNGFVNNRKKPLKHISKWKSVADLKRLRPDVVVTHEPGHQKLDSSPHAYGNNLADQLATQASFKVHAGKRTADGSEFEKRTADGSEFESPKKKAKVE

SEQ ID NO: 6889 - protein, 2095 aa, synthetic construct
MPAAKRVKLDGGDKKYSIGLDIGTNSVGWAVITDEYKVPSKKFKVLGNTDRHSIKKNLIGALLFDSGETAEATRLKRTARRRYTRRKNRICYLQEIFSNEMAKVDDSFFHRLEESFLVEEDKKHERHPIFGNIVDEVAYHEKYPTIYHLRKKLVDSTDKADLRLIYLALAHMIKFRGHFLIEGDLNPDNSDVDKLFIQLVQTYNQLFEENPINASGVDAKAILSARLSKSRRLENLIAQLPGEKKNGLFGNLIALSLGLTPNFKSNFDLAEDAKLQLSKDTYDDDLDNLLAQIGDQYADLFLAAKNLSDAILLSDILRVNTEITKAPLSASMIKRYDEHHQDLTLLKALVRQQLPEKYKEIFFDQSKNGYAGYIDGGASQEEFYKFIKPILEKMDGTEELLVKLNREDLLRKQRTFDNGSIPHQIHLGELHAILRRQEDFYPFLKDNREKIEKILTFRIPYYVGPLARGNSRFAWMTRKSEETITPWNFEEVVDKGASAQSFIERMTNFDKNLPNEKVLPKHSLLYEYFTVYNELTKVKYVTEGMRKPAFLSGEQKKAIVDLLFKTNRKVTVKQLKEDYFKKIECFDSVEISGVEDRFNASLGTYHDLLKIIKDKDFLDNEENEDILEDIVLTLTLFEDREMIEERLKTYAHLFDDKVMKQLKRRRYTGWGRLSRKLINGIRDKQSGKTILDFLKSDGFANRNFMQLIHDDSLTFKEDIQKAQVSGQGDSLHEHIANLAGSPAIKKGILQTVKVVDELVKVMGRHKPENIVIEMARENQTTQKGQKNSRERMKRIEEGIKELGSQILKEHPVENTQLQNEKLYLYYLQNGRDMYVDQELDINRLSDYDVDHIVPQSFLKDDSIDNKVLTRSDKARGKSDNVPSEEVVKKMKNYWRQLLNAKLITQRKFDNLTKAERGGLSELDKAGFIKRQLVETRQITKHVAQILDSRMNTKYDENDKLIREVKVITLKSKLVSDFRKDFQFYKVREINNYHHAHDAYLNAVVGTALIKKYPKLESEFVYGDYKVYDVRKMIAKSEQEIGKATAKYFFYSNIMNFFKTEITLANGEIRKRPLIETNGETGEIVWDKGRDFATVRKVLSMPQVNIVKKTEVQTGGFSKESILPKRNSDKLIARKKDWDPKKYGGFDSPTVAYSVLVVAKVEKGKSKKLKSVKELLGITIMERSSFEKNPIDFLEAKGYKEVKKDLIIKLPKYSLFELENGRKRMLASAGELQKGNELALPSKYVNFLYLASHYEKLKGSPEDNEQKQLFVEQHKHYLDEIIEQISEFSKRVILADANLDKVLSAYNKHRDKPIREQAENIIHLFTLTNLGAPAAFKYFDTTIDRKRYTSTKEVLDATLIHQSITGLYETRIDLSQLGGDGGGGSGGGEAAAKGGTLQLEEEYRLFEPESTQKQEMDIWLKNFPQAWAETGGMGTAHCQAPVLIQLKATATPISIRQYPMPHEAYQGIKPHIRRMLDQGILKPCQSPWNTPLLPVKKPGTEDYRPVQDLREVNKRVEDIHPTVPNPYNLLSTLPPSHPWYTVLDLKDAFFCLRLHSESQLLFAFEWRDPEIGLSGQLTWTRLPQGFKNSPTLFNEALHSDLADFRVRYPALVLLQYVDDLLLAAATRTECLEGTKALLETLGNKGYRASAKKAQICLQEVTYLGYSLKDGQRWLTKARKEAILSIPVPKNSRQVREFLGTAGYCRLWIPGFAELAAPLYPLTRPGTLFQWGTEQQLAFEDIKKALLSSPALGLPDITKPFELFIDENSGFAKGVLVQKLGPWKRPVAYLSKKLDTVASGWPPCLRMVAAIAILVKDAGKLTLGQPLTILTSHPVEALVRQPPNKWLSNARMTHYQAMLLDAERVHFGPTVSLNPATLLPLPSGGNHHDCLQILAETHGTRPDLTDQPLPDADLTWYTDGSSFIRNGEREAGAAVTTESEVIWAAPLPPGTSAQRAELIALTQALKMAEGKKLTVYTDSRYAFATTHVHGEIYRRRGWLTSEGKEIKNKNEILALLEALFLPKRLSIIHCPGHQKGDSPQAKGNRLADDTAKKAATETHSSLTVLPAGKRTADGSEFEKRTADGSEFESPKKKAKVE

SEQ ID NO: 6890 - protein, 2127 aa, synthetic construct
MPAAKRVKLDGGDKKYSIGLDIGTNSVGWAVITDEYKVPSKKFKVLGNTDRHSIKKNLIGALLFDSGETAEATRLKRTARRRYTRRKNRICYLQEIFSNEMAKVDDSFFHRLEESFLVEEDKKHERHPIFGNIVDEVAYHEKYPTIYHLRKKLVDSTDKADLRLIYLALAHMIKFRGHFLIEGDLNPDNSDVDKLFIQLVQTYNQLFEENPINASGVDAKAILSARLSKSRRLENLIAQLPGEKKNGLFGNLIALSLGLTPNFKSNFDLAEDAKLQLSKDTYDDDLDNLLAQIGDQYADLFLAAKNLSDAILLSDILRVNTEITKAPLSASMIKRYDEHHQDLTLLKALVRQQLPEKYKEIFFDQSKNGYAGYIDGGASQEEFYKFIKPILEKMDGTEELLVKLNREDLLRKQRTFDNGSIPHQIHLGELHAILRRQEDFYPFLKDNREKIEKILTFRIPYYVGPLARGNSRFAWMTRKSEETITPWNFEEVVDKGASAQSFIERMTNFDKNLPNEKVLPKHSLLYEYFTVYNELTKVKYVTEGMRKPAFLSGEQKKAIVDLLFKTNRKVTVKQLKEDYFKKIECFDSVEISGVEDRFNASLGTYHDLLKIIKDKDFLDNEENEDILEDIVLTLTLFEDREMIEERLKTYAHLFDDKVMKQLKRRRYTGWGRLSRKLINGIRDKQSGKTILDFLKSDGFANRNFMQLIHDDSLTFKEDIQKAQVSGQGDSLHEHIANLAGSPAIKKGILQTVKVVDELVKVMGRHKPENIVIEMARENQTTQKGQKNSRERMKRIEEGIKELGSQILKEHPVENTQLQNEKLYLYYLQNGRDMYVDQELDINRLSDYDVDHIVPQSFLKDDSIDNKVLTRSDKARGKSDNVPSEEVVKKMKNYWRQLLNAKLITQRKFDNLTKAERGGLSELDKAGFIKRQLVETRQITKHVAQILDSRMNTKYDENDKLIREVKVITLKSKLVSDFRKDFQFYKVREINNYHHAHDAYLNAVVGTALIKKYPKLESEFVYGDYKVYDVRKMIAKSEQEIGKATAKYFFYSNIMNFFKTEITLANGEIRKRPLIETNGETGEIVWDKGRDFATVRKVLSMPQVNIVKKTEVQTGGFSKESILPKRNSDKLIARKKDWDPKKYGGFDSPTVAYSVLVVAKVEKGKSKKLKSVKELLGITIMERSSFEKNPIDFLEAKGYKEVKKDLIIKLPKYSLFELENGRKRMLASAGELQKGNELALPSKYVNFLYLASHYEKLKGSPEDNEQKQLFVEQHKHYLDEIIEQISEFSKRVILADANLDKVLSAYNKHRDKPIREQAENIIHLFTLTNLGAPAAFKYFDTTIDRKRYTSTKEVLDATLIHQSITGLYETRIDLSQLGGDGGGGSGGGEAAAKGGLLGRDLLTKLKAQIQFSTEGPQVTWEDRPAMCLVLNLEEEYRLHEKPVPPSIDPSWLQLFPMVWAEKAGMGLANQVPPVVVELKSDASPVAVRQYPMSKEAREGIRPHIQRFLDLGILVPCQSPWNTPLLPVKKPGTNDYRPVQDLREVNKRVQDIHPTVPNPYNLLSSLPPSHTWYSVLDLKDAFFCLKLHPNSQPLFAFEWRDPEKGNTGQLTWTRLPQGFKNSPTLFDEALHRDLASFRALNPQVVMLQYVDDLLVAAPTYRDCKEGTRRLLQELSKLGYRVSAKKAQLCREEVTYLGYLLKGGKRWLTPARKATVMKIPTPTTPRQVREFLGTAGFCRLWIPGFASLAAPLYPLTREKVPFTWTEAHQEAFGRIKEALLSAPALALPDLTKPFALYVDEKEGVARGVLTQTLGPWRRPVAYLSKKLDPVASGWPTCLKAIAAVALLLKDADKLTLGQNVLVIAPHNLESIVRQPPDRWMTNARMTHYQSLLLNERVSFAPPAILNPATLLPVESDDTPIHICSEILAEETGTRPDLRDQPLPGVPAWYTDGSSFIMDGRRQAGAAIVDNKRTVWASNLPEGTSAQKAELIALTQALRLAEGKSINIYTDSRYAFATAHVHGAIYKQRGLLTSAGKDIKNKEEILALLEAIHLPKRVAIIHCPGHQRGTDPVATGNRKADEAAKQAAQSTRILTETTKNAGKRTADGSEFEKRTADGSEFESPKKKAKVE

SEQ ID NO: 6891 - protein, 2218 aa, synthetic construct
MPAAKRVKLDGGDKKYSIGLDIGTNSVGWAVITDEYKVPSKKFKVLGNTDRHSIKKNLIGALLFDSGETAEATRLKRTARRRYTRRKNRICYLQEIFSNEMAKVDDSFFHRLEESFLVEEDKKHERHPIFGNIVDEVAYHEKYPTIYHLRKKLVDSTDKADLRLIYLALAHMIKFRGHFLIEGDLNPDNSDVDKLFIQLVQTYNQLFEENPINASGVDAKAILSARLSKSRRLENLIAQLPGEKKNGLFGNLIALSLGLTPNFKSNFDLAEDAKLQLSKDTYDDDLDNLLAQIGDQYADLFLAAKNLSDAILLSDILRVNTEITKAPLSASMIKRYDEHHQDLTLLKALVRQQLPEKYKEIFFDQSKNGYAGYIDGGASQEEFYKFIKPILEKMDGTEELLVKLNREDLLRKQRTFDNGSIPHQIHLGELHAILRRQEDFYPFLKDNREKIEKILTFRIPYYVGPLARGNSRFAWMTRKSEETITPWNFEEVVDKGASAQSFIERMTNFDKNLPNEKVLPKHSLLYEYFTVYNELTKVKYVTEGMRKPAFLSGEQKKAIVDLLFKTNRKVTVKQLKEDYFKKIECFDSVEISGVEDRFNASLGTYHDLLKIIKDKDFLDNEENEDILEDIVLTLTLFEDREMIEERLKTYAHLFDDKVMKQLKRRRYTGWGRLSRKLINGIRDKQSGKTILDFLKSDGFANRNFMQLIHDDSLTFKEDIQKAQVSGQGDSLHEHIANLAGSPAIKKGILQTVKVVDELVKVMGRHKPENIVIEMARENQTTQKGQKNSRERMKRIEEGIKELGSQILKEHPVENTQLQNEKLYLYYLQNGRDMYVDQELDINRLSDYDVDHIVPQSFLKDDSIDNKVLTRSDKARGKSDNVPSEEVVKKMKNYWRQLLNAKLITQRKFDNLTKAERGGLSELDKAGFIKRQLVETRQITKHVAQILDSRMNTKYDENDKLIREVKVITLKSKLVSDFRKDFQFYKVREINNYHHAHDAYLNAVVGTALIKKYPKLESEFVYGDYKVYDVRKMIAKSEQEIGKATAKYFFYSNIMNFFKTEITLANGEIRKRPLIETNGETGEIVWDKGRDFATVRKVLSMPQVNIVKKTEVQTGGFSKESILPKRNSDKLIARKKDWDPKKYGGFDSPTVAYSVLVVAKVEKGKSKKLKSVKELLGITIMERSSFEKNPIDFLEAKGYKEVKKDLIIKLPKYSLFELENGRKRMLASAGELQKGNELALPSKYVNFLYLASHYEKLKGSPEDNEQKQLFVEQHKHYLDEIIEQISEFSKRVILADANLDKVLSAYNKHRDKPIREQAENIIHLFTLTNLGAPAAFKYFDTTIDRKRYTSTKEVLDATLIHQSITGLYETRIDLSQLGGDGGGGSGGGEAAAKGGTLGDQGSRGSDPLPEPRVTLTVEGIPTEFLVNTGAEHSVLTKPMGKMGSKRTVVAGATGSKVYPWTTKRLLKIGQKQVTHSFLVIPECPAPLLGRDLLTKLKAQIQFSTEGPQVTWEDRPAMCLVLNLEEEYRLHEKPVPPSIDPSWLQLFPMVWAEKAGMGLANQVPPVVVELKSDASPVAVRQYPMSKEAREGIRPHIQRFLDLGILVPCQSPWNTPLLPVKKPGTNDYRPVQDLREVNKRVQDIHPTVPNPYNLLSSLPPSHTWYSVLDLKDAFFCLKLHPNSQPLFAFEWRDPEKGNTGQLTWTRLPQGFKNSPTLFNEALHRDLASFRALNPQVVMLQYVDDLLVAAPTYRDCKEGTRRLLQELSKLGYRVSAKKAQLCREEVTYLGYLLKGGKRWLTPARKATVMKIPTPTTPRQVREFLGKAGFCRLFIPGFASLAAPLYPLTRPKVPFTWTEAHQEAFGRIKEALLSAPALALPDLTKPFALYVDEKEGVARGVLTQTLGPWRRPVAYLSKKLDPVASGWPTCLKAIAAVALLLKDADKLTLGQNVLVIAPHNLESIVRQPPDRWMTNARMTHYQSLLLNERVSFAPPAILNPATLLPVESDDTPIHICSEILAEETGTRPDLRDQPLPGVPAWYTDGSSFIMDGRRQAGAAIVDNKRTVWASNLPEGTSAQKAELIALTQALRLAEGKSINIYTDSRYAFATAHVHGAIYKQRGWLTSAGKDIKNKEEILALLEAIHLPKRVAIIHCPGHQRGTDPVATGNRKADEAAKQAAQSTRILTETTKNAGKRTADGSEFEKRTADGSEFESPKKKAKVE

SEQ ID NO: 6892 - protein, 2096 aa, synthetic construct
MPAAKRVKLDGGDKKYSIGLDIGTNSVGWAVITDEYKVPSKKFKVLGNTDRHSIKKNLIGALLFDSGETAEATRLKRTARRRYTRRKNRICYLQEIFSNEMAKVDDSFFHRLEESFLVEEDKKHERHPIFGNIVDEVAYHEKYPTIYHLRKKLVDSTDKADLRLIYLALAHMIKFRGHFLIEGDLNPDNSDVDKLFIQLVQTYNQLFEENPINASGVDAKAILSARLSKSRRLENLIAQLPGEKKNGLFGNLIALSLGLTPNFKSNFDLAEDAKLQLSKDTYDDDLDNLLAQIGDQYADLFLAAKNLSDAILLSDILRVNTEITKAPLSASMIKRYDEHHQDLTLLKALVRQQLPEKYKEIFFDQSKNGYAGYIDGGASQEEFYKFIKPILEKMDGTEELLVKLNREDLLRKQRTFDNGSIPHQIHLGELHAILRRQEDFYPFLKDNREKIEKILTFRIPYYVGPLARGNSRFAWMTRKSEETITPWNFEEVVDKGASAQSFIERMTNFDKNLPNEKVLPKHSLLYEYFTVYNELTKVKYVTEGMRKPAFLSGEQKKAIVDLLFKTNRKVTVKQLKEDYFKKIECFDSVEISGVEDRFNASLGTYHDLLKIIKDKDFLDNEENEDILEDIVLTLTLFEDREMIEERLKTYAHLFDDKVMKQLKRRRYTGWGRLSRKLINGIRDKQSGKTILDFLKSDGFANRNFMQLIHDDSLTFKEDIQKAQVSGQGDSLHEHIANLAGSPAIKKGILQTVKVVDELVKVMGRHKPENIVIEMARENQTTQKGQKNSRERMKRIEEGIKELGSQILKEHPVENTQLQNEKLYLYYLQNGRDMYVDQELDINRLSDYDVDHIVPQSFLKDDSIDNKVLTRSDKARGKSDNVPSEEVVKKMKNYWRQLLNAKLITQRKFDNLTKAERGGLSELDKAGFIKRQLVETRQITKHVAQILDSRMNTKYDENDKLIREVKVITLKSKLVSDFRKDFQFYKVREINNYHHAHDAYLNAVVGTALIKKYPKLESEFVYGDYKVYDVRKMIAKSEQEIGKATAKYFFYSNIMNFFKTEITLANGEIRKRPLIETNGETGEIVWDKGRDFATVRKVLSMPQVNIVKKTEVQTGGFSKESILPKRNSDKLIARKKDWDPKKYGGFDSPTVAYSVLVVAKVEKGKSKKLKSVKELLGITIMERSSFEKNPIDFLEAKGYKEVKKDLIIKLPKYSLFELENGRKRMLASAGELQKGNELALPSKYVNFLYLASHYEKLKGSPEDNEQKQLFVEQHKHYLDEIIEQISEFSKRVILADANLDKVLSAYNKHRDKPIREQAENIIHLFTLTNLGAPAAFKYFDTTIDRKRYTSTKEVLDATLIHQSITGLYETRIDLSQLGGDGGGGSGGGEAAAKGGTLNLEDEYRLYETSAEPEVSPGSTWLSDFPQAWAETGGMGLAVRQAPLIIPLKATSTPVSIKQYPMSQEAKLGIKPHIQRLLDQGILVPCQSPWNTPLLPVKKPGTNDYRPVQDLREVNKRVEDIHPTVPNPYNLLSGLPPSHRWYTVLDLKDAFFCLRLHPTSQPLFAFEWRDPGMGISGQLTWTRLPQGFKNSPTLFNEALHRDLADFRIQHPDLILLQYVDDILLAATSELDCQQGTRALLLTLGNLGYRASAKKAQLCQKQVKYLGYLLKEGQRWLTEARKETVMGQPTPKTPRQLREFLGKAGFCRLFIPGFAEMAAPLYPLTKPGTLFNWGPDQQKAYQEIKQALLTAPALGLPDLTKPFELFVDEKQGYAKGVLTQKLGPWRRPVAYLSKKLDPVAAGWPPCLRMVAAIAVLRKDAGKLTMGQPLVILAPHAVEALVKQPPDRWLSNARMTHYQAMLLDTDRVQFGPVVALNPATLLPLPEEGAPHDCLEILAETHGTRPDLTDQPIPDADHTWYTDGSSFLQEGQRKAGAAVTTETEVIWARALPAGTSAQRAELIALTQALKMAEGKRLNVYTDSRYAFATAHIHGEIYRRRGWLTSEGREIKNKSEILALLKALFLPKRLSIIHCLGHQKGDSAEARGNRLADQAAREAAIKTPPDTSTLLAGKRTADGSEFEKRTADGSEFESPKKKAKVE

SEQ ID NO: 6893 - protein, 2096 aa, synthetic construct
MPAAKRVKLDGGDKKYSIGLDIGTNSVGWAVITDEYKVPSKKFKVLGNTDRHSIKKNLIGALLFDSGETAEATRLKRTARRRYTRRKNRICYLQEIFSNEMAKVDDSFFHRLEESFLVEEDKKHERHPIFGNIVDEVAYHEKYPTIYHLRKKLVDSTDKADLRLIYLALAHMIKFRGHFLIEGDLNPDNSDVDKLFIQLVQTYNQLFEENPINASGVDAKAILSARLSKSRRLENLIAQLPGEKKNGLFGNLIALSLGLTPNFKSNFDLAEDAKLQLSKDTYDDDLDNLLAQIGDQYADLFLAAKNLSDAILLSDILRVNTEITKAPLSASMIKRYDEHHQDLTLLKALVRQQLPEKYKEIFFDQSKNGYAGYIDGGASQEEFYKFIKPILEKMDGTEELLVKLNREDLLRKQRTFDNGSIPHQIHLGELHAILRRQEDFYPFLKDNREKIEKILTFRIPYYVGPLARGNSRFAWMTRKSEETITPWNFEEVVDKGASAQSFIERMTNFDKNLPNEKVLPKHSLLYEYFTVYNELTKVKYVTEGMRKPAFLSGEQKKAIVDLLFKTNRKVTVKQLKEDYFKKIECFDSVEISGVEDRFNASLGTYHDLLKIIKDKDFLDNEENEDILEDIVLTLTLFEDREMIEERLKTYAHLFDDKVMKQLKRRRYTGWGRLSRKLINGIRDKQSGKTILDFLKSDGFANRNFMQLIHDDSLTFKEDIQKAQVSGQGDSLHEHIANLAGSPAIKKGILQTVKVVDELVKVMGRHKPENIVIEMARENQTTQKGQKNSRERMKRIEEGIKELGSQILKEHPVENTQLQNEKLYLYYLQNGRDMYVDQELDINRLSDYDVDHIVPQSFLKDDSIDNKVLTRSDKARGKSDNVPSEEVVKKMKNYWRQLLNAKLITQRKFDNLTKAERGGLSELDKAGFIKRQLVETRQITKHVAQILDSRMNTKYDENDKLIREVKVITLKSKLVSDFRKDFQFYKVREINNYHHAHDAYLNAVVGTALIKKYPKLESEFVYGDYKVYDVRKMIAKSEQEIGKATAKYFFYSNIMNFFKTEITLANGEIRKRPLIETNGETGEIVWDKGRDFATVRKVLSMPQVNIVKKTEVQTGGFSKESILPKRNSDKLIARKKDWDPKKYGGFDSPTVAYSVLVVAKVEKGKSKKLKSVKELLGITIMERSSFEKNPIDFLEAKGYKEVKKDLIIKLPKYSLFELENGRKRMLASAGELQKGNELALPSKYVNFLYLASHYEKLKGSPEDNEQKQLFVEQHKHYLDEIIEQISEFSKRVILADANLDKVLSAYNKHRDKPIREQAENIIHLFTLTNLGAPAAFKYFDTTIDRKRYTSTKEVLDATLIHQSITGLYETRIDLSQLGGDGGGGSGGGEAAAKGGTLNIEDEYRLHEISTEPDVSPGSTWLSDFPQAWAETGGMGLAVRQAPLIIPLKATSTPVSIKQYPMSQEAKLGIKPHIQRLLDQGILVPCQSPWNTPLLPVKKPGTNDYRPVQGLREVNKRVEDIHPTVPNPYNLLSGLPTSHRWYTVLDLKDAFFCLRLHPTSQPLFASEWRDPGMGISGQLTWTRLPQGFKNSPTLFNEALHRGLADFRIQHPDLILLQYVDDLLLAATSELDCQQGTRALLKTLGNLGYRASAKKAQICQKQVKYLGYLLREGQRWLTEARKETVMGQPTPKTPRQLREFLGTAGFCRLWIPRFAEMAAPLYPLTKPGTLFNWGPDQQKAYHEIKQALLTAPALGLPDLTKPFELFVDEKQGYAKGVLTQKLGPWRRPVAYLSKKLDPVAAGWPPCLRMVAAIAVLTKDAGKLTMGQPLVILAPHAVEALVKQPPDRWLSNARMTHYQAMLLDTDRVQFGPVVALNPATLLPLPEEGAPHDCLEILAETHGTEPDLTDQPIPDADHTWYTDGSSFLQEGQRKAGAAVTTETEVIWARALPAGTSAQRAELIALTQALKMAEGKRLNVYTDSRYAFATAHIHGEIYKRRGWLTSEGREIKNKSEILALLKALFLPKRLSIIHCLGHQKGDSAEARGNRLADQAAREAAIKTPPDTSTLLAGKRTADGSEFEKRTADGSEFESPKKKAKVE
